United States Patent Application Publication US 2011/0183924 A1 - sequence listing, part 219

SEQ ID NO: 557497 - DNA, 124 bp, Homo sapiens
aggtattactgtgccataaacatcaccagctctgcaagttctttgctgggttatttggttgcaatttgaaaatctccacattggatttgtagtgattatactgctgtagatactcctcgatgta

SEQ ID NO: 557498 - DNA, 120 bp, Homo sapiens
acctcggcccgtgtttttccttctttattggaggaacgtaggacagagttgtgtctttctttataactaaatgataaactatgcttttttaaaagagtgactgttagaactttgtttggt

SEQ ID NO: 557499 - DNA, 574 bp, Homo sapiens
  misc_feature (48)..(48): n is a, c, g, or t
gtgctcgtatgaggtcgacttcctgggctcgagtgatgtcctgcctcnccttttgagtagctgggagctggaccacaggtgcatgccatcacacctggctagtttttatatttcttgtagagacaaggttttgccatattacccaggctggtttcaagctcttgagctcaagcgatccacccatcttggcctccccaagtgctgggattacaggtgtgagccactactccagaccaaagctgcagttttaagtaggaaggtcaggccttctaagaaagtgatccctgaaagggaagccttgtagcaacccgggagaagagtagcttcgagagggaggagtccagtagggcaaaccgaatgtgtgaggaacagcaaggtggtcagggcagatagagaggcgtgagggcagggaatggtggaaacgggccaatactttaacaacagacaatgtctactggctgtgctgtactcactgcttcaggcaataaaatccatgccctttttttttaattcaaaaaatttttaaatttatgtggtgcctgtttccagtcagccagctcacggccagctgagt

SEQ ID NO: 557500 - DNA, 253 bp, Homo sapiens
acgagcgcagcttttgtcgcgacctggtagcttgatctctcatggctcacaagcgacccgagaacagcccaacgcaaggcatcgaaaacggacgaccaagcagagaacggcaacggtgaaagctggcgctcgccagagcgcaccaaggcatcaagctgccccagccgtgtctcatgtgacgggtgcaactgagtcgccccctgatgaaccggcgcacgttgagcgggatcgcgtgggcagaaggagcgggcca

SEQ ID NO: 557501 - DNA, 559 bp, Homo sapiens
gggtttctctttaattgggaaaaatgtcgccaagcgccgattaaattcagcatcccaaccatgtgccccctccaaaggaagaggaaccttgcccgtttcctgttctctttggttggcccaaagcataatgctgtccaccccacccctattgaaaactggggggaaattgcggtttttccgtttaaaaaggggagccgttaaaaaaaaacccctgtttttcccccccttaactttggttttgggaaaagcccctggctccctgggaattaaccccccgtaaccaacgtggggttttggtttgttctccccccaattggggggttccgtgttcaagggcccccccatttgccaaggggggttgggtttttttaaaacccgggtcccttttacccggccccccagcccccttaatgaattgccggaactggtttttaaggggtttgatttttaaaaagggggtcttttccgccctttttccgtaagggggcttttttttaaggccaagttttttttttttgggccggtgtccaggggccattaaagccccctgtttttttta

SEQ ID NO: 557502 - DNA, 879 bp, Homo sapiens
  misc_feature (85)..(85): n is a, c, g, or t
  misc_feature (96)..(96): n is a, c, g, or t
  misc_feature (98)..(98): n is a, c, g, or t
cagtttcatgcccatcgtcctagaattaattcccctaaaaatctttgaaactagggcccgtactttaaccctatagcaacccccntcctaaccccncntcataggagccataaaaaaaaaaaaaaaaaaaaacaaaaaaaaaaaatgtgtgtgcgggacgccccgaggcccccgcaaaaagagcttcttaacacacacctctcgttgtgggcgggcggcggcgcccccagcaaggtacgcggtgaacactggtgccaaaagcggtgtgctcccaaggaagaaccgcgggcccacggaactaagggcgtcggcgattccccccccatataaaaaaaaccgcccgcggggcgacaaacccgagccgtcctcgcgaaaccaaatccccaccaagcggcagctcccgcgacggtccctaaccaccggggcatcctcacacacacgcggcagtccccaacgccgccgccccgacatctatccacatatacaccgcccccgcacccgcgggcactccaccacgacaacaacacccccaccgacctgcaacaaccacccccataaccaacgcatcttactctgcgcaccacaacagagagcacacctccaccccacaaaacgcaggcactatgctatcacacaccatcgacacacctccccccgccagccccacaccaaaactcaacctcggtgtcgcacacaggagctccacaaactcaaaacaggcgcaccaggacgctcacaccaacccgtgaagcgcacacaacaacaagcgcgataacacaacaccacgcgccccaccctccccaacgcaccaaccaaacagcggacgacaccacaccacccctcctactgcactctaccctcgaacaccccaacacaaac

SEQ ID NO: 557503 - DNA, 394 bp, Homo sapiens
tcccctaccgaagagttgaaacaaacctgaaaaataagtttctcaaagtatgactgggttttacattaaaaatccagggtaataagagataccaaaccaatctatccatggcctatcaaaagattctaccttttccataggaagggactggcaagaaaggatatttaattttcaatatcagccaattttgcctgatgggtaattccttgttttaataaacagcatcaataggatatcatttaaagctaccctgaaatgttccttctctgaggcatcagggccctgtgtctggacagtgaatacctgtcaagtgaagagtcccatgcattgaaggaaattgccagtcctcatgaatgaacgctgaaaggaagtctgatgtgcgccattctatcat

SEQ ID NO: 557504 - DNA, 314 bp, Homo sapiens
tgaagttaaaagttttaaagtttgataagttccactaatgaatttcccctttaatggctttgccttttgtgttgtagccatgaaacctttgcctaacttaggatcatagagatctgtccaggcgccggtggttcacgcctataatcccagcactttgggaggctgaggcgggtggatcacgaggtcaggagttcaagactagcctggcccaagtggtgaaaccctgtctctactaaatatacaaaaattagccgccgggtgtggtggcgggtacctggaatcccagctactcgggaggctgaggcaggagaatc

SEQ ID NO: 557505 - DNA, 571 bp, Homo sapiens
ctcccacctcagcctcccaagtagctaggactagaagtgtacactaccatgcctggctaatttttttttggtacagcctgggcaacatggcaagaccctgtctctactaaaaatacaaaaaaattagctgggcgtggtgacaggtgcctgtaatcccagctactcggtaggctgaggcaggagaatcacttaaacctgggaggcagagattgcagtgagctgagatcctgtcattgcaactccagcaacaagagcaaaactccaaaaaaaaaaaaaaagagaaaaaaaaatgactacaactgaaggcctcttgtgattgtaaagtagaagaaattagatctctggatactgaacaggagaaaggagattagactttgaaatcataaattagcaaatttcaaaaaggggcctccctgtttgcccagcaaaacattaaggatctattattctgttgacatgttaactttctctaatctttatgctgtcttttacagatgggctgatttctttgtcattctagagccttaaaatattcatacattttgatctattgataaatttcatcactgga

SEQ ID NO: 557506 - DNA, 481 bp, Homo sapiens
  misc_feature (70)..(70): n is a, c, g, or t
  misc_feature (88)..(88): n is a, c, g, or t
  misc_feature (128)..(128): n is a, c, g, or t
  misc_feature (184)..(184): n is a, c, g, or t
  misc_feature (196)..(196): n is a, c, g, or t
  misc_feature (226)..(226): n is a, c, g, or t
  misc_feature (234)..(234): n is a, c, g, or t
  misc_feature (290)..(290): n is a, c, g, or t
  misc_feature (355)..(355): n is a, c, g, or t
  misc_feature (366)..(366): n is a, c, g, or t
  misc_feature (456)..(456): n is a, c, g, or t
atgctgagaaactgatgaagctgcagaaccaacgaggtggccgaaacttcctttaggatatcaagaaacnagactggtgatgactggnaaagccggctgaaatgcaatggagtgtgcattacatttgnaaaaaatgtgaatcagcctactggactgacaaactggccctgcctgaccccattgngtgacttcattngacacattacctgaatgagcaggtgaaagncatcaaanaattggtgacacgtgacccaacttgccaagatgggagcgcccgaattggcttggcnggaatatctctttggcaagcacaccctgggagacagtgataatgaagctaagcctcggctaattncccatagccgnggggtgacttcctggcaccaaggagtgcatgcatgtggggttccttacctttctataagttgaccaaacatcacttaagtctttgattgnaccattcttcaataaggtttgtccc

SEQ ID NO: 557507 - DNA, 122 bp, Homo sapiens
ctgccgacactagagtatcccctcagcaccactgcatgatgtcaccgatggaggatgggacgaaaatatccacgaagtatatatatgatattttctcccatcctccatcggggtaccgagcg

SEQ ID NO: 557508 - DNA, 100 bp, Homo sapiens
ggagctggggggggctatcctgggcctctcgaataatttccggtagagcatctcacgggtctcctaccatgggtgatctagggattaatagagagaaagt

SEQ ID NO: 557509 - DNA, 1076 bp, Homo sapiens
gggagcccgggtcctccgcgggcaggaaggggagggcccatcggggctaggggaaccccggcgcagacctggggtggggtcggaaaagctgtttcatcgcccgctcccgggccctccgctccctgcctccctcagctctctcggctggcaggagtccccgacaggccacccaggcactctccagaggcagcattccgggaggcagcggacgcagaggactcgccatgtcccagccggggacagaagcccgacgactccaccgcggacccggcgagcagccgacagccgacgcaaccatgagcatgtcagtgagaaaagcagtgaatcgccttccaaaaccaggagaaacagaaaggatcagatgagaaaaaagcagcaagcctcggaagcaagtcaatcctccagaacgcaatgacaggatggaaacagcctcggcacaccaaggatgtcaagataaccatctggtgcaaccagccaagtcattccaggtatgaatcccacagaaagcaaggctgtaaaaagcaggaacctgagaagaagtcacagtcaagcaagctgtctgatggtacacatgagaaaaaagtcccaagaaggacagccaggagaacacacagagccaaaagcctacccaagaagggctcagatcacaggcaagcagcgatgctcagcgaaaggaagcagtaccagaatcagatgaaccagacaaggcatcacgagaaatccaacagaaccaaagaaataaaccacagaacatgaatcatgctggtggagagagtggcaggaccacaggcaaaccctgggcacggcgggctgcaaggcaaacacgaaacggacgcgtaaaacacggcgtggccaggacgaatcaacgcggaatcaagcccaagcgggaacaggccaggacgtgaagtgctagacaacgaaggacataaagaagccctgagggacgcacggaagacacgacgacgaaaccaagtgaggcggccccagtgacaatgccacagcacaccaccgaggacgactgcaaaagacgagcatgaccagaaaatagggagcgggacaaccaagagccaaaacaa

SEQ ID NO: 557510 - DNA, 479 bp, Homo sapiens
  misc_feature (418)..(418): n is a, c, g, or t
tgctctggtcacctttgaggaccccaaagtggttgatcggttgctacaacaaaaggaacacagagttaacttagaggactgccggctgcgggtgcaggtccagcccttggagctgcctgtggtgaccaacattcaggtgtccagccagccagataaccacagggtgctcgttagtggttttcctgctggacttaggctgagtgaagaggaactgttggacaagctggagatcttctttggcaaggcaagaatggaggtggggatgtagaagacccgggagatgctgcaagggaccgtcatgctagggtttgctgatgaagaagtggcccagcacttatgccagattggccagttcagagtcccactggaccggcagcaggtcctcctgagggtctctccctatgtgagtggtgagatncagaaagccgagatcaaattccagcaagcccctcattcagtgctggtgacaaatattcctg

SEQ ID NO: 557511 - DNA, 644 bp, Homo sapiens
  misc_feature (19)..(19): n is a, c, g, or t
  misc_feature (44)..(44): n is a, c, g, or t
  misc_feature (56)..(56): n is a, c, g, or t
  misc_feature (58)..(58): n is a, c, g, or t
  misc_feature (81)..(81): n is a, c, g, or t
  misc_feature (89)..(89): n is a, c, g, or t
  misc_feature (118)..(118): n is a, c, g, or t
  misc_feature (135)..(135): n is a, c, g, or t
  misc_feature (149)..(149): n is a, c, g, or t
  misc_feature (154)..(154): n is a, c, g, or t
  misc_feature (174)..(174): n is a, c, g, or t
  misc_feature (182)..(182): n is a, c, g, or t
  misc_feature (202)..(202): n is a, c, g, or t
  misc_feature (206)..(206): n is a, c, g, or t
  misc_feature (209)..(209): n is a, c, g, or t
  misc_feature (215)..(215): n is a, c, g, or t
  misc_feature (217)..(217): n is a, c, g, or t
  misc_feature (221)..(221): n is a, c, g, or t
  misc_feature (225)..(226): n is a, c, g, or t
  misc_feature (241)..(241): n is a, c, g, or t
  misc_feature (260)..(260): n is a, c, g, or t
  misc_feature (272)..(272): n is a, c, g, or t
  misc_feature (281)..(281): n is a, c, g, or t
  misc_feature (288)..(288): n is a, c, g, or t
  misc_feature (297)..(297): n is a, c, g, or t
  misc_feature (309)..(309): n is a, c, g, or t
  misc_feature (313)..(313): n is a, c, g, or t
  misc_feature (316)..(316): n is a, c, g, or t
  misc_feature (319)..(320): n is a, c, g, or t
  misc_feature (334)..(334): n is a, c, g, or t
  misc_feature (347)..(347): n is a, c, g, or t
  misc_feature (349)..(349): n is a, c, g, or t
  misc_feature (352)..(352): n is a, c, g, or t
  misc_feature (360)..(360): n is a, c, g, or t
  misc_feature (362)..(362): n is a, c, g, or t
  misc_feature (367)..(367): n is a, c, g, or t
  misc_feature (382)..(382): n is a, c, g, or t
  misc_feature (386)..(386): n is a, c, g, or t
  misc_feature (405)..(405): n is a, c, g, or t
  misc_feature (416)..(416): n is a, c, g, or t
  misc_feature (430)..(430): n is a, c, g, or t
  misc_feature (432)..(432): n is a, c, g, or t
  misc_feature (459)..(459): n is a, c, g, or t
  misc_feature (465)..(465): n is a, c, g, or t
  misc_feature (468)..(468): n is a, c, g, or t
  misc_feature (472)..(472): n is a, c, g, or t
  misc_feature (487)..(487): n is a, c, g, or t
  misc_feature (498)..(498): n is a, c, g, or t
  misc_feature (502)..(502): n is a, c, g, or t
  misc_feature (538)..(538): n is a, c, g, or t
  misc_feature (548)..(548): n is a, c, g, or t
  misc_feature (619)..(619): n is a, c, g, or t
tgctttgaaatttagaaanaaattttatttaagatctgaaaaanaattcctaaaanancaacttttccagaaaaccggggntacacaanaatgcattgcctctatcatgttagaacgngcataagactcaaatanaaaaaccatgaaanaaatnaccatccttcaacaatttgngcaaaganagaatgcctaagaacaacanaganggncttgcngngggngggnngttttacttcaagcnccaaaaaaaaaaaaaaagngcacaaatgcangggttttcngggatanacattaagnggaacctttggnactnggnatnngggggttttgtcanaaagcattaacananatnagaaaatngngtggngtcaaaggggtaggnaccnccagcatttaagcaatgtngtgaactaggnaataaaatgttctncngaatgtttcttctttgttctaattacngcatanacngggngcaactttgaaatgngaaaaggggcntacnccccttttattttctgtttaaaacagaacggaaaanaaactgaaanaaaagccctgttatacattaacgattttaaagaacatcaattttacaagaaaaagactaagaacaaaaagngtttacagaaacaggacaaaaatgg

SEQ ID NO: 557512 - DNA, 244 bp, Homo sapiens
aatcctagaaacgggtttagcaggattctccgaatacatacgaggaggcaccatataaccgagataacggatttcagcacggtgctcactgttgtcgacggaacttgtaaaaggaggcatgcaccgtaatggtgaatacacgtcgaccaggctccactgttaacgatattgggacgtcatcacggtgctcacgtgtctgacggaacttgtccaggagaggcatgcaccgcagtggtgaatacac

SEQ ID NO: 557513 - DNA, 197 bp, Homo sapiens
tgcaagtacttgacacatactgcaaatgatcctccagaaagggtatactcaatttatatacccaataaccagatcaggatatttgcttttttttttttccccacttagtccaaaaaaccaaaacaaaacaaaaaaagctcaaccttcccagtattcaattcggtaaaaccaatgaggtctcattgggctctccaaag

SEQ ID NO: 557514 - DNA, 1321 bp, Homo sapiens
  misc_feature (115)..(115): n is a, c, g, or t
  misc_feature (571)..(571): n is a, c, g, or t
  misc_feature (579)..(579): n is a, c, g, or t
  misc_feature (601)..(601): n is a, c, g, or t
  misc_feature (1077)..(1077): n is a, c, g, or t
  misc_feature (1196)..(1197): n is a, c, g, or t
  misc_feature (1275)..(1275): n is a, c, g, or t
gaggatcttcatggtacaactccagcctatctgagcactctcactgtgcatctgaaaggaacaggagactgcaggaaagacagtgcctggattaacttaaaggaactaaaaattnggaatttttactcttgatatccttccaaatcaactctctcaatgttcccatcctcaaaactatcatatggggtaactgaggcagtcagagatttactgactcaatgtcactcaattgattctgagttcactgctgattacatccgaccaaactgctttttctgaagtctactccgtttaatcatgctggtgatgattttgtgcggctctgggacaaactccacctggctgaagataaagcaaatctgcggtgacttagtcctcctgtcatttcccatcagttccccactctcctcctctgcccctccacagtctcccatgcaggctgacaccatatgacggccttaatggagtccaccgagtatttcaggttctctcctgggccacttgaaagtggatgtacccatgggatttgctttgacccaggagatgtgcgtggaagtgaagcgtgtcaccncgaggcanaagagttgggagccattgagangggccactctctccttcatctcttagagcagctgacagctcccatatggaggctgctcctttattctcgtggcaggatgagggcatgtggggcacagggcacaggagagccatggaggatgtgcagcatgggcaggaaaagagccttcagtggtgtacatttccatagtttggggctgtttcttacctacagtgatacctagcccatcctagcaggcatgcaccatctactccacactctgtgatgcagactagcctgccgtcagaacacgaactggtggtcagacacaggtaggtttcagttccagctctgcctcttattgactgcaacctcaggcttaactttcagtctctgagcctcagtttcaactctgtaaaatgaggtggctataccatctcaggttgcagagagaattaaatgaaatataagtgcatgtagagcattgaacccagggcctggcacacacagtgagtacncaatgttagccaggtagcttcataatgcatactgattgtcaatattcagacaatgcagtaaagtgttaccaaaaataaaagtaaacttatttgcatatgtattctttcaatctttattnnaaaacagggtaaaactatgcatattctttcatagccagtgtttttctcttcttagtagagacagggtttcactgtgtnggccaggatggtcttgatctcctgacctcatgatccgcctgcctcg

SEQ ID NO: 557515 - DNA, 832 bp, Homo sapiens
  misc_feature (115)..(115): n is a, c, g, or t
gaggatcttcatggtacaactccagcctatctgagcactctcactgtgcatctgaaaggaacaggagactgcaggaaagacagtgcctggattaacttaaaggaactaaaaattnggaatttttactcttgatatccttccaaatcaactctctcaatgttcccatcctcaaaactatcatatggggtaactgaggcagtcagagatttactgactcaatgtcactcaattgattctgagttcactgctgattacatccgaccaaactgctttttctgaagtctactccgtttaatcatgctggtgatgattttgtgcggctctgggacaaactccacctggctgaagataaagcaaatctgcggtgacttagtcctcctgtcatttcccatcagttccccactctcctcctctgcccctccacagtctcccatgcaggctgacaccatatgacggccttaatggagtccaccgagtatttcaggttctctcctgggccacagagtgagactccgtctcaaaaaaaaaaaaaaaattgtagatagtatccaggttttggctctctaggtcttttttatccagctcttggtcatgaattgcacgtcacagaggtttctgaaaaggcttgcccaggactgggaccagattaccctttattaatggtcacagtggcagcctgggctcatggtcccactttcccgtggtttcatcccttaatagaccaaaagaatggtatctttcaactcctaacaaaagctctactatggtcaatgtaagaacattcatactctgtaaaatggtaagccctctgaaaagccaaccgtgaactagt

SEQ ID NO: 557516 - DNA, 142 bp, Homo sapiens
cgtgggtcagcatttcaagttgcagtagtcaggcaatgcggtcagtcagttcaggcatcatcatcacattgttcccattcaagccatggttcatgttcagggttgtcctggtcacactgctcattcattccatcctcatgtg

SEQ ID NO: 557517 - DNA, 100 bp, Homo sapiens
ggtcggtccttttaacactaacctcttgtgtgtgcgtgtgtgtgttgttttaatggagaggcctccttagctttacttcccttgagtcttgtgggcgtga

SEQ ID NO: 557518 - DNA, 1534 bp, Homo sapiens
  misc_feature (1145)..(1145): n is a, c, g, or t
ttattcttaggttatgtttggcggtgtatgggtgaggagggatataagacgtgtggtcgtgatgattctgctagagcatgttgaactactgttcattttaattggcgtttgatttgattctggtgtgtttttagttgatcatatagaacgtcggcgagtgatagtatatgattgtgttatgctatcttgagttttattcagtaagtgatcgggtgtcgtgttgtagagatagttgtgatttgtgcacttggttgtagcgagtgtggtatgtataatctggtaataatcggggtgtgattgatttggtggtatatatggtggatactatttttggagtttcactaaatactgtggatacatatgcttgatactattaccatctgttgtcataatgcgtgaatcttgttggttattgtcagctcggtttatagtgggattctcccattcaccctgctagaaggtagtcacgcgctttgatgtgtgagtccttcgagtcactgcgaagccatgccgcgctcctgcgtattgagctatcaggtcgacttcgagattgaaatgtctcttctaaagggacagattattctggctgtaacaagtgctgccattgtgtgaatgcctacctcctatgttaatgtactgactgttcaacgctgcacgaaagatattctgaagtcttgcgagtgcaagacttagtggtcctatgcattcttcacgaggacgaactagagcgttccctgattagctcatgtggctctccatctgggctcggaacatagagtctacgatcgaccataactgatgtctactatgagtctccgcagcgttgagttacctcgagccgctgttctatagccaactagtcgtgctggcactgcactaacgcatgtcgacgttctacgtcgcctataggggtaccactgaattacaggagtccgcttcaatctacgaccatgtccgcatttgagatgaggatacgcatttcttcagctgatatggtctaggtccttagtcgatatttcgcgacgcaagattgtgtaatacgacgcaattgctctatgactttgtccctaatggtagtcagtcccgagttatcttatacgcggacaatgtatttgctttgcacggccattcagtatgccatgatncagtgttctatgtcttgccaatactattgtgcgaaatacactggtcgacttgctcaaacatccagcgatcccagtagcactactgaatgacacggggatcgccgcaaataaaacaccagcatttgcttctcggtgtcgaagtgctcttagcgcatgcacaaccgtacttgtttccaggaagcttatcgtctattgagtacttgcaccgcgaatgatgagtgtttagctattatacaggagtcgacaagataattataatatcttggtgtcttgtttctattgtgtggctttttataaaatgacaaatatgtatctgtgttgtgataaaaagtattttatttgtttcaatgatatgcatgataacctctctgtaatatataataattgtc

SEQ ID NO: 557519 - DNA, 343 bp, Homo sapiens
caaaatggtggcgccgaggcggaggccggcgcacctgggggcgccacacgccctacgggatccccgcagaccgccgccagctggacgcgagccccgggtccaggcggcccgcactggtctgcgccaggcccagcccgcaggggccgcccacagccggtggcccgcgtcgccgctcggtgtccgcgggtctggtgctggcgggggcgcggggcccggcgcggccgtctcggcctcacccagcggtccgcgccggggagagggagcgcactcacctcagacgcgccccgggagccgctggaagagcccgggaaaggaggcggagccgcgcgaatgaatggagccg

SEQ ID NO: 557520 - DNA, 111 bp, Homo sapiens
ctgggcatatggtgggcgtctacaagggcaagaccttcaaccaggtggagatcaagcccgagatgatcggccagtagccggggcgagttctccatcacctaacaagcccgt

SEQ ID NO: 557521 - DNA, 386 bp, Homo sapiens
gaatcccaacgtccgctaagagtacaacaaaaaacaacaatgatccagccatgacagggtgcaccgtgttaaccccgagctactcgggaggctgagacagcaagaatcgcctgaacccgggagggcaggggttgcagtgagccaagatcacaccactgcactccagcctgagcaacagagtgcgactccgtctaaaaaacaaaaacaaaaacaaaaacaaaaaccccccaaaaaaaaaacgaaataaatgctgtctcccccattcggcaaaatgtggcttttctgtagtcctacctctccagctacctatggactagggtaaacaatcgactatgcagtctaggaccaatttggcttagggacccatggtagcccagccacaaaac

SEQ ID NO: 557522 - DNA, 276 bp, Homo sapiens
gggggccgggggcctttttttttttggggcctgggccccccaaggtcctgggggggggggccggttgcccctggtttaaaaacccccccccccccccttttggggcggcccaaggggccctttaaccccccccggttggggggttttatttttggggccccaccggggcgggccccggggcctcccccccccccaggggggggggggggggggggcgggggggggttttggggaacccccccggggggggttttttttatttggttttgtttttga

SEQ ID NO: 557523 - DNA, 156 bp, Homo sapiens
  misc_feature (17)..(17): n is a, c, g, or t
  misc_feature (41)..(41): n is a, c, g, or t
  misc_feature (104)..(104): n is a, c, g, or t
  misc_feature (155)..(155): n is a, c, g, or t
gctaaacctagccccanacccactccaccttactaccaganaaccttagccaaaccatttacccagataaagtataggcgatagaaattggaaacctggcgcantagatatagtaccgcaagggatgattataaccaaggcataatatagcggant

SEQ ID NO: 557524 - DNA, 6384 bp, Homo sapiens
cagacttcaccacaagcaggaatgcagactcagcctcagatagcaactgctgcacaaataccaactgctgccttggcctcaggcttggccccaactgtacctcagacacaagacacgttcccgcagcatgtgctcagtcagcctcaacaagtcagaaaggttttcacaaactcagcatcatcaaatacagttcttccatatcagagacatcctgccccagctgtccagcagccctttatcaataaggcctccaacagtgttcttcaatccagaaatgctccgcttccatccctgcaaaatggacctaacacacccaacaagcctagttcacccccgccaccccagcaatttgtcgtccagcactctctatttgggagtccagtcgccaagacaaaagatcccccccgctatgaggaggccatcaagcagacacgcagcacacaggcccctctgccagagatttccaacgctcacagtcagcagatggatgacctctttgatatcctcattaagagtggagagatctccctccccataaaagaagaaccttctcctatttccaaaatgagaccagtgacagccagcatcaccacaatgccagtgaatacagtggtgtcccggccaccaccccaagtccaaatggcaccacctgtatctttagaacctatgggcagtttatctgccagcttagagaaccaactagaagctttcttggatggaactttaccctcagccaatgaaattcctccactacaaagcagcagtgaagacagagagcccttctctctgatcgaggacctccagaatgatctgctgagtcactcaggtatgctggaccattcacactcacccatggagacttccgagacccagtttgctgcaggtactccctgtctgtctctcgacctgtcagactcaaacttggacaacatggagtggttggacattaccatgcccaactcctcttcaggactcactcctctcagcaccaccgcgccgagcatgttctctgctgactttctagacccacaggacctaccgctgccatgggactaacgtcacagatttcttttctgagagttgatgaggtttaagaacatgaagattctaaaaggtcagtttttagagatagatctatagttgcattgttgcaatcaaaatatgttgtcacagaaagaataggtggaaggtcatagcctggaacccaagtttgaaaacatttcattgtgttcagtagtgaatttctacagtttaacatagcacagggccttctgaaaatcgcacttgtcaaagacgactcatctatttctccagacttcagtaaagaatgaaaagtacctttagataaaaacaaagaagagtaatatatgcagcacagtgacgttaggattctggtaattaactacatttaaatctctggtcactttaagaccctaaataaaaggcagacagctccactcaaaaactaaggctgatgtgagggaggtgagaggtcactgcacttggtacttcctagagacggccggagccaggcccaagacacagcagaggtcaaaggcagtggagagccttggccagttcagtgacagcttctggctgaagacttttggttctattcagaaacctgtgtcgtttttttggtgttgtagtttattttgtgattttttggaatcgtactttatatttccaaatttaaatttaaatgcaagatctttcaacataaacagaagatacctacaaaatactgtcagaagtccaggtatactgataacactgaaaattctattagcaaccttctgggttggttagattgattttaatgtatatattagacatttgtatgtatgctctgacattgtgatttgtacagcctacgctggggtaaggaaatgggtatccaaggtcctacttttttaatagctcgaatatttctagagtacttgagccacatgtatttctgtatttaaagaattgctgactaactttcaggtaaccagacccatctcaaagaaccaagaaaaggctttagcatgaaatatctttctgagctggcgagttagaagaatggaaggtaaggggaaggtctgtcatctacccaggacattcccatgatgagtacaggtcagattgtgccacaaggtgggcctccacgtccctgccctggccctctttcttctgtcactaaccctggttatcattttacaggcttgtaactggatattctaccagagctctcactatattgtcaagcctaagattgaaaaactggaggctttattagtgtttttatatagaaaacagttattacatatgtgttaagtcatttcttaagaattttctaaaatgccaactatcacaggattatttcaagctagtcattgaggtatatgacaaaatgtaaataacaaaaaactgaaatctaccaaaagagcatggagatttttcttaaataataatattgtgctctccacctcacccttgtgtaaaccctcaggtcaggttggttcccctgggtcacaaaatggtaaatgttccatactgacatgccggaggcagcctgacccgttatttggaaagaatttgtgaattatttctgggtttgtgttttgcctaagagctgatcttatttctgatttgtgtgtgtgtggtttataaattttactacgtgtaacaaaagtctgcttttccagcatgagcacactggagccctctgctcactggcacttcctgactcaaaggcactaacagtgctcatgtgccttccagacggttcaaggcagaggccactgtgctcagtgtagtctgtgatgaatagtttaagtgttcagaaattggtaaaccaacacacgggatacaataactctctgttaaccagaacaccgtcatttgaccaagccctacaagagtttaccacactagatgttctgtgaatcctcgagtcagttccattgagaggggcctgtctccagggccaggctatttacttgggaaagtatttttcttacagttcttggccacagtttttttgctgagggtttctgtctgggcctatcaggtccatacttagaccctgagcatcttcttcattcagatttgaatggcttattaaattagcaccaaatatcagtgggactgtagaaggtaaccgaacactagtaccattgactctcgttgaataactttatatttccataatcctgaattgtgtagatagttttctagctctcgggtccctttattgctttttaaaatagggtttgaaacatgccacaggaaggttgctctccaaaaatacacagtgcagtgcaagaaaatgctatctcattggcctactctcctatgaattgctaaagtgcccacttcacatatgtgtttaaacctttataaaccagtatttcacttttaaaaagacaaggcatctctacccattaactctgcaagccactccacttgcaccattccgcttgaccctcctctctcctggcttgggtcaccagccaggcacctgtgacacgagtgctgctctccaggatctccactacatgttccaggttggagtgaggacgcgctatgtgctcacactcatgtgacatgaccaaagatgatactctgtaaacaaggcccttctgaccggactcagtgcgtgtgatggtgagtgcaatgaggaagggtggatattgactaaagactggttgttgttgttgtttaggttagtgtcacagccattacagcacaagtcaaagtcgccagttgaattttcattatgcacgtgtgtggtttaagcagtggtactgttgtatatcatattgtaaagtatcatactgccaagaaaataactcctagaaaggcattatctcacatccccatcttactttcctacatgttctcaaaacacagtagtaccagccttacctttctgctgtatgtagatagtcagatcatcctactgggggtgggatgaatttaaaagttataccaaaatttctgtaaagtctttgaaagtctaggagtaggtggtcatcttgtacatttcagcaaagcatccactaggaaacctcataggacagtgttagtggttcacgttctagtgtttttcctgaaatgtgcaatctactgtatagtattgccacataattgtacatagatgtattctgaatttgtggaatttcttgcttagatactattgtgtttgtttcatatgaatatttttgtaattctaaaagagatcttatttaaatttcctttttaaaagccgcatggttctgtgatccatgtaactgacactttttggctttcagtgctgtttagaaacagtggcaaaggcagggtggtgctgcctgcaagctgctgcctatggaaggcaaagtcatagtaatgagatagcacctctgaactgtgcagtcagcataccctgagtgatggctcaggggcgcactacctattttgtcaccagagctgactcaggcttcctggaccctcaaccccagatcattccaggcagcatagctttcttcacagtcctttcagaattcccaggctgaaatcagccatagcagttgacaaaacagctatccccacaagtgatgagatagtccctttactgtcctcaaatggacttggccttagagacgtggtaaagcactttggcagggtttaaaatatttgtgagaagcccacatttcagtatacatcctcactggcttccatgcacccacctgacggtagcctcacagaagtcctggctgtcactcaggtggggagctcatggtgccgctggggactttttagagaaatgtaaagagaatagctattcagtgtctactagcagagcaacatgtgtcaatttaaccaaattcacaaataaccctccatttttcaatatctgctactgtaaacatgaatattgaatactgacaagagaatacccatacaaatcgtcccaccgccctagaggccacagaattagcccaaaattatcaaagaacattaactggaaggtcaggtttttcaaggaacatagcttacaaatgcatcagtgtgtatctggagagcatcctaactgcatttcaactcatcttttaagtgatttcagtcaaaactggaaaacaactaagatgtagtaatttttttttcctggttcaaaccttcaataacttgctcattcagcagtctctctgagctacatttttatttgtaaagtgactctgtctgcatggcaatgagcaggtgcgtgttttttccacattcgccctttcttgcagtatccagggaaacacatcattacaaagggtttctacctgaaatctttcatggaaggcctacaattcgaaaagctgcacatgtttacagaagagctcttaccctccatgcaaacactttgctctgtggtgtcacagctttgtgacaataagatggcaatctcggatctacaaggtgctgtcgggaatcaaataaaatatgttatcagagatatcatcacatctatagtgtttaacagagctttatgccaactactaagacaaagctttaacaaagtttatagaatactgaaactcgtaacaattacctctctacgtgatgctgtaaggaatcttgctaatttggtaggaagaggaagcatttaggaaagggtttagtatctaccaaaagtacttgacctcaagtaaccaatagtaatgcaaacttgctttaaaggaaccaaaggcattgccaagtatttgccaaaaggaggcactttttatttaaaatttgagactaatgagatctcaaaaatcagccccaaaaaggtattatccatttaaggttataattttcactaagatgtagatatttctcttattgttttcatgtaaaatagtatagagttgttttgttggtttaagagtaacattcagtagtaatacaaagttttttttctatgtagaaattagttttcttttcttgcttgcaatagaaatgcaatgtgataggtgtttctcttcttattttcattgtcacattatgtcttagcatctcactttatgaaaaaaaggagaaagataccaatctacagagccctgcttgttgaagcactagtttaatcaacaaaaaattatggcaatcgggggtccattcatctattgcctttatgttgttttttaaaagaaaaaccatgatgcctttgtatttgctgtttgcacccctgaaatcaattccatatcatgtttgaatgccatacattttgcacatgtactgtacataagtaatgcatactgtatttttatatgtgtgcacatttatcatcagatcttttgtacatagtggcagtattgtagctgatcgggaaatgtttgatatctcagcaattttgcatttttgtgtctcaaataaaagacattttgatgt

SEQ ID NO: 557525 - DNA, 129 bp, Homo sapiens
gatccaagtatctgccaggccaagccagctcaaggggaatagaactcagatggggccagatcagcctggggtctgagttgatctggaacccagactcagacattggcacctactccaggcagatccagg

SEQ ID NO: 557526 - DNA, 761 bp, Homo sapiens
  misc_feature (80)..(80): n is a, c, g, or t
  misc_feature (151)..(151): n is a, c, g, or t
  misc_feature (313)..(313): n is a, c, g, or t
  misc_feature (365)..(365): n is a, c, g, or t
  misc_feature (438)..(438): n is a, c, g, or t
  misc_feature (440)..(441): n is a, c, g, or t
  misc_feature (449)..(449): n is a, c, g, or t
  misc_feature (452)..(452): n is a, c, g, or t
  misc_feature (454)..(456): n is a, c, g, or t
  misc_feature (464)..(464): n is a, c, g, or t
  misc_feature (512)..(512): n is a, c, g, or t
  misc_feature (523)..(523): n is a, c, g, or t
  misc_feature (528)..(528): n is a, c, g, or t
  misc_feature (531)..(531): n is a, c, g, or t
  misc_feature (533)..(534): n is a, c, g, or t
  misc_feature (537)..(537): n is a, c, g, or t
  misc_feature (540)..(540): n is a, c, g, or t
  misc_feature (543)..(543): n is a, c, g, or t
  misc_feature (548)..(548): n is a, c, g, or t
  misc_feature (553)..(555): n is a, c, g, or t
  misc_feature (557)..(557): n is a, c, g, or t
  misc_feature (561)..(561): n is a, c, g, or t
  misc_feature (563)..(563): n is a, c, g, or t
  misc_feature (566)..(566): n is a, c, g, or t
  misc_feature (614)..(614): n is a, c, g, or t
  misc_feature (620)..(620): n is a, c, g, or t
  misc_feature (623)..(623): n is a, c, g, or t
  misc_feature (678)..(678): n is a, c, g, or t
  misc_feature (681)..(681): n is a, c, g, or t
  misc_feature (685)..(685): n is a, c, g, or t
  misc_feature (695)..(695): n is a, c, g, or t
  misc_feature (738)..(738): n is a, c, g, or t
gcgtgcggctgctctgggtgtgcgctattggtgctgctggcgcgtagggccgcagcctgggactgggccggctcggagangatctccggcgtgcgcttcaccccggtcgtgtgcggcctgcgctgcgtccatgggccgacgcggctcccgntgtaccccgacctgcgcgccccgcaacgccaccagcgtggacagcggcgctcccggcggggcggccccggggggacccggcttccgcgccttcctgtgtcccttgatctgtcacaatggcggtgtgtgcgtgaagcctgaccgctgcctctgtcccccgganttcgctggcaagttctgccagttgcactcctcgggcgccgcggcccccggcnccggttgtaccaggcctcacccgctccgtgtacactatgccactggccaaccaccgcgacgacgagcacggcntnncatctatngtnannntccacgtngagcacccgcagaggcgtcggtggtggctgcaccaggtggagcgtgtntctggcccttnggagnatncnnacnctnagncggtngcgcnnncngaancngcngcgcgggcggaggcggcagcgccctacacggtgtttgcacagagcgcnccgcgngangacggctactcagatgcctcgggcttcggttactgctttcgggagctgcgcggangcnaatncgcgtccccnctgcccgggctccggacgcaggaggtctgctgccgaggggccngctttgcctgggggcgttcacga

SEQ ID NO: 557527 - DNA, 246 bp, Homo sapiens
tagcaccatggtcaaacagaagctatattttgcatattagagactcagccatccattaagaacccatgtcgtcctctggacctgggaggcaatataacttggttttaaatagtatagaagaaaacttgtgatctatatattaatgtatcaccttcattgtaaatttagcaggaaatgcatcacaattataatttttttttgcaccagtgaaacaataaagatgctattgaaacttcggaaactagg

SEQ ID NO: 557528 - DNA, 241 bp, Homo sapiens
cgatctgtctgcaggcaggctgaatgcacttccgtgagtgctaggtggacctggccaggaggcagctgggggccagcgctggaagggcagcagagctctgggctggcacatgctctgtaggcatgggcaaggagggccgttgagctgaggggcccacggcacaagttggttttaggaaaaagggtgtgggccattggccgcgcgaatgcaagtttccacagttctagttaaggtgagacat

SEQ ID NO: 557529 - DNA, 205 bp, Homo sapiens
tgtttaaagaagagatttattttattatttaactttaaaagtcacaaatatgacttataaaaagggttctgagacacagaaaatatagacagaaaaaaatcagagtagagaactagaattacagaaacctaagaaatactaatactgagctttctatcacacaagaaaatgcacggaaatgaattatacatggataccaaattgt

SEQ ID NO: 557530 - DNA, 419 bp, Homo sapiens
tgatagacatgtgtcaaaattcaacaaacattgtccttttattcctaaatttgctttttactccaagccaactatcatccctataaagcggtggggatttgcgaaaatcacagtgtcctcagagctctataaagttaccgtcaaagtggggaggcaacgaggtaaaatataggagaggaagagaaggaaaatatttcaaagtatgccttttgatacttttgaattttcagccctgtgattatgttacctactccagaaaataaaattaaagaggagagactggtactcaagtttctgcattatgtaatttagaataaaaaagtactcttcactaagaaaggaacagaggagaaagaagagaatttgttaaactttttgtcacgtgtggaagagggcaggaaaagaattgttggggacag

SEQ ID NO: 557531 - DNA, 449 bp, Homo sapiens
  misc_feature (99)..(99): n is a, c, g, or t
ggagtctcatttgttagtttatagtggtaactaagggtaaactcagggttccctgagctatatgcacactcagacctcttgtgctttaccagtggtgtntgtgagttgctcagtagtaaaaactggcccttaccttgacagagccctggctttgacctgctcagcccctgtgtgttaatcctctagtagccaattaactactctggggtggcaggttccagagaatgcagtagacctttgtgccactcatctgtgttttacttgagacatgtaacctatgatagggaaggaactgaatttctccattcatattttataaaaccatttctaagttttatctttccttgtggccttataacgagtgtgccagtgggacaagtggactaccgaacatgaaccttctaggctaagcaaaaagatgctggagatattggatactctcatttaac

SEQ ID NO: 557532 - DNA, 228 bp, Homo sapiens
cttcatataaccatatctaatcatatgttcatatttacatcatatacataaatcatcatcatatatgtatacacaataaaatcttaagatatatatagcataagtattctctatacagtactagtacaatatgtactccagaactgttgctaagtatgatatctatactcatatctataatctttgtctacccattacctgagaggtattaccctgggtagtcacaga

SEQ ID NO: 557533 - DNA, 112 bp, Homo sapiens
ccggtaacatgagataagcctccacttgctatggtgatctgccgcagaggatgcccgtagaaagggaaatcagaggacaagaccactctcgaagcctgccggttgaagatct

SEQ ID NO: 557534 - DNA, 149 bp, Homo sapiens
ggtgtctgcagctgctgtatgcgaagagagtttggcgcgatgtctcacaccattttgctggtacagcctaccaagaggtccaatcttccggataccagatatagcctaattacaaagaaagcattaacctggctctgaggtgactaaag

SEQ ID NO: 557535 - DNA, 329 bp, Homo sapiens
catggagccattatccccattggcagaaaaatttttttttaaaaaaaaagactagaataacccaagaaaccccctttaggattatgcttccctcaaaggaggcaggcagggaggaccccccaggggctttaaaaccctgggcatgttttctttttccaattgggcaatggggacaaggacgttccctgtaacgggctttttctttcgtctttttttttttttttttttttgctcctggcaaactgtgcgtgacattctttatggctttttgtatgtcaaaaacttcatactaaactttttaaaaaattaaactttaatgatgggcccca

SEQ ID NO: 557536 - DNA, 162 bp, Homo sapiens
gaagctttactgctagacactaaacaacacgaattaatagtcaacataaagacaactaacaggttgtgacacaaccatcagcaggggaacatagcatagaccacatattatcctcatagtctttctataaagtagattatatcatcatcattatgtagatag

SEQ ID NO: 557537 - DNA, 94 bp, Homo sapiens
ggatttgctggtgcagtacaactaggcttaatagggacatgggtttaaggctgtaaatgttcccctgagtactgttttgtccatatccaaaaaa

SEQ ID NO: 557538 - DNA, 430 bp, Homo sapiens
ggccgccttttttttgtatgactaggtgagtatttttttgtatctttatgactctttgattagtttactctgaatgtccttcttcaagctctataacagagagctgtgacaaactatgtaataaataggattcaattatcaccagaggaggaaagacaaacaaaacccagaggaaaccaaaattctttcctatgttaaaaaaaaagagacagagtaacccaataatcacccaggctggagtgatgaacagctcactgcagcctcgaccttctgggctcaagcgattctcccacctcagcttactgagtcgctgggacaacaagtgtgtgccaaccatgcccagctaatatttaaatttttgtgtaagagatgaggtctcactatgtagcccaggctggtctaacactcctgagctcaagcgatgtaccca

SEQ ID NO: 557539 - DNA, 346 bp, Homo sapiens
gagaccagcctggccaacatggaaaaaccccatctctactgaaatacaaaaattagctgggcatggtggcacacgcctgtaatcccagctagttgggaggctgaggcaggagaaccgcttgaacccaggaagcagggttcgcagtgaggtgagacgccactgcactccagcgtgggtgacagagtgagactcggtctcaaaaaaaaaaaaaaaaaatgctgtgggcacattatagagaattgaaatcaaataacaaaagggaaaggaaagtgactaatattgctattattttggtacagtttctttctttctttttttttttttaattgagaccctgtctcaatta

SEQ ID NO: 557540 - DNA, 118 bp, Homo sapiens
ggatttgctggtgcagtacaactaggcttaatagggacatgggttggcagatttgtgaggtgatgcctgcaacacatatgtgcctagatctagtctgattcctaaaattaaaaaaaaa

SEQ ID NO: 557541 - DNA, 243 bp, Homo sapiens
gaactcaccatattggccaggttggtctcgacctcaccatattggcctcaggtgatccgcccgcctcggcctccaaaagtgttgggattatgggcgtgcgagcccacggtgcccggcctgttttattgtttgaaaacaagtacaggttgttattatccaggattgttgatagagtatatactgtatttgagtgtagactgaggcagagctgattaatatactagttacattgtagcctccaca

SEQ ID NO: 557542 - DNA, 154 bp, Homo sapiens
ttgggggggaaaaaatttttgaaccccggactttaaaaccaaaaaaaaaattttttaccccggggaaaaggttgggaaaaaaacctgggaaggaggtattattagaaaaaaaaccctttaaacccccgaggaaattccttggaaaaaaaaaaaa

SEQ ID NO: 557543 - DNA, 274 bp, Homo sapiens
gtcggggttcagtagttctgctcctgtctgtcgctcccgttcagatatcctcagtacttgctcgtctatatgtcgacatgtttgaagcccagaggttgatctcggggctcctacttacagtctgacctgccctatgttagctgtctacatgtgtcgtctaggcaggtgtgtgtggttgtctatcttcatgttagtacacccttttcaccttcaaaatcctatgcgcacctcaaactcagcaagtgttaactgaattagtcatctttgctgccat

SEQ ID NO: 557544 - DNA, 361 bp, Homo sapiens
  misc_feature (128)..(128): n is a, c, g, or t
  misc_feature (205)..(205): n is a, c, g, or t
  misc_feature (220)..(220): n is a, c, g, or t
  misc_feature (250)..(250): n is a, c, g, or t
  misc_feature (260)..(262): n is a, c, g, or t
  misc_feature (321)..(321): n is a, c, g, or t
ttgtgttaagcagccagggccacaggagtgatagaagatggagacccgccgtctggtcatgatatggggggcctgggcggtggcctcgcgggcgggggggggtggtcctcttcggtccggggtgtgtntgtgagactaatgactccatgccctcacatggccactcctctcacagcagacagcttcactccgctccggccccggngctgcggtctgtggnggtttgcgtgggggtggggtggggtctggnggttttgggnnnggcgcggttctggggggggttggtggtgggccggggctcgatctatgcggtgtttgggnggtggttgggggttgtggcgcttcggttcttttcgggggg

SEQ ID NO: 557545 - DNA, 1198 bp, Homo sapiens
cggagatcatgagcatgatctggaacgcggctcaatgaccatggcaagaactggcgtcacgtttacaatggccatgacagctgatgagagtaacctcatcaagcaccggcatcgtgagcgctgtgtcagccagccagtgctaaggcagcacaccatgtcactgcctgtgcaagcacgctgacaggcacttccagtcacgtggacctgcgcacggcacaggcaccagggacgtgaacggtgcagtgagacaagctcaagcagcatggtggcccttgcatgccgcgcacgagagacctgagctgcagggcaagcagccgggctgcacggcagcatcaagacaccacaggaaaaacagctggcaacaggacacgaccaacggaccatcaatcaggcacgacatgatggagacatcagagacaccaccccatcccgaaggacagctgaagaacacgagccgatgagcccagcgaagaaagcgaagcagagagagaacagagaaggggaacgacatgacaaagacaatcacaaagccatgaggacacaccatggagaccctaaatctgaaagagcacaaacaggggaagaccgacaggcgcgccacaagaaagcccaaaatagacacacaccacacggaaatcacacctatgaccacagagagaacacgcaccaggacacggggacaccagggaacagaggaccacgcgcaaagggacagacacacaacagaacacgatgggagacaacacaaacataaacagacgaaacagaggaaaaggacccccggaaacgagaaacagggacacgggcccgacagtggaggaactaaccaaggcgcggaacccgggcacacgacgcggtgacaaaacccgccgaagggaggaacagagcaggggggagaggggaaaatagagcaccaacacaagtgagacagcagaaacaacagggacgacaacacaaccaggggcaccaacaacatcaggacacagaggaaaagagacaggaccaaagacaggaaacacggcgggcagaagaacacctagccacgccgcgacaacccccaacggcgccacacgggcacccgcccgccacaccccacacaccgatcacacaaccggcgacaaccgccaaatcggccccgccacgcgcaacagggcccaacacccacaaacccgccagcgaccaccccccaccaggcgcc

SEQ ID NO: 557546 - DNA, 266 bp, Homo sapiens
  misc_feature (33)..(33): n is a, c, g, or t
  misc_feature (100)..(100): n is a, c, g, or t
  misc_feature (127)..(127): n is a, c, g, or t
  misc_feature (243)..(243): n is a, c, g, or t
taaagaattagaacaatgcgagaagcttgtctngagatgccctttttaaaatcgtttctggccgggcgcagtggctcacgcctgtaatccaacaattttngggaggctgaggcgggtggattacttnaggttaggagttcgagactagcctgcccaacgtggtgaaaccctgttctctactaaaaatacaaaattagccgggcgttgttgcgtgcgctgtgatcacagctacttaggaggctnaggcaggagaattacttgaacct

SEQ ID NO: 557547 - DNA, 229 bp, Homo sapiens
tttttaaggacatggtctaactctgatgcccgggctggagtgctggaatgcaatgacaccatcacagctcactgtagccttgacctcctgggctcaagcgatcctcccacttcagcttcccaagtaactggagcttgaggtgggaggatcacttcggcccaggagtctgaggctggagtgagcttttattgagccactgcactccactgcacagagtcagaccttgtct

SEQ ID NO: 557548 - DNA, 965 bp, Homo sapiens
  misc_feature (3)..(3): n is a, c, g, or t
tgntatagagaaaaaagctagaaagcaacacagaggcggacacaagcagcaggaagcgctacctgttacgttagttgctgcaggcactatgcgaggagtgtaagcctgcgctatgcctccccccatggagatcgtcagcaagcaggagggtgttaaggaaccacaggcttctaacaggaaaagggctgcccaacacgcgtggggcccccgaagaacctcaagtggtggcacaaatcggctcacaagtccgggattttccgtgtgcatagggccctgtcgggcgtcccacaccccagcgcggtgtgcacggccaacaccaccccggggcccacaagcaccacgtctcctggggtaccgcgcgggggtcccccgatttggggatttggttaccgcgcgtgtgtcaaggaggccccggctacaccatcagcaagggccctccttcctgggaacaaaattcgggcagaacacggggctagccagggccccagggcagtttctcccgaggagcccatctgcccgctccgtggtagttcgccccctctatggcaagctgggtggtctcctgcgcagcccgccacatccgtcgtgtgtttgcggcgccgccatcccacagcgctcttctataggaggacggagaaaccaaccgcgggcaacaggaggaagagcaataaaggcttctccacactacgcgagagaccgcccacctccgggcccgcgcaaagaaacacaccaagttcacccacgtggtgtgtgggggggccccacgcaggagacgctctttcttggggggtgcgcgaaggccggggtacatccaccaaagaagacccggggggagccgagcagtggaatcccggaagtcgggatactccgtgccccccaccccaccgcaccgggggcacacgagaaggaacatcgtttcaaaaaaaaaaaacccaccaaccttttgctgggtgggaaaccccaca

SEQ ID NO: 557549 - DNA, 253 bp, Homo sapiens
tttagagaccatgaaatcacgcgttatgttcagtaactgggacaggctgggagggatattttttttttgagacaaattctcattctagttgcccaggctgaagttgcaggggcaaagtctcagctcactgcaatcttcacctcctgggtcaagcaatctcctgactcaacctccttagtagctgggattacaggtgcccaccaccacgcctggttaattttgggtagtgtctagtaaagatggggtttctgta

SEQ ID NO: 557550 - DNA, 258 bp, Homo sapiens
actgctacctgtgtgacctaagcattcagctgcagggactacttttgcttctttagctttagacttcatcgctgcccatgaatgaccctctgggcagactcaggtatcccttcccagagctattgatgttcttgagggtactcgactatccatctgcccgtgagctcttcgtagaaaccggtagtagttgtgtccacgagaagaagataggtctattccactgtgggcagtccagcaatgagagccggccatcaagtc

SEQ ID NO: 557551 - DNA, 305 bp, Homo sapiens
catcaacttttctaagactctggtttcctcatctaaggatatagcataataatgaaacagactgtgtcgtgttacggtgaaattgaactaagataatgtagtcagcccagtctggtacgtggccagaacttaacgcaagcgagctctcaccatcaaaggagtgcagcttactctagagatagccttgactaggtgattcccagcccttgaggagatgattcttatatacccctagggattagagagtaggtttatatatccataccctaccttaaagacattaccgtacatattgttagcctacc

SEQ ID NO: 557552 - DNA, 299 bp, Homo sapiens
tgcttatacccagtgtgattgagtagtaagaactgtttcgtgatcctacaggtgttgtgacgtgtaataacctggaggagtatgtgaatggagcctactatggtgtcgaataggaagtatgtgcctgcgttcaggcgttctggctggttgcctcatcgcgtgatgatagcccaggtgcggattcgtgtggttacgaagaacatgtgtaatatgattagttctgtggctgtgaatgttataattaaggagatttgtagggagattagtatagagaggtagagtttttttcgtgatagtgg

SEQ ID NO: 557553 - DNA, 327 bp, Homo sapiens
  misc_feature (4)..(4): n is a, c, g, or t
  misc_feature (111)..(111): n is a, c, g, or t
  misc_feature (116)..(116): n is a, c, g, or t
  misc_feature (162)..(162): n is a, c, g, or t
  misc_feature (169)..(169): n is a, c, g, or t
  misc_feature (244)..(244): n is a, c, g, or t
  misc_feature (252)..(252): n is a, c, g, or t
  misc_feature (260)..(260): n is a, c, g, or t
  misc_feature (263)..(263): n is a, c, g, or t
  misc_feature (288)..(288): n is a, c, g, or t
gatnttgtttgcatcgtttatataattagacagttttttagactaaatttgtgtccaaactaatacgcacgggaacgggctccagctgcagctccctgggtttgtgaggtnggggngcggttttactggaagagcgggtatgtcttgggtaggcgcccgttnttattcnatagggtggtctggatgtgctcatacgtgggcaggtcagttaggtcacccagggcggccactgccggcttccatnggagtatnttagaagngantttttttacatcttctggttttatnttgtggatgagcgtgcacatctcttgcggtatctttttg

SEQ ID NO: 557554 - DNA, 291 bp, Homo sapiens
agttataaagcaagaaaatatacctcatgcaagtaacagggacttcgaactatataccagagagagctgagtgaaaatcaggatgaagttgaacacaaggaagtcagtgttcacacaatgagaggttcccattaaggatgtcgaggagggacatggagaagaagagtcgggcatgggtgcaggagaagacagagcggcacaaggcgccaaggcaggaacgtcagacacatgacaacccagataaaaccggccgaaagcgaatataaggtgaggagggtacaagaacatcga

SEQ ID NO: 557555 - DNA, 896 bp, Homo sapiens
  misc_feature (120)..(120): n is a, c, g, or t
  misc_feature (126)..(126): n is a, c, g, or t
  misc_feature (164)..(164): n is a, c, g, or t
  misc_feature (220)..(220): n is a, c, g, or t
  misc_feature (274)..(274): n is a, c, g, or t
  misc_feature (309)..(309): n is a, c, g, or t
  misc_feature (315)..(315): n is a, c, g, or t
  misc_feature (323)..(323): n is a, c, g, or t
  misc_feature (325)..(325): n is a, c, g, or t
  misc_feature (343)..(343): n is a, c, g, or t
  misc_feature (352)..(352): n is a, c, g, or t
  misc_feature (370)..(370): n is a, c, g, or t
  misc_feature (401)..(401): n is a, c, g, or t
  misc_feature (432)..(432): n is a, c, g, or t
  misc_feature (437)..(437): n is a, c, g, or t
  misc_feature (452)..(452): n is a, c, g, or t
  misc_feature (457)..(457): n is a, c, g, or t
  misc_feature (464)..(464): n is a, c, g, or t
  misc_feature (467)..(467): n is a, c, g, or t
  misc_feature (474)..(474): n is a, c, g, or t
  misc_feature (488)..(488): n is a, c, g, or t
  misc_feature (502)..(502): n is a, c, g, or t
  misc_feature (510)..(510): n is a, c, g, or t
  misc_feature (527)..(527): n is a, c, g, or t
  misc_feature (558)..(558): n is a, c, g, or t
  misc_feature (563)..(563): n is a, c, g, or t
  misc_feature (576)..(576): n is a, c, g, or t
  misc_feature (593)..(593): n is a, c, g, or t
  misc_feature (622)..(622): n is a, c, g, or t
  misc_feature (631)..(631): n is a, c, g, or t
  misc_feature (633)..(633): n is a, c, g, or t
  misc_feature (659)..(659): n is a, c, g, or t
  misc_feature (679)..(679): n is a, c, g, or t
  misc_feature (685)..(685): n is a, c, g, or t
  misc_feature (696)..(696): n is a, c, g, or t
  misc_feature (746)..(746): n is a, c, g, or t
  misc_feature (748)..(748): n is a, c, g, or t
  misc_feature (780)..(781): n is a, c, g, or t
  misc_feature (784)..(784): n is a, c, g, or t
  misc_feature (786)..(786): n is a, c, g, or t
  misc_feature (888)..(888): n is a, c, g, or t
cagatgcgatccagcggctctgggggcggcagcggtggtagcagctggtacctcccgccgcctctgttcggagggtcgcggggcaccgaggtgctttccggacgccctctggtcggccanccaaanccgcgggcgctgatgatgggtgaggagggggcggcaanatttcgggcgcccctgccctgaacgccctcagctgctgccgccggggccgctccantgcctgcgaactctgaggagccgaggcgccggtgagagcaaggacgctgcaaanttgcgcacgcgggggctgggattcacgcccaaaanttcaanaggcaaanantccgaaaccttcccgcancggagaaanagcttgagggtgcgctanacggcagcctccgccctcggttcccgcccanaccgggcagaagatcttggaggagccaaaanagaanacaaaaagcggccangacancgtgcancanctggganccgccgttctcagncttaaaagttgcanatattggnggctgccccgagagggnacagtaccccagctccgactgcggggggcangagangacggtacccaantgccacctcccttcaancatagtagttcctctgtaccgagcgcagngactaacanangggggcgcggcactcggcgcggagancgggaggctcaaggtcccanccagtnagcccagtgtncttgagtgtctctggactcgcccctgagcttccaggtctgtttcatttanantcctgctcgcctccgtgcagttggggggaaannaananacttgcgcgcacgcacagtcctctggagatcaggtgggaagagccgctgggtacaaagactgttcagagcctcttcccatctcggggagagcgaagggtgangctgggcc

SEQ ID NO: 557556 - DNA, 1169 bp, Homo sapiens
ttctttctaggttgtatctcccacttcacccgttctagaccagtcccagaagatctagtaagtatttcagtctgggaatatcacgtagcgagttcttggaacgggacaagaaggaagcatggtagggttggaactaaaagacagggccttgaatgacgttccacgcaaagcaggcgttctcaaaccatcggtggcaccacgcaattctgcagacagaaagagaagcttcagaaaacaccaatctagaacgcaacactgcacgagcacacgtaaaactgagcagtgggcctctctcaggacaagacagacaggctggtcgcaccagccacgaacaacatccttgaacgcagtctctcccgagtgaagcatggcggtaggctcgctcgtgcagaagaacccccctatcagagaataccgctgcaggacaggcacacacgataatgaaacaatgccagaacgactacctgggacacacggcagatggtaggcaagtcaccaggcgacaggcagcgtcaggacccactacggacagcacccaccggggccccgaggcccgaatcccccaccctgcacggacccggctgaccgacggcgcctgaaccgaacactagcacactggagagccacacaaggtgacacgacttccgtgcacaggaacttcaacacccacatgaccttaggctctcgaacggaacttgggcgaacctctacagcttatcccagtgacaagaaaggacagacatagcttcacacaccttcccctggcccagagtaaaacaacatggtccgcatcgcaacatcctttcaccgcgacgtatagcacacatggcgagacacacctgcataggacacactgagcatggactaaccaaatgggcaattactcccggcagcaaactgtcaacactagtacggccccgatccataacaagcacgcagttccaacggtgtacacgctgtgagcaaccaagaggggccccaacacctcgcacgaaagcccaccagcacatccttgcgactagccagtggggcaacccacggaagactcccctacccccaccctgtagaagatacacagcattggcgaccataggaacacagttgtccagacatcacatcaaaccgcgtcgtagaaaaccgtacaaaatcggccaacaggatgcaccacg

SEQ ID NO: 557557 - DNA, 428 bp, Homo sapiens
  misc_feature (174)..(174): n is a, c, g, or t
  misc_feature (176)..(176): n is a, c, g, or t
ttttttttgaaacggagtcttgctttgttgcccaggctgaagtgcagtggcataatctcagctcactgaaacctctgcctcccgggttcaaacgattctcctgcctcagcctcccaagtagctgggattacaagcatgtgccaccatgcccagctaatttctgtattttagtananacaaggtttcaccatgttggccaggctggtctcgaactcctggcctcaagtgatccacctgccttggcctcccaaagtgctccgattacaggtgtgagccacccggcccagcccctcccttgtgtttcaaccaatcggaatgaatttaactagatgttagtaacctttttttctttacttctaaaaaagttacagtttactaataaagttaagtctggttctgtcctaaaagaaataaattcactattaatc

SEQ ID NO: 557558 - DNA, 868 bp, Homo sapiens
  misc_feature (22)..(22): n is a, c, g, or t
  misc_feature (53)..(53): n is a, c, g, or t
  misc_feature (71)..(71): n is a, c, g, or t
  misc_feature (83)..(83): n is a, c, g, or t
  misc_feature (89)..(89): n is a, c, g, or t
  misc_feature (108)..(108): n is a, c, g, or t
  misc_feature (112)..(112): n is a, c, g, or t
  misc_feature (121)..(121): n is a, c, g, or t
  misc_feature (123)..(123): n is a, c, g, or t
  misc_feature (129)..(129): n is a, c, g, or t
  misc_feature (135)..(135): n is a, c, g, or t
  misc_feature (140)..(140): n is a, c, g, or t
  misc_feature (158)..(158): n is a, c, g, or t
  misc_feature (175)..(175): n is a, c, g, or t
  misc_feature (181)..(181): n is a, c, g, or t
  misc_feature (187)..(187): n is a, c, g, or t
  misc_feature (196)..(196): n is a, c, g, or t
  misc_feature (204)..(204): n is a, c, g, or t
  misc_feature (215)..(215): n is a, c, g, or t
  misc_feature (221)..(221): n is a, c, g, or t
  misc_feature (239)..(239): n is a, c, g, or t
  misc_feature (254)..(254): n is a, c, g, or t
  misc_feature (271)..(271): n is a, c, g, or t
  misc_feature (291)..(291): n is a, c, g, or t
  misc_feature (301)..(301): n is a, c, g, or t
  misc_feature (308)..(308): n is a, c, g, or t
  misc_feature (339)..(339): n is a, c, g, or t
  misc_feature (362)..(362): n is a, c, g, or t
  misc_feature (364)..(364): n is a, c, g, or t
  misc_feature (375)..(377): n is a, c, g, or t
  misc_feature (387)..(387): n is a, c, g, or t
  misc_feature (389)..(391): n is a, c, g, or t
  misc_feature (396)..(402): n is a, c, g, or t
  misc_feature (404)..(404): n is a, c, g, or t
  misc_feature (410)..(411): n is a, c, g, or t
  misc_feature (413)..(413): n is a, c, g, or t
  misc_feature (418)..(419): n is a, c, g, or t
  misc_feature (422)..(422): n is a, c, g, or t
  misc_feature (425)..(425): n is a, c, g, or t
  misc_feature (429)..(430): n is a, c, g, or t
  misc_feature (432)..(432): n is a, c, g, or t
  misc_feature (434)..(434): n is a, c, g, or t
  misc_feature (437)..(437): n is a, c, g, or t
  misc_feature (439)..(439): n is a, c, g, or t
  misc_feature (443)..(444): n is a, c, g, or t
  misc_feature (446)..(446): n is a, c, g, or t
  misc_feature (450)..(453): n is a, c, g, or t
  misc_feature (456)..(456): n is a, c, g, or t
  misc_feature (461)..(461): n is a, c, g, or t
  misc_feature (465)..(466): n is a, c, g, or t
  misc_feature (476)..(477): n is a, c, g, or t
  misc_feature (480)..(480): n is a, c, g, or t
  misc_feature (482)..(483): n is a, c, g, or t
  misc_feature (486)..(486): n is a, c, g, or t
  misc_feature (488)..(489): n is a, c, g, or t
  misc_feature (492)..(492): n is a, c, g, or t
  misc_feature (494)..(499): n is a, c, g, or t
  misc_feature (504)..(506): n is a, c, g, or t
  misc_feature (508)..(509): n is a, c, g, or t
  misc_feature (511)..(513): n is a, c, g, or t
  misc_feature (527)..(528): n is a, c, g, or t
  misc_feature (530)..(533): n is a, c, g, or t
  misc_feature (535)..(535): n is a, c, g, or t
  misc_feature (543)..(543): n is a, c, g, or t
  misc_feature (564)..(564): n is a, c, g, or t
  misc_feature (574)..(574): n is a, c, g, or t
  misc_feature (588)..(588): n is a, c, g, or t
  misc_feature (600)..(600): n is a, c, g, or t
  misc_feature (624)..(624): n is a, c, g, or t
  misc_feature (629)..(629): n is a, c, g, or t
  misc_feature (676)..(676): n is a, c, g, or t
  misc_feature (697)..(697): n is a, c, g, or t
  misc_feature (727)..(727): n is a, c, g, or t
  misc_feature (734)..(734): n is a, c, g, or t
  misc_feature (740)..(740): n is a, c, g, or t
  misc_feature (745)..(745): n is a, c, g, or t
  misc_feature (759)..(759): n is a, c, g, or t
  misc_feature (762)..(762): n is a, c, g, or t
  misc_feature (764)..(764): n is a, c, g, or t
  misc_feature (769)..(769): n is a, c, g, or t
  misc_feature (772)..(772): n is a, c, g, or t
  misc_feature (776)..(776): n is a, c, g, or t
  misc_feature (779)..(779): n is a, c, g, or t
  misc_feature (783)..(783): n is a, c, g, or t
  misc_feature (791)..(791): n is a, c, g, or t
  misc_feature (793)..(793): n is a, c, g, or t
  misc_feature (867)..(867): n is a, c, g, or t
aacaggaagggatgttggtggnggggggggggtctcttttgcctggactgggnaaaattgacccccgcgtnatgcaccacccncgtccncgtaaaaatgtgcggccancccncccaaaagnanaaaaanctgcanaaacnaagcaaggggaggggganccccaccgccccgcctnaaagcnggtttnctggccgcnaggacttnaaagtttcttnaaaggngcagctgcgcgcgtccanacgtgcatctgtggnggctgtaaatggacttnaattgcccggaggaaaaatnaatgggatgnaaacgtnaaaggaaaaggatttcctgcttccaagcggncctggaaagggaaaaaaccaaancncaaaaataaannnacaccccccncnnncacannnnnnncntgcccnnancccanncancancttnncncnatngngcanntncacnnnncgnttccnaaanntagcctaccnntantnnccnannctncnnnnnncccannncnntnnncccttttgcccatnncnnnntnttttctgnatcatatccaataatactcanctcctttaancttttttttttttnatccactttttnacttccattaattctcctttaacnatacncatttatctaaaatatcctttccccccttctctcaaaattttcttantttttcccccccctttaatanatttaaatctattcacacataaaaaaaacnatatttnctcctnccccnctcctttttttctnaantncattnaanaaanaantaantttttaananaaaaatctttaaattttttttcataaatattcccataaaatttttttaaaatcatttacataatcccaaacctnt

SEQ ID NO: 557559 - DNA, 128 bp, Homo sapiens
ataatcaacggtgatgtagcttacaagtactcgctcagcctcccgagtcgctcgctgacgtacaggcgcgcgccagcagatccggactcattatctctattgagttcaatatagacggggttacacct

SEQ ID NO: 557560 - DNA, 377 bp, Homo sapiens
aaaatgcaggcggcgcctcagtccccagccgagcctgtgtctcaccccctcacaggacagagctggatctgcatagagctggtctcactgtggcgcaggcccctgggggagtgcctgtgctgtcaggacgaggtgctgctgatttgagggccaccactgcagtcctgctaggtctgcttcctgcccaggaaggtgcctggacatgataggagagacatacacgtctgattagacttcatgcaataataattatagcacagaacagtttgggggcctttcctgttccactgattcagctgcaatgacattatacctgtattacctgtcaattttattacctctataataaaatgatacctttcatgtgaagcacagaa

SEQ ID NO: 557561 - DNA, 131 bp, Homo sapiens
tgatctgaggatcccgttgtggccgtggttgtgcgcgtggttgtggggcgggcagatgtcaccgagagagaggggagggttcctcaagttgtgcggaaggcggccaccctgcccacaacccgcgcccacaa

SEQ ID NO: 557562 - DNA, 289 bp, Homo sapiens
ctctagaggatcgcatgttatcgccaacactcactatgcttcgtaattctccaagatctcctcatcagacatattaggcttcttcttctgcttctcagtattccgggtcaaagcatcttggttggagtggtgttattttcagtaggtgaaatgtgagatgtagccacggttccgagtttggagtgacaggaaagtggttcaaatcacgagacctgtggtgtatacacgatttttggtgtgctcctggtgcgttggagcaaatccactaggtgtatggaggataaacatt

SEQ ID NO: 557563 - DNA, 353 bp, Homo sapiens
gcaaattactgatgagaattagcagaacctttatttgtagtggaatcctctacatctagaggagatataaccgtgtatatatgtattctaaatggtaacagttttacctccatgctgctattatatgcaattagttagcaacatattgcgaaagagtactcatccagagtcattagctagctctgtttagcatttcagcactcaatttattggtaactacccccttgataaaacacagagtaagtcagctctagttcatttcattcagttcctagtgattaaaaataatgtttattccacatggcttttcttatcaaatttgaaataatagaatctgaggatcaatggtggat

SEQ ID NO: 557564 - DNA, 149 bp, Homo sapiens
ggtgttctagaggatccctttcttgccaagagttggtacgcctgttcttgtacaccaactggttttgtaacagttgcgagaaccttctccttctttttctttcaaccttctgagtcgtgtgcaagcaatgagtcgtgtgctagacatgt

SEQ ID NO: 557565 - DNA, 281 bp, Homo sapiens
ccagtctggtgtcaaagcttaacattttctttggccttttagtttaaaaagttaatgaaataacatttttctcagggccctttagtagccctgagtcaatgatttcccgattttaatttttcaaaaggggggcctccgctttaaaaaaattttttgatacttttataaccttatatataaatatgtgtgtaatggggatatataactatatataacgttttttcatgactaccccccctaacagtgaataaaatttttaatgtttttgaacctttaaaaaa

SEQ ID NO: 557566 - DNA, 747 bp, Homo sapiens
  misc_feature (12)..(12): n is a, c, g, or t
  misc_feature (708)..(708): n is a, c, g, or t
agcgggcagtcngtggagaagccggtccgggcggaggcagcagcagcgcgcagtccctacggcctgcgcgcggacgcgtgccctcgtgaccgtgacaggcctctctgcgaaggtgacgtgctgtgtgctcgtactgaagtgagagccgctggagagttcgggactggtggagtcccagaaggcggcatgtggtcagctcgcactgttagtgagagcgatttcatctgcggaagtggtgcttgctgctcaacacgtggactgaatgtatagagcgtccgctgcggcggcggcagagagaaggctgtgcggaggtcgctcgcccgcaggcgctgacagacgtcgcactggaaagaagagccaaccggaactgacctacactgacgtcgaatcgagctgaccgacacgctcaaagagcctctctcgcgtggctctgctgcctcacatgccctggctttccgccacgtttccgatacagcgctgactgcgtagctggaagcgtcgcgtgtggcacgaggattctccggaggttcaacgacttcagagactcttgtgagacccacgagcgcagactccgtgacgcgatgcattacggtagcgaaccgcgcaactgtgtggaccgagctcgcgtcttgctcgttgtgcgcccatatcgtcgcaactcagacgcgcgtccttccgctgcagacatgtctaccggtgcatgacatnttgatgagcgcacggcttagcgaggtgcgtggacgcaca

SEQ ID NO: 557567 - DNA, 341 bp, Homo sapiens
cacgggtgattaataaccttcagaagtttcccacagaggctcagactctgggcaagaaaacgagaaccaggccccagggctgatagcgttaccttcccggcacctcaccagagtctggagcttccctggactgatggagaggggactgtgagagatgatgggagccctgtgtaagatccctgtttgaaggaactcagtcattgtagaggagatttcatggaagttcaagatgagtaaattccactaccaatatctgaatactatatagatgcaatgacatactctatatcagagatttactgctaaggcagtgacgctacatcgtgatgagtgggatatct

SEQ ID NO: 557568 - DNA, 390 bp, Homo sapiens
tgatgaaagggagtcatgaccagcaaacctttcttctggtcatcgggcatgtcgcgtagttcttggcgaggctatccagcaatgcctcattcacacccgctgccagggcccctgtgcggaaatctcctccagaagcctcagctgccaacccgcccatcaaggcatgtagcccaatcttggtaatgccaccttctgcaaaccggttcttggaaacatccccgaccaggttgaatccataagccgcaaatgcgttagccaaactactctacaacgcgtcgccaagacgggcttcgcccccgagcgcccgatctaccaatagtgatgttccgttttgcagtacttggttggccgtgaactgccccacaccttgccaagtgctcaacggactta

SEQ ID NO: 557569 - DNA, 372 bp, Homo sapiens
  misc_feature (22)..(22): n is a, c, g, or t
  misc_feature (92)..(92): n is a, c, g, or t
  misc_feature (193)..(193): n is a, c, g, or t
  misc_feature (323)..(323): n is a, c, g, or t
tggactcagtcggctcatgctngtacttgcagcactttgggagtctgaggtgggaggactgtttgagcccaggagtacatgtgcacaatgtnaggttagttacatatgtatacatgtgccatgctgctgtactgcacccattagctcgtcatttagcattaggtatatctcctaatgctatccctcccccctnaacccaccccacaacagtctccagagtgtgatgttccccttcctgtgccatgtgttctggaaacgggatttcctcatataatgttacacagaagaattctcagtaacttatttgtggtgtgtgtattcanctcacagagttgaaccttccttcagaagagagcagatttgaaacactct

SEQ ID NO: 557570 - DNA, 983 bp, Homo sapiens
  misc_feature (513)..(513): n is a, c, g, or t
  misc_feature (712)..(712): n is a, c, g, or t
  misc_feature (902)..(902): n is a, c, g, or t
  misc_feature (983)..(983): n is a, c, g, or t
tccactagtgtaggcctacgctttgctttggacagcagatcttgaacttcgcgaggtttgcagctaatcgcgatcaataacgatgtcgcgatcagcgcaccggcgggagtagtgaagaactcgattacagagtgttggttctttgggatggcgtacccggcgatcaggagcacgaaaaatacagccagaggcagaattaccttgataaccgagtcctgataagcggttggatcagtcggatcattgggggatgaaaagtccgtgcgggtcgtccagtaagtccagatcgttccggtcatccaggtgacgactgtgagcagcacccctagatacagaaattttggttcatgagtgttggctcctagtccaatcccaatgatcagtgggcctgcgggcatcagaagcttgaaccctgagtagcatccgatcgcaatgtacttcctgtgttggcccgcgatgggagcaagagaggcgtaggccgtatcgggacaaaccatcccggcacccagaagnggtgatagagagatgccgaattttccgaaagatgcacttccttgcgtcgagatccaccctgcaatgaaaaacgcgctcaggatgacgatggcgaaataaccgaggttgtttccgaagcctttgctcagcgattggaatacgtccccgctgctacttccggcaagaagtgagatcagaatcgcgcccagtagcatcgcgncagggagaggaatggaaacgctgctccataggttccgtaaccgggagcctgttttcgtcctaagcgcttctaccaacatccatgtacctccaagcgttaccgaaaccgcctctgaaaggcttgaaagccttacctccaattcacaatcgcaaaatacgttgcgcatcgcaactaatatcttggaacaatntcgctagcccttatgcccataaaaatgtgtcgctgcgactcctaaggtggtattagcggttcccccggaattgcgagccgn

SEQ ID NO: 557571 - DNA, 130 bp, Homo sapiens
cacgaggcctactttatctacggcgaaattgacatttggggctctcacggtaacatagaggtcaagtgacttctcagatcgccaggctccattctctctccaccgggttgtgtccctgtcatgggagtgt

SEQ ID NO: 557572 - DNA, 569 bp, Homo sapiens
tgggggcggtttttcccaggcaattaaccaagggtgggatcacccggtcttgcccccaggtggaaatgtatttggactttgttcgggttcccctccagggccctttattaccttgcttggggtcaactgacagggggtttggccccagcttgtggggattacccgatccgggtggttcaggagggttcccacttgggttcccagcaggccccctttttcctggcaggccccttggatcagggccctttcccggatgttaactgtgtgggctgggacccccaggagccaggggttctggcctccctcagtgatgatggggggggggccttttggaaggatcaacggcctgaagggcttttgggttcctcggctttgggcagaggaatggctcccccgaaaacgttattttaggcttttcccggccctgggggggcccggggggggatccttggcctttcttttacttgggtccctttttttcaggcttggggggaagggcagagccccagaattggtttcctttcccgccttttacatggggccttccgttaaggggttccggacctgga

SEQ ID NO: 557573 - DNA, 1004 bp, Homo sapiens
gcgtgcgacgagtgtgggccagctgccacaaggttgaagtcccaggtggcctgtgtgactcctgccagcggctgctgaaccttcccctgtgcccatcctcaccagctcaaggggtcatcatctctgtgtcaccatgtccacacatgatgggacagagcagctatgatcctgcagccaatgaccctcgctgtatcaggccatatggcggagcctccgcattgcccccagcgcccattttccatagggggttgtaatttataagctgacgaaggtagccagaattccggagtgactgagtcatctctcacatgtccatcctccaccgttcgttcctcacgacaacgacgacacaaagccgtatctgcacttttgagtgtggacacgatttactgtacaggttttcatttgtgtaacagatagcatccgttctcataggcttgaggcaacgagaaaagaagaatacgtcggagaggaaagaacagaaagacgtacagaaagcagagacagttatggactgtcagggcgcgttgatagtcggtggaggtagctccggccagaagattcattcgtggaatttgagaacagtaggtgatattgggggtaggtgagagtgagagaattgtaaggtgatacgtcaagggaggcgtaaaagggtagtaggtggtagaccgggagtaggaaagttgcgggtgtaattgcgagcattggcggcgtcatgtaccgagtgtgaaagacagagggatttgaggtaagaagtcaaggattaggaacgcaagtgtatggcagctagtctgttttgcgctaagtggtcacctttccgtccgactacagctctggcacgtctaagggaaaaagagtcgtagccacgcggacgcgtgctccccatagcagaggccgcgacgggccctcaactgatgctgggacgacaggacgcacccatacggccaggcaagcggcggggcaccttcacggcacggcacaggtgccccaggggaggacaaaga

SEQ ID NO: 557574 - DNA, 742 bp, Homo sapiens
agtttggctcttgtggctcaggatggagtgcaatgacgtgatctcagctcactgcaacctctgcctcctgggttcaagtgattctcctgcctcagcctcctgagtagctagggactataggcgtagtaaccgccatagcctggtcaaataatagtagacaaaaaaaaaagaacaagagaaacaccagaaaaaacaaacaaaacaaaaacaccaaaccacaaagaaaccaccgaccaaaaaaaaaaaaaaaaaaaaaacaaacaaaaccaccacacccaatgcaaatagaagaccgaggctgagactataaaggcctacaagagcggacagagagagcgagagaagaagcgaagagaagacgagaggaaagaagagagaccgataagcgggaagagcgctagacgagctgccagcgcagcaacggagaaggcgacagagcgcaggcgagagaaggggagagacggacgaggaggagaagaggagagaccgtggggaaagcccgaatgaggacggagaccgaggagcgacggacgggcggaggaacccagggtaagggaggaaccgaaagccgacagaggcgggagcgcggagaccgaagtaagagaggagagagagtgagaggcagagccgaaaaggggacggaaaggcggcggaggcgagagaccggggggaaggcggggggggagggaggggcgggggggggggagggggaaacgggaggtggggagccgggggggtgctg

SEQ ID NO: 557575 - DNA, 315 bp, Homo sapiens
  misc_feature (168)..(168): n is a, c, g, or t
gggggtccccccaacccccccctttttttccccaatttaaattttgggggttccccccccccccccccgggggttaaaatttagggggacccccccgggccccttggtggttattggggggttttgtttaaaaaaaaaaccgggggggggggatcttttggaaacccnggggggggggggggggggggagcccccatttttggggtttggggccccggtcggggggggttggggggtttccccccccccccccccctttttttttttttttttaaaaaaagcaaaaaagggaaaaacccccgggggcccgggcca

SEQ ID NO: 557576 - DNA, 314 bp, Homo sapiens
ctaacttctcttgatgtaggtttctcgtactagctaggaactaattagaatatagcatacgaagagtaagtaagaactgaaagaactgataggaatactagaaataacctcaagaaggttggaatttctcaagagaacaagaaggaagtggaaaagaaactgactgtgaagcctatagaaaccaagaacaagttctcccaggcgaagctgttggcaggagctgtgaagcataagagctcagagagtggcaacagtgtgaaaagactgaaaccggaccctgagccagatgactagaatcaagagccctcatccct

SEQ ID NO: 557577 - DNA, 145 bp, Homo sapiens
tggcccgaaataaagagaaagaaggaaggcaccagagaagttgccaacttcaatatataaaagaattttcttcttttcttttcttctttctctatctctctctctccctttttctctttctctctttctctccttctctttcttt

SEQ ID NO: 557578 - DNA, 212 bp, Homo sapiens
  misc_feature (1)..(1): n is a, c, g, or t
  misc_feature (44)..(44): n is a, c, g, or t
nggggggggagtgtatgtaatgtgtgtgtggtgtgtgtgagggnagtgtggatgtatgtaaggagagtgtggctgtgtgggtctgtgtgtgggggggagtgtgtaatgtgtgtgtgtgtgtgtgtgtgtgtgtgtgtgcgtgtgtgtgtgtgtgtgtgtgtgtgtgtgtgtgtgtgtgtgtgtgtgtgtgtgtgtgtgtgtgtgtgtgtgtg

SEQ ID NO: 557579 - DNA, 483 bp, Homo sapiens
tacagttagggtatctggttcctaatggaagactaaactcatgcttattgctaaatgtggtcttggcccacctaaatttaagatgcagcattttagaagatttacattatccaatgtttctacagtattgttggctaatttttaacataaagtcatgatcaggtgtgcattgggtgatttatatgtgtactcattctcttacctagcgaacaagatcttttcagaggggggtgtttctaaaagagctttgtacaaaagtggcctggtggacatttaggcctgggtgatgcattggctcttcctgtttggttgcccatgtttcaatgtagagttgctctgttttcttcaaactgtattaatggcggcatttctcagcataaacttatcccatggtattttttctatcaaatacacatatttttcttcggaacctttaaaaaacaaaacaaacatcaaaattcaacatgaacacgcaaccagttg

SEQ ID NO: 557580 - DNA, 135 bp, Homo sapiens
ccgatgcttattggagtagggatgggtcggaacagcgtaaggctgatgtgcaggaagggcgcggacgagtcaaagcggagcacggacacgcatttcatgtagttctcacagtggctctcgccaggcaccacgttg

SEQ ID NO: 557581 - DNA, 110 bp, Homo sapiens
ggaggtaggccaaaaaaacggtttttaaatttacaattggggggggaggggtttattaaacccatgaaaggggttcccttgttttggggttaaaaaaatttggggccgga

SEQ ID NO: 557582 - DNA, 863 bp, Homo sapiens
attcatttgaaataatccaggataatattctatttacttaagggacacaaagtaaataaatgttttgaaatgaatggatgaagtggatccagattttcacaggaaaaacaaagtttccttttcccttagttctccttacacacctggctttgcaggaaacgcacttatcattgggacacacacatctgcctcagccacaggtagaacaggcttggactacatgtcggttgacgttgacaatctcagtccttccccaaccatccaaaatatttacctccctcccttgtctcacaatcatctaagctgccttcttgaatgactcccacacctgtgcatcatagaaggaacacacatacaagcaaatgccatatcaaatctctcttcttcaacaaggtcttctgtttgaaatactgaaacagttcctgttctattacctcaccagtgtggcttctatctcctaaagggaatagctgacgtcttaccagtcaaagtccatggtgttacggagccataatatctccttcaatcctccatgataatccccctctgatggtacagcagatcctgtaacatgcaaggggagcaggagagtcttgatgactgtaactaagccctgagatatcccagtcttctcaagaatttatttcaacatgcgtcacaatccggacaatgtgctggatacctatcataattttttaacggttcatgatggacttaatttaccgcacaaaagtgcatgaagtcaagggctgctgaagcaggttgaacaatcgctaccaccgaaacacacaaatgcgcggataacatgggccacaactacttcaagatgtgcacacggccatttccactcgcgtaattaaaaa

SEQ ID NO: 557583 - DNA, 248 bp, Homo sapiens
gtttgccattcttgagtaacccgacagtatcccaagtgatatcgagattcgaaatacgcaacgtctcaactcacattgttgtctgcaaacgttgtctccgtagttatcaaagcggctctaggtggcgtacttcccagtgcctccatagccataggcgaaaggctcttcgcctatctggtttctgcaggagtcctagggaccagccgatacggatcacgtgggagtccgcctgtcttgagggtaccgag

SEQ ID NO: 557584 - DNA, 1317 bp, Homo sapiens
  misc_feature (997)..(997): n is a, c, g, or t
  misc_feature (1021)..(1021): n is a, c, g, or t
  misc_feature (1317)..(1317): n is a, c, g, or t
gctgacaaaatatttgaagaaataatggacaaaaaagtctcattcagtgaaaaacataaacttagggtttacagaggctcagcagatcccaactaggaacaacaatactaacgagaccacagatatcatggcacagtcctagtaaaacctgtggaaaaccaaagaaaaagagaaaactgattaaacagtatcttgaggggagggaaaaccgcattacaaggccaccaataccatggtcagggaccacacaccaagcattaacagattttgactggccttccatagcaaggtcactaggaaccgccggacaggtcacaccagaaggagttctcaacactggcccaggaaggcttcaacccgacacacgcgggggtccaaccgcaaacattaaccccttggtagaaactccagggacaatttctcttaattcctaaactgggcattggtccttgacaacacacaaacaaacttaacgggtggaccccttggcaacggaaaccattttgcacaggcaactttcactttacacacaggcctggacaacagcaacggtttcgggtgaacccaaggttcaaaatttccccttaaagcccctttaaatcaaacggaaaaaaattgggcgtttaaaaaaagggtgttgggttcccctattaccacaggggcgcacaacaacggggggacacacacttaattttggcccacacgaacttggtcggcaacaactccttctcaaagaacttctctaacgacagaaacacaaaggttacacttggtcacaggacaagtttacaccctgtgtggacaacacttacggttagacaacttgttaaggacaaaaccccccttttgtagtaggtaccattgtaaactgcgaaacattatatctgtggggacacaaccaggacaacacaaccatcttgcggggctaaccacttttacacaccagcgaccacacacattttgagggccaggttaaaacacacgacgaagggagganattatatacattataaagtattgngcaccacaatcttataagcgaacactttagggggactagtacgccccattctatcaaagcggccacactggctgcatattatcaagccgatccacctaatgagacaacacaaaaaacccccaagcagcggaccaaacattctctaccacacaacacgactaggggcgcctattaagtgattgacaaagaggccaccaagggtttgagaacacggcaaagcacatatacaacaacaatacaactataaaaacgaacaagtcggcatacttggatactgatacagaacaaccaccacn

SEQ ID NO: 557585 - DNA, 250 bp, Homo sapiens
ctactccccaacagatcaatcatcatgtccatggttgcttacacacaaatttattcctttcacgtcttcactactctccaaatcgtgcatctccatcacttcacttcagttattcattacggagttcctctacagctttccacaaatttcatattacctagtcctatttcttgtgctacagctacgatactctaatcgctggagaatcaggaagtagggccttgcccttggtatacccgccgcagtacag

SEQ ID NO: 557586 - DNA, 925 bp, Homo sapiens
taaggcaggtacgaggcctgggtggtatcttgccccctctgctgatgcccccatggtcgtcatgggtgtgagccatgagaagtatgacaacagcctcaagatcatcagcaatgcctcctgcagcacaactgcttagcacccctggccaaggtcatccatgacgaaactttggtatcgtggtcaggactcatgaccgacagatccatgccatcactggcacccagaagactgtggatggccctccgggaaactgtggcgtgatggccgcaggggcgtcgtccacgaacatcatcccctgcactctacgtggctgcttgccaatagggcgtagtgaggcgaaggctcatcgcctgcagtccgttgaagcaggagaaggcgtcgactaggctatggcacttccgttgtcccgcactggccaagcgtggtcagttggtgtgaccgtgaccatgccgtcatagtaaagaacgcgtgccaacatactgagtgagcactcaaaggaagggtggtgaaagcaaggcgtccgagagaggccccctcaagggcatcctgggctacacatgagcaccaggtggtctcctctgacttcaggacagggacacccagtccttccagctttgacgctggtggctggcattgccctcaagcgaccatctttgtcaagcctcagtttcctggtatgacaacgcaatttggcgtacagcagacatgtggtggtgtgacctcatggcccatatggctccaaggagtaagacccctggaccacagcccagtaagagcacaagaggagagagagagaccctcactgtggggagtcctgcacagtcagtcccccagcaactgaatctcccctcctcacagttggcatgtagacgccttgagacggggaggggctagggaccgaactgtatggtccatcataagtacc

SEQ ID NO: 557587 - DNA, 628 bp, Homo sapiens
agatgaaagacctatgatgtttcatttggcaacattgaaaggagataccatacaagaaccttacagggtgtgagcaaaactgcctgcagaactaacgaggaagagacgatacatgaaggaagaatccactggagattatgacatttgctaaacagaccatacaatagctggatgatttggaaacacagtgcaaatgatcagcgtgacgagaaagatcaccattatggatgagaacacagtgagatgaatctactatgatagaagagcagccaactggaaatgtcaacttgcgacagttcgaactataaatatgcagtgaaacatatgcatggcagaaagagttgaaattcagcgaatgaatcatatcaacgcgtggtggggccgacaagcataagagacggaaactatagatctagtgacagactccaatccaaagaactgacacttgctactacactttatgagaatctgccaggcacttggactgcgcatctgaaagaaagctgatccattcgtagtacgaataacttcgtcgctccattcccgatcacatgtaaatccgctacgtcaaacagtgatgaactataagttagtgagatatgccaagcgcagtcttacccttttggcg

SEQ ID NO: 557588 - DNA, 653 bp, Homo sapiens
  misc_feature (3)..(3): n is a, c, g, or t
  misc_feature (103)..(103): n is a, c, g, or t
  misc_feature (162)..(163): n is a, c, g, or t
  misc_feature (170)..(170): n is a, c, g, or t
  misc_feature (173)..(173): n is a, c, g, or t
  misc_feature (195)..(195): n is a, c, g, or t
  misc_feature (209)..(209): n is a, c, g, or t
  misc_feature (315)..(315): n is a, c, g, or t
  misc_feature (328)..(328): n is a, c, g, or t
  misc_feature (341)..(342): n is a, c, g, or t
  misc_feature (357)..(357): n is a, c, g, or t
  misc_feature (360)..(360): n is a, c, g, or t
  misc_feature (405)..(405): n is a, c, g, or t
  misc_feature (414)..(414): n is a, c, g, or t
  misc_feature (467)..(467): n is a, c, g, or t
  misc_feature (483)..(483): n is a, c, g, or t
  misc_feature (499)..(499): n is a, c, g, or t
  misc_feature (502)..(504): n is a, c, g, or t
  misc_feature (507)..(508): n is a, c, g, or t
  misc_feature (510)..(510): n is a, c, g, or t
  misc_feature (512)..(512): n is a, c, g, or t
  misc_feature (517)..(517): n is a, c, g, or t
  misc_feature (519)..(519): n is a, c, g, or t
  misc_feature (521)..(521): n is a, c, g, or t
  misc_feature (523)..(524): n is a, c, g, or t
  misc_feature (527)..(527): n is a, c, g, or t
  misc_feature (530)..(530): n is a, c, g, or t
  misc_feature (532)..(533): n is a, c, g, or t
  misc_feature (537)..(537): n is a, c, g, or t
  misc_feature (540)..(540): n is a, c, g, or t
  misc_feature (548)..(549): n is a, c, g, or t
  misc_feature (551)..(551): n is a, c, g, or t
  misc_feature (553)..(553): n is a, c, g, or t
  misc_feature (555)..(555): n is a, c, g, or t
  misc_feature (557)..(557): n is a, c, g, or t
  misc_feature (559)..(559): n is a, c, g, or t
  misc_feature (562)..(563): n is a, c, g, or t
  misc_feature (568)..(568): n is a, c, g, or t
atnttcccccccccccccgccccgcacaaaataattctgtggcagggcaaggcttaaatgtgtcccttattaatatgtaaattcacagtaaatatgtaaagcnaaatacttccccccccaaagatcattatctttattgattagcactgaggaccttaacanngtgatanatnatatatttataatttaccatcncttgatgagacccntatccccttatataggtcagccttgcaagtaccattttataagcagctgtgaaatttaagtgaaatgttctttgtaaacatttgtactattttaaatgaataatgnccttatgaagtangctatctgtaggnngaaattataggtacntcngttttcactatatgatattaagaaagcgtgaaatgacttaaatgntcatttttntctgtatagatactttatcatgttttcatgattttaggaattactgctttgtngatattcaaagtgtanacctaaacctttatgnttnnnctnnantncttgncntntnnccnctntnncccnttnaaaataanntncntncncnttnnctttngatgggaaataaggttgtatgttgatggatgaattttggcatgatgactgtactctcaataaaggctgaaaatgttgtataaaaa

SEQ ID NO: 557589 - DNA, 901 bp, Homo sapiens
  misc_feature (901)..(901): n is a, c, g, or t
gaccactggtagcggcagagctcggcccgcgcctcctcgtacccgtgcgccccggaagcgatcccgcccgtgcaaggccgggtcttgaccccagggggtgccagtacatcgcaccggagggtttcccaccttccaaagagaagcctattgtccctaggtgcttggtgggaagctgccaagtgactaacccccttctcatggagccaaaagggtggtggacagactacctcggttggacatggtcccacccataggtgatttggtacacaccaagagtgtctcaggccggggagcaggcctactcgcccgtagctgcatggcggacagtttccaagagtaggaaactcctcccatttttcaccagcacagcgtgtgttaaaatgcacgtcagcgaggtccactcattgaaaccggacgggtgttttgcgtcccgcagccagtcccgtcacaaagtggtcgtctttgtgggcccccccaaaggggtgagggtgtggaccccacgggagcccataaaaggacggattagagggccgtctggtagtacacccttagtagacaacccctgttttggggcgagtaaaagtgcctgtggtacctctgtgccctgagtggtagtagtgcttgggtactcggagggtctagtcacgtgagggccatttgcgctgtggccgcaccttgtgtttggcgacacgggtcgattagggccgtcttcgccacgcggctgctgttggggcgccaccttagggggcgtggctttactggccctaaagaggttactctcactgcctttgaggtgcagttgttacgcggcgaccagtgtgtcttgtgtgcgttttgtgcgacaccccagcgtgttggggggtttcggcgccactccaggcgttgcgctccgtgttttggn

SEQ ID NO: 557590 - DNA, 108 bp, Homo sapiens
gtggttgatctagaggaccctgagctacatgcccagccaataaatagaaaactttttcactcaaaaaaacaacaattgtagtgaaaccatagaccagtgtggagagag

SEQ ID NO: 557591 - DNA, 952 bp, Homo sapiens
  misc_feature (27)..(27): n is a, c, g, or t
  misc_feature (213)..(213): n is a, c, g, or t
  misc_feature (228)..(228): n is a, c, g, or t
  misc_feature (241)..(241): n is a, c, g, or t
  misc_feature (245)..(245): n is a, c, g, or t
  misc_feature (254)..(254): n is a, c, g, or t
  misc_feature (258)..(258): n is a, c, g, or t
  misc_feature (261)..(261): n is a, c, g, or t
  misc_feature (266)..(266): n is a, c, g, or t
  misc_feature (275)..(275): n is a, c, g, or t
  misc_feature (284)..(284): n is a, c, g, or t
  misc_feature (297)..(298): n is a, c, g, or t
  misc_feature (343)..(343): n is a, c, g, or t
  misc_feature (374)..(374): n is a, c, g, or t
  misc_feature (385)..(385): n is a, c, g, or t
  misc_feature (392)..(392): n is a, c, g, or t
  misc_feature (398)..(398): n is a, c, g, or t
  misc_feature (405)..(405): n is a, c, g, or t
  misc_feature (408)..(408): n is a, c, g, or t
  misc_feature (432)..(432): n is a, c, g, or t
  misc_feature (460)..(460): n is a, c, g, or t
  misc_feature (464)..(464): n is a, c, g, or t
  misc_feature (483)..(483): n is a, c, g, or t
  misc_feature (495)..(495): n is a, c, g, or t
  misc_feature (524)..(524): n is a, c, g, or t
  misc_feature (567)..(567): n is a, c, g, or t
  misc_feature (627)..(627): n is a, c, g, or t
  misc_feature (629)..(631): n is a, c, g, or t
  misc_feature (633)..(637): n is a, c, g, or t
  misc_feature (651)..(653): n is a, c, g, or t
  misc_feature (655)..(655): n is a, c, g, or t
  misc_feature (657)..(657): n is a, c, g, or t
  misc_feature (670)..(670): n is a, c, g, or t
  misc_feature (761)..(761): n is a, c, g, or t
  misc_feature (781)..(781): n is a, c, g, or t
  misc_feature (937)..(937): n is a, c, g, or t
ctctttccttttttataaagtgaagangttcaactatccagagagtcccatctaactcaaaaaatgtaatggctttggttggattgcatcttcagtcagtacctgccatggcttaatcagtattttaagtgaatgaatcatgtttccccactagatcattacgagtaagcagtaagtaataaatagagaatattaagtattgaacattattanatgcagctttttctnctgcatagaaganagangaggctccnggcnggnattgnggccacgangagcttccnagacacccacggnnatcagatcttcttcttcctgcaggcagtgccttctggtggaaggngctcagtctatcagagaataaaccaggagcntgaaagcagtnctgtgtntctgcntttaatnagntgtcacttattctctccccaaganagggaaataggtctcagcagtttctgcnatcnatcatgaatcaatgaaatnatttcattaaanatttttttgtatgaatgtgcaaaattgcnaactaggagttcaatgggaaaaataaaaaaaacttagtttgtnaacatgatccatagacgagatgatcttcatgtgttccaaaggcagaaaggtgagaaaaanannnannnnngtctctgtccctcnnngncngaagaggtcaggnagtccaatgggcgatgctcctgtagataaggccaaagcaggagagctgagggtgtccaggttccatgccctgcatcaccaagaaccttctncctggcttgaaatctttggnaattcctggtttgagtcacagagaagcattgtcatgggctcagtaaccctgccacccctgtttatctccattctccctttggtcacagcagctgtcttaagacacaagaccatgcctgggccctatgtaggctggctgagaaggaaggttgctgcnatggcttcgaactca

SEQ ID NO: 557592 - DNA, 486 bp, Homo sapiens
gccagtgtggtggctcacgcctgtaatcgcagcacttggaaggccgaggcgggcggatcacgaggtcaacagttcaagaccagcctgaccaacagggtgaaaccccatctctattaaaaaaaaaaaaaaaaaaaaaaaaaaaaaatgggggggggcccgggcccctcgagagaaaggcgtttctataaacccattccggttggggcgcgcgggggcgccacaggaaggcgtcagggaaaacatggggcgcaataagcgggtgtccctaaggggagaacccggggccaaagagaccaaggggcggggatttctccaccacaatataaaaagagcgccccgggggggaaacacgcggagcgggtttgggaaaaaaaattccgaagagggagagttccgaggggcctcatatacagggggattcatattcacggggggggttccagagggagagacgcgaaatttaaaatttaggccccgcaggggggt

SEQ ID NO: 557593 - DNA, 344 bp, Homo sapiens
catcccggctaacacggtgaaaccccgtctctgctaaaaaatgcaaaaaaaattggccgggcgtggtggcgggcacctgtggtcccagctactcaggaggctgaggcaggagaatggcgtgaacccgggaggcggagcttgcagtgagcgagatcacgccactgcactccagcctgggtgacagagcaagactctgtctcaaaaaaaaaaaaaggaagcttgctgtcttatatgaggccagtagcacttgtaaatagctcctgtcgtgttgtgaaatgtgctataacagagataggtgtaaaatgctgcactccagcctgggtgacagagcaagactctgtctc

SEQ ID NO: 557594 - DNA, 110 bp, Homo sapiens
ttattacgatctagtatttgattgcgtaatcgggcactgtagtaaataataattgaccatttaaaaataactaaaagggtataattggattcatgcaacacggtctctca

SEQ ID NO: 557595 - DNA, 159 bp, Homo sapiens
agtctggcatacacgatgagtgaaaggatgatactagatctcttatactattatccttgaatcattttgattgccacaactaatcctcctcggactcctgtcctcacgcatatacaccaaccacccaactatctataaacctagtccatgggcatcccc

SEQ ID NO: 557596 - DNA, 219 bp, Homo sapiens
  misc_feature (123)..(123): n is a, c, g, or t
gatcaaaaggcacagactagccacagccccacgggaaacagcagtgattaacctttagacaataaacagaaagtttaactagagctatactataccccagaggttggtcaatttacgtgccangccaccgctggtcacacgattgaacccatagtcaatcagaagccggacgtaacagagtgtttatagactcactccccgtctctcgcctaaatgcag

SEQ ID NO: 557597 - DNA, 362 bp, Homo sapiens
gacacaaaccattatgataacccacctgtggtgtagagattgcctatgtttatttaaaaggcatttctcggccgggcgcggtggctcacacctgtaatcccagcactttgggaggctgaggcaggtggatcacgaggtcaggagatcgagaccatcctggccaacatggtgaaacccgtctccactaaaatacaaaaaaaaatagcccgacgtaatggtgcacacctgtagtcccagcctacttgggagtctgaggcaggggaattgcttcaacctgggagtcggaggttgcagtgagctgagattgcgccattgcattccagcccggcgacagagcgagactccttgtccaaaaaaaaaaa

SEQ ID NO: 557598 - DNA, 214 bp, Homo sapiens
gccatgtccaacatccgtgggtcacgtccaacatctgtgggtcagtccaacatcctggggtcagtccaacatcctggggtcagtccaacatcctggggtcagtccaacatcctggggtcagtccaacatccttgggtcagtccaacatccttgggtcagtccaactatcctgggtcagtcccaaaatccttgtgtcagtccaagtatccttggg

SEQ ID NO: 557599 - DNA, 426 bp, Homo sapiens
aaaggggcttttgggaggggcctgggcccaaatgtttgttcaccaggggtgtgggcctaaaggaaaaaccaaagcccaaaaatgttttttgcaggcccccgttttgacttaaagcttttgggggcatgttgccattgggttttgcccctgcaaaggcttcttaggtttccaggggccccccaggacccagggtcccaaattttgtttggggatgtgcacttctggccgccggccttacagtctttttcccctggggaggaacagtggcttttcaaagcctggggcaaccaaaaaaaggcaggagtttatttttgtgttgggtttggggtttttttgtccccaagggactgttttgtttttctttccccccctgcttttttttttgtaagccttcccccgttaaataaactttgggtgttgtttcca

SEQ ID NO: 557600 - DNA, 123 bp, Homo sapiens
aaaaagggtcccctttttttttttcaggggcccccaccccccccctcccatggtagaagttttccccccagctcctttggggggccccctgatgagtatttaaagcccgtttttaaatgccca

SEQ ID NO: 557601 - DNA, 767 bp, Homo sapiens
aagcagtggtatcaacgcagagtggccattatggcggggaaaaaaaaaaaaaaaaaaaaaaaaaaaaaaaaaaaaaaaaaaaaaaaaaaaaaaaaaaaaaaaaaaaaagaaaaaaaaaaaaaaaaaaaaaaaaaagaaaagacacgaacaaaacacgaaagcgaggagggtgatagcagcagccagacgaagctgaggtagcaagcctcccccacaatgtgtgctagggtgcgggcgagcggacaacgagcccgtgtcggtaaagagcagagatgggcggaaggctagcgcagagggggtctacccgcagcaactgtaggggatggtggcagcgacaaaccatggtacttttaggcacgccgcaaggaggccagagacagagcctcactatcgaggctatcaccgcgccataagacgtacaacgtgcgtggtatgttattgcgtagaagaacctaacacaatcaatcgtgcacaatccattccatattaaaaatatcaaaaataattacgaccgccaccccaaccatacttttacttcagttatttatttaatacataacaacactacaacacgcaaccatacgtcgtaatatcgcatcaaaagtcaatgaatcaacaacccacatcaacatcttcatatattcatcaatatacaactcaccctaaaacataacgatcagccacatgtaaaactaacttcaactagataatccctaccaacactcaagaaaatcttactatcaaatgactcacatactcacctatat

SEQ ID NO: 557602 - DNA, 168 bp, Homo sapiens
cctggcccaatggcagcatgaaggatctcgtatgactggactgtgtgcagtctgtgacataaagccttcctcggagctcagataatctgctagaagacaggacaaaggctgttgaggatagaaaattatcttcgcttcttgaacgatgtttccacgtggccattcgca

SEQ ID NO: 557603 - DNA, 332 bp, Homo sapiens
tcactctaaactggaaggtggaggttgcagtcagctgagatcacgccactgcactccagcctggacgacagagtaaggctccgtctcaaaaaaaaaaaaaaaaaaaaaaaaaaagggatttaattcttggcttttttttacctggccaagagcatctcctttacattcagtgcatgtggaaggtttttacccaagttagcagtttccccggggaattaataaaatcccccgaggacattggtctgggttgtggtgccctttattggggtgcgatttttccaggttcccttccccttccccttttctcacataaacaagaagaggccttaaac

SEQ ID NO: 557604 - DNA, 1079 bp, Homo sapiens
  misc_feature (288)..(288): n is a, c, g, or t
  misc_feature (292)..(292): n is a, c, g, or t
  misc_feature (297)..(297): n is a, c, g, or t
  misc_feature (321)..(321): n is a, c, g, or t
  misc_feature (324)..(324): n is a, c, g, or t
  misc_feature (332)..(332): n is a, c, g, or t
  misc_feature (335)..(335): n is a, c, g, or t
  misc_feature (344)..(344): n is a, c, g, or t
  misc_feature (350)..(350): n is a, c, g, or t
  misc_feature (370)..(370): n is a, c, g, or t
  misc_feature (385)..(385): n is a, c, g, or t
  misc_feature (395)..(395): n is a, c, g, or t
  misc_feature (409)..(409): n is a, c, g, or t
  misc_feature (443)..(443): n is a, c, g, or t
  misc_feature (451)..(453): n is a, c, g, or t
  misc_feature (721)..(721): n is a, c, g, or t
  misc_feature (767)..(767): n is a, c, g, or t
  misc_feature (771)..(771): n is a, c, g, or t
  misc_feature (791)..(791): n is a, c, g, or t
  misc_feature (797)..(798): n is a, c, g, or t
  misc_feature (961)..(961): n is a, c, g, or t
ttgccgttactggcgtctgtcgtttgtttggtctgcggcgtcgtgtttgtctccgtctctgtttttttggcggcacgtcttccggtgtgccaggccgtgcttgttctcttctagtccgcgttggtggtcacccattttctgggggccacatgggtgtccacaggtgtggagtcccctcccttttcgggaaggctcgtgtctggggcacaacccccctagtgcgcaggccttcgggccctgtaccccccgcttgggaactctcccttcattccggaattttggccttgngttnccccngggggccctccgtggtcagggcanttnctgcccanaanggccacctntgcccngtctgggccactgccccatnggaagtccctgggcnagcccaggcncctgtcttcgggcnccgagagacctcccttttcccgcctttaggtatncccccctnnnatctcccgggcccccttggaatcctgagtgatggcccgctgatccagactggagaccaagtgggaacccgcgaagccccgctgcttggacctgctcaacaatttcccccttttcccttggcctggtcatccccccggttttcgaccatgccagcatttaccaccccgaagtgcttgatgatccccgaggacactcttgccattttcgcttcctggagggtgtcccccaatgttgcccagtgtctgtcttgccagattggcgtaccccnactgttgccatccgtacccccattcttatccatccaccgggtaccnaacngagtccctggcccttgtctnttggannaccggattacccccttccccccttgctgaaaaggtccaggccctttttggctgatcccatctgccctttgtggctgctgcccccgtggctgctgcccccccagctgctcctgctgctgctgcagcccccagctaaggttgaagcccaggaagagtcggaggantccggacgaggatatgggatttggtctctttgactaatccaccccaaaagccaacccacttagccccgttttatttgccaaaccaggaaataaaggcttactttttttaaaagtccca

SEQ ID NO: 557605 - DNA, 147 bp, Homo sapiens
tttacatctcatcttcctgatggaagcttctcctgacccctcctatattcatcatgtccatcttacatgtcacttcctgatggaagctactcctgaaccctccttatccatcatgttccaccttacatcttattcatcatgttccat

SEQ ID NO: 557606 - DNA, 202 bp, Homo sapiens
cggatccactccggaaaaaaagaaccatttggatacataggtatggtctgagctctgatctcaattggcttcctagggtttatcgtgtgagcacaacatatatttacagtaggaatagacgatagaacacacgagcatatttcaccatccgactaccaataatcatcgactatccccaaccggacgtcaaagatatttcagc

SEQ ID NO: 557607 - DNA, 128 bp, Homo sapiens
ctctagaggatcctgtgcactgcttcggatgcccagaaacgcacgatcttcagttcctgtggggctgggaggggtgtggaagagactggtgtctcaccagcaatggctgcctcccccacagcctgtcc

SEQ ID NO: 557608 - DNA, 963 bp, Homo sapiens
cttccgttgggccccgcgcgtgtttgagctccttctccaattttccgccgcgcacaagcgttgtttcctctcggtggacctcgaccccgcccttttaccattgcgcccgtggtttaccccggccccgctccgggaacacctaccccccttggtccacacctatgtccgggggatatcacaaccccccccttgtcgccgttccctccacagtgggttaagtactccgcacccggccccctttcgaccagggcggccaaccctacttgcggtccggaggacctccagccgcccgtgcgtgtggatttccgccccctcgtaccagtagggcgccgttcttctccggagtgggtccaccacccgcacgtacggccccgctttttgtcaccccctcgcctcgaatgtccacccggggaggaattgtgtggccctctcttcaaagaatcatgcggggggccccaaagactcctttctcgtccctctcacgaattctcgcagaacgcccccagacctacaacaggctggtaccattttaggactaggatgcgcatgttgatagaacaccggcgggtccctctcgtgttatactggctaccatccctctcgcagtagtacgcctcccacgtcggtcccctccggtgggagattttttcaaataactatgtaggttgctgggatactcccggaaccgaaacatattgtagcacccccgctttggaaaaagagtattgcgagatcccactgcgacgtacccagtcgcataacggatgcaaggggtaaccccatggtgagtggggcatcctcctactacgacacgaccgcctcgagtggcgatgagtcacaaaaatctctggaggaccatacctagcctcccgccacccctcagacacaattgcagcatccagcgtttttcccccacccgcaccaaaaaaaatttctggctttgggaccccacaaacaaaaaca

SEQ ID NO: 557609 - DNA, 951 bp, Homo sapiens
cacttgtcatatagctaagtgtggtgtcctcgcatcaatctcgttttgttggtgacactcgctgttcgccgtcgtgtgctatagtcgcgagtcctcgttggggccgccctcatagggggccataacaacgtttgggtacaccagaggctctttccccaccaggggccgacataccggccaattttcccccggcgctgggacttctcccctaatggtaacatcttaatccgtgccctgcggggtcaacaccctcccagtccacagtcggtgcctgctgtttcccccaatccgaggggggggccttttccccgtttaccccggcgcggtgatgtacaccctctggcctgcactgcgtttaaccgcccttctctttctggccctaagtatcttccccggcgcgcccgtggacattggacacctcccttctccgggggccccccttcgcaagtgggtcccaggggtaaccctcattggatccccctgggcttttcccccccgtccccaggtttcgcaacgagtgtggctccaggggcgcacccccctttattggagatcccgtaaccacccgcgggggtcgccttatagggcatgtacaaggacattggtgggcccttctcatgactgtgaacagaccccttgtggcgggaagaaacccgagctagccccatatgaggacagggaaggtcaacactcaccccagacgcatttctagggcgcctcaaccaacagggcagagactgggccgcaatcaaggcaccctcgtaccccctctctctgtagacgctgtgacctccgcaaacaccaagttcaaggggcgcccaccagggcggaacacgcggaaggcccactgcctcccgtgctccccccgcatgacgcacttttccctcccgggagatccccgcccgaacttttcaagggggataaaaaacaaaaaaaaacccccacataaca

SEQ ID NO: 557610 - DNA, 197 bp, Homo sapiens
agtgcagccgaccgaattgtttgcagatggatggacaatccccaccttcagcaggggaggccaaggccccaacacaccagcggagaagagctgtgggcagcgaatggctgaggctatcttggggagctgccccacctccatcggagatactacctgaggaattcacaggctcccagcaggggggagagtgagcacta

SEQ ID NO: 557611 - DNA, 131 bp, Homo sapiens
tacagcagggatgcgccagcagttattgtctgggtgcgcatgaaatctgcatacatctccagcaaagatcgcttctccaggataaaggtgggaagcaccaaccctgtgtccaatccattcaagtttgagtg

SEQ ID NO: 557612 - DNA, 1220 bp, Homo sapiens
gcgggtggtgtctctcgtcggggggggacgcgcgttgttggttgctgtttgtggcgggggttgtccgccctggggtgttgtgtggcgggggggggtggctgtggtgtgtggacggcgtttggtgcgttcgggggcgtcttttgggggtgcacgcgcttggggcggcggtgggtggggcggggggcgcgggtggtgtgggcggggggcgagaggttttcgccgggggggtgtttgtgtggacgggcttgtgggggggccgtgtgttttgggttgtgttgtggtgtgtgggggttgtcgtctgtcgtgggtgttgtgttcctttttcctcggggggggggggcgccccgcggggtgtttctctggccgcctgttgtcagttgtgggggttggtcctgcttttggacttgggctcggcgctggtgggtggttgttgtgtgaggctgctggtttttggtggtgtggcgtcgctcgcaccctccgctctcgcggggggagcgaccctgcgcgcgggtgggggcgacgcgcgtcgcggtggccgcgcggattgtggtcggcagcgttttttgtgggggtggaatcgggtgatgtggggttgtcccccccgcgcggggggggggcgcgtcttttgtgtgtgtgtcgccacgccgccgcgcgcgcgtgtgggccccggcggggggacgcgcccctctctctctctgtctgtaggtgccgcgcgcgctagataagaggttttttttggtgttgtactccccccccgctctctctcgcgccgcgccgctgttgtgtgtggctcgtccctctctctcgtggggtggtgtggtgtgtaagactctcgctctcccgctgtgcgcacacctcacatgttgtgtgtgcgcgcagagaggtggtgggggtgtgtacacacatatatgttggtgcgtacccccgctcgttgtgggaggcccccccggcgggaggagagagacaccacccccctctttgttggggcctcttcactctcctcccctctctgttaagacacacccccgttggtttgtccgcgcgccctcctctcgcggggcgccccgcgtgtgtacccccgagggcccgcgggggggtgtgtttagtctctctctcttgagggagcgcgtctgttttttggtgtgggttggcgccccccccccccccccccccctctttgttctcccccctcatgaccccccctctttttccccccccca

SEQ ID NO: 557613 - DNA, 809 bp, Homo sapiens
  misc_feature (50)..(50): n is a, c, g, or t
  misc_feature (66)..(66): n is a, c, g, or t
  misc_feature (68)..(68): n is a, c, g, or t
cgagaagaagaggagagaagaacgatcaaggagaaagaggacaatcgagnaccattggaaatgacnancgatgtgtaggacaaggaaccagggggggaaggaaaaatgggaataaaaggaaagggaaaaagtatagaatgaaaatattaggagaaaaaaggaggggggaaaatagggggagaaggaggaagacaaagaggggaagaaaaaagagaaaaaaaaaaaaagaagaaaggaaagaaagaggaaaaagaaaaaaagagaaaaagaaaggaagaaaaagaagaagaaaagaagggaaaagaactaagagggaaaaaaaagagaaaagaaggagagagaaaaaaaagaaaagagaaaagggaaaaggtaaaaaatgaagaagaaaaaaaaaagaaaaaaaaggaaagggaaaaaaaaagaaagagaaaagaaaagaaagagaaagaaaaagaggagggagaaaaagaggagagaaagaagaagaaaaaggagaaagaaagaaagaagaaaaaaagaaagggaaaaagagagaaaaaaagaagacaaatagaagaggaaaagagggagaaaggaaaagaaaaggagaagaataaaaagaagaaagacagaaagaaaagaaaagaaaggagaaaaggagaaagcagaaaaaaagaagaaagttaaagagagaaaagaataaaaaagagaagagaagagaagagaaaaaaaggagagaaagaggagaagaaagaaagcaaagaaaggaaaaataagaaaaaaaaacagaagataagaaagagggaaaaaagagagaagacaagggaaga

SEQ ID NO: 557614 - DNA, 151 bp, Homo sapiens
cacgtcagcactccttgctcagggtgtgcttgtcatcctccctgctggagtacttgtggaagatggcacgaggaggccaatggcctgatccaggggcatgccatggctgagggctgggtgttttagcatttttataaatcatcttaatctt

SEQ ID NO: 557615 - DNA, 399 bp, Homo sapiens
tcccaggaaaaccattttaatgtggagacgatgagacaataggggcatagggatgcaaattgaactggggttaaagttgagatagtcgagatagctgaaggttggattttatttcaaaagcatctccttactatatacttagcagttacaaagatttcacaggggagaagctggaaggcagcacctgaatcaggcacgtaaggtgcacataaccactaaggggactaactgaattgtgcaccacctattaggatgcagagaagaacccagccacctccttgaactgttccagccagaggcgcaaaacctagatctattcaaagggaatcaccaaccaatcccacattaggggaccccacaaaataactgctgggaatcattataagtgtcaagctcagg

SEQ ID NO: 557616 - DNA, 744 bp, Homo sapiens
ggaatagcatcaacatcaacaaaaaggacttccatacaaaaaccccatccgaaggtcaccaacatcaaagaccaaaggtagataaatccatgatgatgaggaaaaaccagtgcaaaaggctgaaaattccaaaaaccagaacacctcttctcctccaaaggatcacaactcctcgccagcaagggaacaaaactggatggagaatgagtttaacaaactgacagaagtaggcttcagaacgtgggtaataaactcctctaagctaaaggagcatgttctaacacaatgcagttaaactaagaactttgagaaaaggttagaggaattgctaactagaataaccagtttagagaagaacataaatgacctgatggagctaaaaaaacacagcacgaaaacttcatgaagcatacaccggtgtcaatagatgaatcgacttgtagagtttctgcagacagattctgtttcaagcagtagaaacggatatcagagatcgaaggtcaacttaatgacaactaccgtgcagaagacaagattagagaaaaaacagaatgacaaggcacgaacaaagcctccaagacatatgggactatgtgaaaagcccaaatctatgattgattggggtccctaaaagtgacgtggagaatggaaccaatttggaaaacactcttcaggatatgatccaggagaattcccccaacctagcaagacagaccaacattcaaatcggggaaatacacagga

SEQ ID NO: 557617 - DNA, 186 bp, Homo sapiens
agcaaagatatatctggcaacaatctggatccacatcggagcagggagatactgatcgcttcgccgtggagttgttctcgacgtcaccctactaggactggagaagaggagccagaatggcttcttgtctggtgatattattgccttcacttggggtggtggagatgatgacctagatgggctctg

SEQ ID NO: 557618 - DNA, 733 bp, Homo sapiens
gggtttcatcatgttggccaggatggtctcgatctcctgacctcgtgatccacccacctcagcctcccaaagtgttgggattacaggcgtgagccaccacacccggccagaaatgctttcaagcttcctaaatcaataagaaataaggccgggcacagtggctcatgcctgtaatcccagcacttttggacgtcgaggtgggtggatcacttgagcccaggagtttgagaacagcctgggcaacgtggggagatcccgtctctaaaaaaaataaaatgtagccaggtgcgatggtggatgcctgtgagcccagctactcgggaggctaaggcaggaggatcacttgagcctgggaagtcggtggtgcagtgagctatgatcacaccactgcactcaaccatgattgcaccaccacactccagcctgggcaacagagtgagaacctgtctcaaaacaaccaaacaaaccactaaggccgggcgcagttggcttcacacctgtaatcgcagctcttcgagaagccaaagtgggcagatccgcttgcagccacgacgtccgagaccagcctgggcaacatggcgaaaccctgttctctaccaaacacataccacaacttagccgagccgtgctgggcatgccccctggtactcccaagctactcaaggaggcctgacggccacgaggatcactttgacgctgcgcacctcgacgctccagtaaagccatgatcgtc

SEQ ID NO: 557619 - DNA, 253 bp, Homo sapiens
atatgagccaggagtcgaggctacagtgagccatgacacatcactctcccaacagcacaacagagcaagactcatttttttggagacggactctggctcggtggcccaggcgggagtgcaggggctcacggcaagctcggcctccggggtggaggccattctccggcctcagcctcccaagtagcggggaccacaggcaccggccaccatacccagctaattttttggtattttaagtagagatggtgcgtgg

SEQ ID NO: 557620 - DNA, 294 bp, Homo sapiens
gggcaggcttcagaaagcacaccaaggtgaaaaagagtaactaattatgttcaaagacatatggaaaagtgccaggcatggtggctcacgcctgtagtcctggcacttagggaggccaaggcgggcagatcacttaaggtcaggagttcaagaccagcctggccaacaaggcgaaatgctgtctcgactaaacatacaaaaattagccagaaatcacttgaatctgggaggcggaagttgcagtatgccaagatcgtgccactgcactccagcctgggcaacagagtgagactc

SEQ ID NO: 557621 - DNA, 795 bp, Homo sapiens
ctgcggcactgcccggtttgagcgtagccaaacctgcccaccgtgctttgtagccccgattctctgtgttttgctcccgtctccgacgagagagtgcggcgacgtgtggcgtctgcgacggtgagacagtcgcgtctgtgatgctgatgatgagctgctgctgcctgcctgcctgcccctaacatgctgtgatgtgctgcctgcctgccatctggtctgtcaccatgacctggagcctgcattgccctccctgatgccctggcccatcctgtgcccctgctccccagatctctatccttttgggaccatgctgctggaggagggctttggggacctgtggaccgggatcgtgacctgtggagtgatttggaggcaatgagtgtgtgtggtggccttcccccgaagaaattttggtaatcctgggtgagcgtctttgcgtaaaaacacaagtgggattttgacgtgagctccccaagtttgagaaaaatttttcatgtggaacatcctggaagtagcaatggctgacaccatatgaggttgatgagctacgccgaaagaaggagattacagtgagggggggagatgtttgtcctaaacccgtgtttgccttccatcatgctaacttcccacacatatgtactgtgatgtgttgatggatcagcactttacaggaaccaactcccaattcagtgccagggattccgttggctcttattgccggatatggttggcttggccagactggttctggaacagtggcgaattcctgccgcatttcctttaaccccgcctatg

SEQ ID NO: 557622 - DNA, 245 bp, Homo sapiens
cccttcgggtgaatcggttactgtgacttacggacgtacgggttaggactgacgtgggaccgaccgacccgacgacggacacgtaaacgtttaacttacttgccttttaggggttgacggtgactgactggacggtggacgactttgcgtggctgtgaacacttgttttacggtaactcagcttattctaggtcagtgttaggcaccgaaggctgatgagggataccgacgctcgacattcgtaa

SEQ ID NO: 557623 - DNA, 359 bp, Homo sapiens
gagctgtagaggcctgagcgggcagaccacttgagatcaggagtttgagtcgtttggcaaacatggtgaaaccctgtctccaccaaaaatacaaaaactagctaggcatggtggcacacacctgtggtcctagctacttgggaggctgaggtgggaggatcacatgagcccaggagttcgagattgcagtgaactgtgattgcaccactgtactccagtctgggtgacagagagagaccctgtctaaacaaaaaagagagagagagagagagagaggaggcagagtgagataactaaatagaagcctccactgattggcctccctgcagtagcaccaaatttgacaactgtctacacag

SEQ ID NO: 557624 - DNA, 165 bp, Homo sapiens
  misc_feature (103)..(103): n is a, c, g, or t
cataacatctttccatgttaggacttcttccacctcaaagatgttatgatccttgttctgctggccccttaaaccaagtcttacgtgtttacatgaatccccnggtgacgcgggatccctctagtagtacgacctagcagcgcatgcacagcttgagcactaggc

SEQ ID NO: 557625 - DNA, 148 bp, Homo sapiens
  misc_feature (66)..(66): n is a, c, g, or t
gagatcccccgactagcccgacaggcaggagatcctactctaaggagcgacatctccaaggccagngaaaggcgacagcggcatcgaaggctcacggaaggccggccttacttaaggtgagcagatgcagctgtcgggctagtcgggg

SEQ ID NO: 557626 - DNA, 442 bp, Homo sapiens
  misc_feature (249)..(249): n is a, c, g, or t
atggatcacctgaggtcaggagttggagaccaacctgaccagcatggagaaaccccgtttctactaaaaatgcaaaattggccgggcatggtggcaggcgcctgtggtcccagatactcgggaggctgaggcaggggaatcacttgaacccgggaggcagaggttgcagtgagccaagatcgcgccattgcactccagcctgggcaagaagagcaaaactccatctcaaaaaaaaaaaaagagtactanttgatccagaaggtgaaccagactagcctcactggagataaatagggtgacattattatgcaaaaggtggttttacagttccccttgtccttgtttttgggaatagtattaagaaggcctaccataccaaattaaataaaggccccatcacaaagccctcacccaaagggacaaaaacctaattcaacttctt

SEQ ID NO: 557627 - DNA, 184 bp, Homo sapiens
  misc_feature (17)..(17): n is a, c, g, or t
tccccccgtttttaaanccctgggggggggaaagacccctctttcttttttcccaaaagcggggccttttttttgggttgttttttggggttggggttttccccttttttttttaggaactttttttgggatttttttgcctttgcccccccctgttaattaaaaaaaaggggtggaaaggcca

SEQ ID NO: 557628 - DNA, 190 bp, Homo sapiens
cgccgggcaccgatctcgccaagatcctgagtgatatgcgaagccaatatgatgagctgggctaacagaaccggaatgattctgaagcctggttcaccagccggactgatgaattgaaccgggagagcgctggtcacacggagcagctccagaataaggtggtccgaggtaactgacctgtgagttcacc

SEQ ID NO: 557629 - DNA, 648 bp, Homo sapiens
atgcgggctggtaaaatgtcaaacatacgtacatgccggctcaggcgcgcccagttcgggcccacacgcgcctgagtttaccggtgcctactcatctctaatgttcttgcgcgtggcactacgctccatgagtagtgtggccgggcaccatatcctaagttctagaagcagcgacagccagggtgcctgctgtacccggcttttctagggcggtctcaacctcggtccccgccgaataagccttgttggggaactattgtttgctccagcgcggtttgctaacaactttgcgcgcgtatccccccgctcttttagactccgtggggtggacccacttctaggatatatatataccaccgttttcccgctagtcgcaaaaatacgcttttctccactcttcactagctgcctcaacatgtatttgccgccctaaacatcccttgaacacaatgattgacccaccgaccccactgggggtacactactcacccacccccccactgactaaacagaagataccagcctcacatttacacaccgcaggacacaccaccccccctactggtttaatacaccaccattccccccccttttccccgatgtccccaaaccccgaaataacccgggttttcctcttaacacaaaaca

SEQ ID NO: 557630 - DNA, 504 bp, Homo sapiens
  misc_feature (1)..(1): n is a, c, g, or t
  misc_feature (30)..(30): n is a, c, g, or t
  misc_feature (38)..(38): n is a, c, g, or t
  misc_feature (395)..(395): n is a, c, g, or t
  misc_feature (407)..(407): n is a, c, g, or t
  misc_feature (417)..(417): n is a, c, g, or t
  misc_feature (473)..(473): n is a, c, g, or t
  misc_feature (493)..(493): n is a, c, g, or t
ngctcttgctcacgcagtcatggcctccgnaacgcgcnaatcggaaagtcggctcctgacttcacggccacagcggtggtggatggtgccttcaaggaaatcaagctttcggactacagagggaagtacgtggtcctctttttctacccactggacttcacttttgtttgccccacggagatcatcgcttttagcaccatgctgaggacttccgaaagctaggctgcgaggtgctgggagtgtctgtggactctcagttcacccacctggcgtggatcaataccccacggaaggagggaggcttgggcccctgaatatccctctgcttgctgacgtgactaaaagcttgtcccagaattacggcgtgttgaaaaatgatgaggcattgcttacangggtctctttanaatcgatgcnagggtgtcttggcagatcacagtcaatgacctacctgtggacgctctgtagacgangctctccgctagtccagccnttaagtatcag

SEQ ID NO: 557631 - DNA, 760 bp, Homo sapiens
tgggatactttaattacgtgtgtcccatgcattgggttcagggaaagtcagtgattggaaacgaatgcagttcaagactgattaatgttatttaaacatagtgcaatattgattctctgcggttatctctgaatgatcacgacctactatagatgattttagcggaccttaactgtttccccactttgatgatagttataaatagtatagtgttaagatcgcaataacgtctctccctggcctttaaagtctagttgctctcttgcacgactatgcaaatcgacgctcttaacgcgacgcacctaatggcgatacactgaatacccaactgacagggtataggtctttagctgtagatcacaagccgtgaacaatatgactgtcggtgtgtactccacgtacagattagttctcttcttctactcgaagcatggcagctcattatataagagttgtcgatgttttcttaattactgtacacatgtgtatagtgttttttgcttgtgttgatgcttctatgtgtcttctaataggttttcattgttagtttacttaaagttgtgatagctagatttagattctgatgctaactgcaaatcaggttggtctctgctgggtctctcctgcttttatttgactttaaggacaagtgtagttgtcgtccaccacctttcaaaaaatgtgaaactgcctgcgtcccctttagtgctgacaacactgtgtacattgaccacttcctaccatactttatgtcgttact

SEQ ID NO: 557632 - DNA, 326 bp, Homo sapiens
agcaacaaggctgtttatttcacttgggtgcaagtgggctgagtccaaaaagagagtcagcaaagggagataggggtggggcagttttataggatttgggtaggtagtggaaaattacaggtaaaggtggttatatcttgtgggcaggggcgggggtcacaaagtgccaaggtgctgggtggggagatcatgagactcactgtctggggcaccgtgaatgacacaatgtcgattgattacttggggtggggcaggaacaaatgtcagtggtggaatgccatcttttgcgggggttcagttgctccagatcatctggttgtatacag

SEQ ID NO: 557633 - DNA, 306 bp, Homo sapiens
gtttttttggggggggggggggttttttttaaaaaaaaaagcccccccacccgggaaaaacccccaaaaatttttccttgtgggggggggtttcccccccccccgggggggcccccatggggccctcccttttttcccgggggcccccggcccccccctttggcccccctttttttttggggttttttttaaacgccccttttccaaagcccggggggttccctttttgctttgggcccccccttttgttttttaagctttttggggccccaaaaaaagggggggggggttcccccccctttttta

SEQ ID NO: 557634 - DNA, 152 bp, Homo sapiens
actctttaggatccccactatcgctaagaaaccctatctctactaaaaatacaaaattacggccagttgcagtggctcatacctgtaatcccagttactcaggagtctgacctgggaggtaatagttgcattgaaccagtcagcattaacca

SEQ ID NO: 557635 - DNA, 292 bp, Homo sapiens
caagtcatttgagtgtaggcaatacagcagcaagactattctttcacctagtcgtgttaacacatcaggctcagtctcacctccagagagaaccaatcatgacattacctaaccagccacaggccggcaacttaatatgcatcgatatggtacaacgtctcgtactgtagtacaatgtataaatctttctacagctggtcattaaagccagcagaggacgtcaccgttgccactctatcgtcgacagggtagatctgactgcctcccatctgctggcctcgtatgaactatg

SEQ ID NO: 557636 - DNA, 255 bp, Homo sapiens
gacggcttcaacggaacttaaatagtgtaggaagctgaataattaatgaaggagaggggtcagggttgattcgggaggatcctattagtgcggggcgtttgtattgatatatgggcgttgattagctagtagttactgggttgaacattgtttggttggtgtatatattggcaatgtgagattgctcgggaggaattaggttatgtagattagggagtagggttacggatgacgtgagaacgaagaaacgagagg

SEQ ID NO: 557637 - DNA, 162 bp, Homo sapiens
tgtatcccccaggcgccagcttggcttgggagaattccacaccaccacgatcttgttcaggtcagggagtgccactcagcctctctaaagagattcataagcacttcctcccgctcataagtcatcatcaccaccgtgaactgctctcggggaacattgcct

SEQ ID NO: 557638 - DNA, 488 bp, Homo sapiens
cagttacctttgccatcatctgttcccttccagtaaaggtgtggtgtggatggaacagtatagattcagacccattgctagggaccccagctcactgcatatgtgtccagtgcattaagaggttttgtctagggcaaataagtgataatacatcatctaatggaatattctgcaaattctaaaaagaatggatcaatttgaattgatatggaaagatgtctgagatacaataagtcaaaaaagcaagtgatagaacaatgtacagtgtcaaatagacaaatcatacacatgtgctgtgtattcacagaaacaggggctacctgtagagagtggagaaggaaatttgtttttaatgtactgtttaataaaaaaaaacataaacatgtatttgttcaatatttaaaaagttttgaaatgtttatcctctttgaaactccttttatgatgttatcctggagaaataaagatataataactaaaaaaaaaaa

SEQ ID NO: 557639 - DNA, 607 bp, Homo sapiens
tatgcagcttgagggccataagtatgctttgagataatatatgtgaagatctaaatagaatgtagggaatgaaatagtactcattcagtgtacagtttaatttttttctagtatgaagcattttacctgagttgtatgcaaaatgaatgttttatgccaatgttaatactgatgactgcaggaattaagtattgatattttatgtataatttatttgttttattagtctcaagaatataacagcagtttttcataaacattctattggctatgtgtgtcatatctagatttaataatcatattcttttcaataaagtttatcagtttgtaggaaacgatgggtagtattgtgggtaagactgtggaacaaaatgcttgcacctttatccccccttgaatgctttgcggatttttccttggtttaagattttttttactcatactggaaaaatactgttactttagatagaagtagattgctattcaaaattacatgtgtttcttttgaaaactttccttttctcaacattcgtttttacaaacttgtagtaacttatattacaactgaatgtgaaataaaatttactgttgtagttatttcagaaaa

SEQ ID NO: 557640 - DNA, 126 bp, Homo sapiens
gatctagaggatccacatgatgctcacgctctcaacagatcaacgcccccagctcccgctcacattggccagcagcccccccaactgctctagtcggccccgggcagcaggcagccagtgggagcg

SEQ ID NO: 557641 - DNA, 203 bp, Homo sapiens
ggtttttggccggtaggttaatccaagccaaaaaatccttttccattttacttaagtggcttgccacggtcccggcccaatccgccttttaactggaattcgggttcttaaccaaccccaaccttggcttttctggtggcccccagtggcccaaccatccgtttgtaagtatttttggcaacttccccttctgtcgtcttctc

SEQ ID NO: 557642 - DNA, 678 bp, Homo sapiens
ggaagcctcagaatcatggtgttaggtgaaaggtacttcttacatggtggcaggaaaagtaaatgaggaagatgcaaaagtggaaacccctgataaaaccatcagatctcgtgagacttattcactaccacgagaacagtatgggggaaactgcccccatgattcaaattatttcccactaggtccctcccacaacacgtgggaattatgggagcacaattctgagatttgggtggggacacagagccaaaccatatcagtactcaatatttagctcccacttataagtgagaacatatgggatttgctattctgttcctgtgttggtttacttaggataatgtcctccacctccaccaatgttgctgcaaaggacatgacctcattcctttttatggctgcatagtatttcatggtgtgtatgtaccacattttctttatccagtctactgttgatggtcatctgggttgattccatgtctttgctgttgtaaatagggctgtgatgaacatttaggtgcatgtgtctctataatagaccgattttatctttttcttgcctttttgcatgcctagtaactcttatattgaaagtgtggagaataaagatggcggtaaatacattttaatgcctggtgggcacattctttccttctggtagttcttctggtctctgcc

SEQ ID NO: 557643 - DNA, 752 bp, Homo sapiens
ccccccatgtactatgaacagtggtaaagcacggtacggtcgatcgggatatcgcaccagcgtcgaatagtatgcaccaattagcaaggcatctaaagagtatacctgtattgcaaatagaatagttcactaaactactgaaagaagttccgagtagcagtgtagggcagtctcttggattgaatccctaaattcataactacatttttctggttccagaataaaattatgtgtggtattaacttagatggtctagtgttcaccttgaaatttattttctttctgttggccaaactaacgtggataattacatccagagaaaaagtttgtctaaaagttactactggtgtctaatgcaaattggacttccatagaagtttttagctatgttatttacaatgcaggattttacagataaatagatgctgattcatgcagatgtagtactaagtctgagatattgaaatactgactactttgatgaaactgctggtttaaaaatatttactgatatgcaaatgtcatgcaaaactccactttacaatcttatatatctataataatcgatacctataacaattagtgttctataatgatatgcaattaccatttgcattcttaactgtttggtattaaaagtttgcaaacaaaaatacattgcatgagccatttatgatataagccaagtactgaaaatattcatgcatgatgtactgtgtgcagactattaggtatgcataatgatatattgg

SEQ ID NO: 557644 - DNA, 277 bp, Homo sapiens
tgtaaatattacagtaggctaacgtacctatcaggtgttatctatgttagcacataggtatatctctatatttcttatcatattagaagaactctttactatttcttgtaagatggttctgataggtatgtggatatctagtcagtatattgttactctgagaaagatttatctctgcttcatattttaagaatggctttgctggatacagtatgcttagatagcagttgttttctttcagcactttgaacatagttgttctaacatccatatccct

SEQ ID NO: 557645 - DNA, 343 bp, Homo sapiens
  misc_feature (16)..(16): n is a, c, g, or t
  misc_feature (195)..(195): n is a, c, g, or t
  misc_feature (201)..(201): n is a, c, g, or t
  misc_feature (249)..(249): n is a, c, g, or t
  misc_feature (308)..(308): n is a, c, g, or t
  misc_feature (332)..(332): n is a, c, g, or t
gagcaagaatcctggngcacagtggcacaatcatggcttactgcagcctcgacctcctgagctcaagcagtccttccacctcagcttcccaagtagctgtaacgatagccatgagccaccacatccggttaatttgtgttttttgtagagacagggttttgccatgttgcccaggctggactcgaactcctgggntcaagncatccacctccctagggctcccaaagtgctgggatcacaggcatgagncaccacaacagggctctatgtccttttgacattcatcaaaaaagcagtttttaaggcanggcgcggtagaattgcctgcaatnccagcaatttt

SEQ ID NO: 557646 - DNA, 825 bp, Homo sapiens
cgtgacgtacccgtgaagcacgtgtacagagtcctgcagtgtcaggaagaagagctcacgcagatggtgtccacgatgtccgacggctggaaattcgaacagctcatcagcatcggatcttcctataactacggcaatgaggatcaggcagaattcctctgtgttgtctccagagaactaaataattctaccaatggcatcgtcatagagccgagcgaaaaggcgaagattcttcaggagagaggatcgcggatgtaaactaagaccccgaaaactccagaccttcaggagagcagtcagcagagcccctctgtgaagtgaaacctcactcctgtccagtgaccgagccactgcaaagcacagctgatcctggccccctgtgaagaagtgttctggtcaaaactaaaggaactccctccccacctgcaggactccgaagacagtgcgacttctggctgcagaataccttttcagaaacctgctttcatttgcttagccagtattagaacagatctttacaacagcagctgggctgggttcccagtcggagcctttcggggatctgggggatgagggcggaaggcctagctccttggaaatggcctgtactttaaggacgctgggagcagggagccacgggatgctgagagaggaggcccgagaggacaccccaccctccagcgtggcctttgatccagacttagggacgaggctgtcactggtgggcaccctctgttcctgtttgtgtgtttgaatagtctgaaatgctgtgactttttttgtgtgaataaagatatgaaacttctgaatctcaaaaaaaaaaaa

SEQ ID NO: 557647 - DNA, 102 bp, Homo sapiens
atcactctagagatccctcccccagagcggctgctggacggctgcacgcatcttacagagagacacccatccctggctgggagtgcccgactgggtcggacg

SEQ ID NO: 557648 - DNA, 968 bp, Homo sapiens
cgtgacgtacccgtgaagcacgtgtacagagtcctgcagtgtcaggaagaagagctcacgcagatggtgtccacgatgtccgacggctggaaattcgaacagctcatcagcatcggatcttcctataactacggcaatgaggatcaggcagaattcctctgtgttgtctccagagaactaaataattctaccaatggcatcgtcatagagccgagcgaaaaggcgaagattcttcaggagagaggatcgcggatgtaaactaagaccccgaaaactccagaccttcaggagagcagtcagcagagcccctctgtgaagtgaaacctcactcctgtccagtgaccgagccactgcaaagcacagctgatcctggccccctgtgaagaagtgttctggtcaaaactaaaggaactccctccccacctgcaggactccgaagacagtgcgacttctggctgcagaataccttttcagaaacctgctttcatttgcttagccagtattagaacagatctttacaacagcagctgggctgggttcccagtcggagcctttcggggatctgggggatgagggcggaaggcctagctccttggaaatggcctgtactttaaggacgctggagccaagaggattgttcccgtgccgtgccatggtttcaccctatgtgtgccacaatggacgttagcagctgcttcggaacaccgtccctcctatgcaccctccaagacgtgcagcagatgcaaagggttctagctgcagtttgtcgaattgaggttttaggtaaagcatagagttgccagagtaccccccccaccctccagcgtggcctttgatccagacttagggacgaggctgtcactggtgggcaccctctgttcctgtttgtgtgtttgaatagtctgaaatgctgtgactttttttgtgtgaataaagatatgaaacttctgaatctcaaaaaaaaaaaa

SEQ ID NO: 557649 - DNA, 112 bp, Homo sapiens
attccatatttcacattcatagggtcctgcagtatactttgtagacaccaaatagaaagagggtcctgttaggtttcacgacagctagcatactatagagtacatagggacg

SEQ ID NO: 557650 - DNA, 822 bp, Homo sapiens
cgtgacgtacccgtgaagcacgtgtacagagtcctgcagtgtcaggaagaagagctcacgcagatggtgtccacgatgtccgacggctggaaattcgaacagctcatcagcatcggatcttcctataactacggcaatgaggatcaggcagaattcctctgtgttgtctccagagaactaaataattctaccaatggcatcgtcatagagccgagcgaaaaggcgaagattcttcaggagagaggatcgcggatgtaaactaagaccccgaaaactccagaccttcaggagagcagtcagcagagcccctctgtgaagtgaaacctcactcctgtccagtgaccgagccactgcaaagcacagctgatcctggccccctgtgaagaagtgttctggtcaaaactaaaggaactccctccccacctgcaggactccgaagacagtgcgacttctggctgcagaataccttttcagaaacctgctttcatttgcttagccagtattagaacagatctttacaacagcagctgggctgggttcccagtcggagcctttcggggatctgggggatgagggcggaaggcctagctccttggaaatggcctgtactttaaggacgctggagccaagaggattgttcccgtgccgtgccatggtttcaccctatgtgtgccacaatggacgttagcagctgcttcggaacaccgtccctcctatgcaccctccaagacgtgcagcagatgcagttcctacagctcccacttgtctgactcagtgcaggatccgcctgtctcaaacctcttcttggaggaaaaggtagca

SEQ ID NO: 557651 - DNA, 1276 bp, Homo sapiens
caaacaacatccggtcagctgctgcagcaagcttccctcctgagcagacttcacaagctcaggagcgccgttctggtctgggccctatcgctgtccacacccgactcacctttgactgtcaagcaaatcccctgcattcatggactaatgctgactggcatgcatgccgagagcgcgtgtttgctccatgaacgcatactggtgcatgacctaggcgtcatcaggacgcgagcttgctgtggcctacagttcgctgcagctctgtgcatcgtccccgacattcatccccataggtacgtggccgtccatcgatccgatagattctccttgacccatgcgtacgcttgcaggatggctgccttattgccctcctgatatgagtagtagcatggtcgttacttacgtagcgtagctcaacaaggctcatcttcctggcccaagcactctaagacaagcttcctctgtggatttcatagactgatttccctcgcaatttggactattcgaagaaagagtcatgattgtaacccgcgaacattttactggtgatcgcgtatcccaccattccgatggttcgtggcgaattctcaatacccattcccgaggggagcagctataataacgtcagtgtaccaatttactcgtgtacttgtcgaggaaccgctgtgactacccgagaagaacgctccatatgcatcgagttcttcgctcacgagagcacatcggacttccagttctcccaatagcccgattttggctccaacgtgactgcaacgatgctatgtccagttcgagcttcgagcccttatggtagcttgcttcatcgcgtagagcaatggttaccagaaccgcgcctatcggtcgccacgcgggcggcactccctgtgcaacggcgcctttggtatcgttcactatttaccacaagcgaaactcttgggattgtttcccattcatcaatcgttgttggagcccccctattgtatcctgttgttttccgtgacacaggggaatagttatcccttccctagaagatacccccccccgttttgtcgccgagcctaacaccagcaggtgacgtacgatccgccagtgttacgcctaacttgaaagtccacacacgtaagctatgtggaaaccagatttgcatgacagggaatctatccagactttatcggacaagggggcataacccaacaagctgtggcaccgattgggcatgggctcgcgttacatactatggggctcgtgaatggcagacgcaaatatgcgacatccc

SEQ ID NO: 557652 - DNA, 1598 bp, Homo sapiens
  misc_feature (14)..(14): n is a, c, g, or t
  misc_feature (23)..(23): n is a, c, g, or t
  misc_feature (595)..(595): n is a, c, g, or t
ccacacgggcgggntcacactangcgctgtatagtgggacccaccgtacttttagcggcacgcccctaaatattttttgtagcgtgggtcgtccccacagctcttgattatagagtgcagcacaacgatggtgttggttgtgttcacacaagccgagagaataaacgcaaacggacgccgttgggtggttgtcagcccccggaggtctgtcccgctcgcggggataagtattctccccccccccggggggtggatatataatttcctcgtggtcctctgcgaaactcgcctccactactacggcgcgtcgttttctgcacggcctcccacatacaacaggcctgtgcgtgctccctcgacgacaagatttgataggggtttctttctacccacagaaagtagaaccggtcgttttatcctttgtgtctctccgcccccttggattcctctcagtgataggaagaaggagagccccttataaattgcccgcaccccgcgctggttttgaacacatagggaagtttcacaccccgtccccccctctccaatgaaaattgacaactgtgtgtgtgccccccgtctgaaattgtctggngccttgtttccccttcaaggtttcccccttcgtttattaggcccccctgcctgttgttgtcgctcagagaaccacacgtgtcaccgcccagactccacagaatcctgtataagctcgataatgaatcgtcagaacccacattgtctctcaaagaaaccgcgctcttcaacgggaaatattatgtataaacccccgccttttctgggaaaacttatattccccttgtgccccggcgcccacttatcacatctcccctaatgttcccctcccacatttcgcgcccacttctcgccaactttctccctaatacgcacacttcccgcgtgtgtacaacaacttattacccacgcaaccgcagagggggtcacacaccggagtttcccccttcgcgccctcgtatggccacgttcacaaagatgcacacatgtggggggcccaccacccaaacatgggtgataccttgagagacctcttatctcgagtgtatcacaccccgcagtctatctcgcgctcggagactatatatattttttcacaactctcctcacacacatatactttcccccccactctatatttcctcatgagacaccacgcgccgacacctctgcgaactctcctctgagacgcttgacacacaattcgagagtatatatactctcccgagatttagaagccccccactttgtaatataataattaacactcacccaagaacgcttcttgcacacttactgaagcttgtccccaccacattaaggcttatataaaccacagagatgcacaatttcccggagacgtttataacacacacaccacctttcacccgctaaaccgagccgcggggtaataactacggtcacatgcttctgaaaattctgtggaggcacaaccaccacgtttcaatgcccactcgtcctagagaattaaattccccttaaaaatctttgaaatagggcccgtatttaccctatagcaccccctttaccccctttagagccca

SEQ ID NO: 557653 - DNA, 152 bp, Homo sapiens
gttggggtcttcttgtgcgagatgggtgctgctgaatggaatcctcaaaagacattaagaatatgtggactacacgctacctatcttctttttgccatatgagggtatagattaattaaaaattgataattagtcaaacttctgctcagatt

SEQ ID NO: 557654 - DNA, 666 bp, Homo sapiens
  misc_feature (471)..(471): n is a, c, g, or t
cgtgcctgttacctctcatcattgcgttaacggggaagcacagcgattgctggacgcactctgtgagatattttcgcctgtgcgtgttggatcccatgcatggggtccctgaagttatttcggttgggtacgtggactcgcaccctatcaccacatatgacagtgtcactcggcagaaggagccacgggccccatggatggcagagaacctcgcgcctgatcactgggagaggtacactcagctgctgaggggctggcagcacatgttcaaagtggaactgaagcgcctacagaggcactacaatcacttagggtctcacacttaccagagaatgattggctgtgagctgctggaggatggaagcaccacaggatttctgcagtatgcatatgacgggcaggattttctgatcttaataaagacaccctcttctggctggatgtcataatgtggctcacaccatccagcangcatgggagggcaatccacatgaggtgcttgatgaaaaagatatgctggcagaacaatgtattgcctggactaagagaattctagagtatcgggaccctaccatagacatgtaagaggaggaaggcctattccacattggctgaacaacctggtttattaccgacactttgtgatttggatttccccgtgttccc

SEQ ID NO: 557655 - DNA, 530 bp, Homo sapiens
tcgtgcagctttctcctgattctcttgagatgcacttgaccacagtcctgacaaggtagtgttagctaagggccatcttccttctttctcttcccttgtgggaggaagtggacatggctggggccgtaggcctgagttttgagttacatctctttttctgtttagtctcttataaaagggctaacaaagatgaaggtacaggcaaatagataggtatagggccagggtactacacatgcatgatggattattcttagttaactggctgaaatgtacacttgacttttcaacaacccctgcacagttgaccctttacacagtcaaaaatccaagtagaacatttgacttcccaaaaacataactactattatgattaaccactaatagcatactgttgactgaaagtcttactgataacataaacagtcagttaacacatactttgcatattatgtgtattttatactgtgttcttacaataaaataagccagaggaaaggaaatgttattaacacaactataaaaaaaaa

SEQ ID NO: 557656 - DNA, 150 bp, Homo sapiens
tgtgctccttcgatattgctgccataaaggggtttggggaactcgattgtaatagtcccaggttctaaattaactagatgtgtacagaaatgaacgtgtaatgtaatgtttctacatgtgtctttgcaacacaaatgtcactttctgtct

SEQ ID NO: 557657 - DNA, 174 bp, Homo sapiens
tgatcccgcctccacacgtacggtgatgccgccctcgcgagtaatttgatagcgttgctaagcaggttcataagaacctggcgaagtttgccctcatcggcatagatgtactgcggagtgtcaggtgcaatatcaatgatgagtttcagccccttgtcattggcgcgcatctgg

SEQ ID NO: 557658 - DNA, 175 bp, Homo sapiens
gggaggctctgcacccctgcatgcagtgcccttcctagagtctatgagtctctgattctgtttctcagtagtcctttcagaggcttgctatactttgtctgcttcaaggaggtcgaccttctaatgcatgaagaatgggatgcatttgatctcaagaccaaagacagatgtcagt

SEQ ID NO: 557659 - DNA, 279 bp, Homo sapiens
tcgataagggccaatgttacgcacctgttctgatgacgtcgatggtcgctgtagttcagcttcagtcatggacttacaagtagcgcagctgttggccgagagggcgtcgaatgagacctcaaagttcatggaactggtgggtcagaggcccagttcttcttgtcgaaggtaggcagaagctcaatctctgtgctgatctgcgattccttcatgcctgccatgcgcttgatcttccacacgagggcattctcgctggccttgtacttggccttatcgagg

SEQ ID NO: 557660 - DNA, 1161 bp, Homo sapiens
gactcaagtggaccctacaatgaagcctacacatcccaatagaagccccattcattatgctgagggaagcagccctcagaacatgatagctatgtatccagcaagagtggcactgtgctaggcacacaccgtccacagaagccaccctggaacctgtgatgcctgcaacctcagcaagcgtgcagatcccagagggaggacagacataccattctgggatggtcctaagcatggaatacctaactacctgattccgtactcctattacttgacttaggctacagccagatatacccaaatctaggtaagaatgtcacatgcaccatgtgactcctgcctagggcaatcaatatacagagctatgatctgacctactgaagtacaggctacacatctagctatacttggactgtgctgacaacttgatagtatctatgagaagtacgttcaatcccatgcaacatccaagctacatactcaccctaagtagatcactgatggagcataagagtacagactgcactgatattagataatcattaagcaattgctagttatcattctaaaccagataatggcacagcaggacatacttgcatgaaccaacgtataaagacatatgatatgtaaacgacactctaggtcaatcacatggcatgagcaagggacgactgacgaccaacacaacaggagtacacatgcagtataaaaagcaaaaacaaaacaggaaaaaactggaaaccagagcagcaaacgacgaccaacaaaaacacacgtaacgcgaagaacctggataacaccaaacaaacaacaaaacaccgaaatacccagacaaagacagcgcgcaccaccacagcgagaccacagaggaaacacacacaaaacaacacgaccatcacaaacacaacccaccaaaggcgcacacctagaccacaaagaccaaacagagacaaacttgagggatagcaaagcaatatagaagaaaaatgcggcacaagagaagacaccaatcgcgaagcgaaagagcaacatgaaaaaacgaatagaagacagcaagggaaagcagataaaaacaacacgaggacaccgacgtgacagaggagaagaggagaaaaagagaacagggccaagagaaggctacacacctagtacgcgaacaaa

SEQ ID NO: 557661 - DNA, 109 bp, Homo sapiens
cgttttttttcccccccctaaaaaagccaagcatttaggcccaagttttggaaaatttttgttttaaaaagcaaaaaaaattccccaactgcggctttttaaaaaccca

SEQ ID NO: 557662 - DNA, 460 bp, Homo sapiens
  misc_feature (4)..(6): n is a, c, g, or t
  misc_feature (15)..(15): n is a, c, g, or t
  misc_feature (39)..(39): n is a, c, g, or t
  misc_feature (414)..(414): n is a, c, g, or t
  misc_feature (459)..(459): n is a, c, g, or t
tttnnntactctttnattgacatccacttcttttttatnggaatgcccctgaagagagggcaggaacatctaaaggtggcagaagggccggcatccaggctctgcagggcagtcacaggcctcccagcaggtagatccctaccaacaagcaaattctcaataaacaaataactgtttgttttagtttaattataatttgaaatgtcatgcagtttgtttcatccacaaggaacttaatatttttcattaaaaattaatcaagggcttctacaagtcatgttgtggtaactaatatgagacttgtcctcccatgaaaacaactggaaaatggacaatatttataaagtatctattttcagacactagatacaagtgccccagggagaggagaaacaaagccatgtgccccacatnagcccaggtaaagagatttaccactttagacagcagaagccaggna

SEQ ID NO: 557663 - DNA, 453 bp, Homo sapiens
tcggcaaaggggaaacaggaagagaaatagaactggaagtaaagcattgaagatgtgactgaattgctgcaatctcatgatcaaatttgaatggatgaggagttgctttttagggatgagcaaagaaagtggtttctcgagatggaatctactggtgaagttgctgtgaacattgttaaaatgccaataaaggatttaggaattacagaaacctggttgataaagcagtgcagggtgtgagagagttgacttcaattttgaaataagttccactggctgggtgtggtggctcacacctgcaatcccagtactttaggaggccgagactggtagatcatttgaggtcaggagttcaagaccagccttgccaacatggtgaaccccacctctaccaaattagccaggtgtggtgcacacctgtagtcccagctacttgggaagctgaggcaggag

SEQ ID NO: 557664 - DNA, 306 bp, Homo sapiens
tagcagaacttgagtccatattgtccactgttcaagaagtctggaaacttgaagagccaaataaaaataagttatcctagcatttgtagctatcctgaaaatacctaataacaaacaaaaaaaacttacaaatcaggaagaaatcaaagaatttgataaccctaactgctggcagggatatgaaaaaacagaaattgctggcaatatcctataaatatcttataaagtgaaaagtatttatatcctaggacccagcaatttgacagccagctatatgacctgaagaaactatggcatgttgcttca

SEQ ID NO: 557665 - DNA, 147 bp, Homo sapiens
tattagccactgttactggaattggtttatcagttcaaatagtcttcaggtggagtatttatgatctccaactagtcgttcatattatctgcgaagacataggataattcggttgctgcgtatctacaactgtctgtgcccgatttc

SEQ ID NO: 557666 - DNA, 344 bp, Homo sapiens
  misc_feature (2)..(2): n is a, c, g, or t
  misc_feature (223)..(223): n is a, c, g, or t
tntctttctttttgaacacccaaaagacaggcgataggctatatataatattagactctcaggataaagaacaaagtcagttaatgtaatcccagcactttgggaggcagaggtgggcagatcacaacaaggtcaggagttcgagaccaacctgaccaacatggtgaaatcccgtctctactaaaaatagaaaaattagctgggcatggtggcgcatgctgtnaatcccagctactctggtggctgaggcaggagaatcgcttgaccccgggaggcagaggttgcatgagccgagatcgcgccactgcactccagcctgggcaacggagtgaggactccatctc

SEQ ID NO: 557667 - DNA, 1024 bp, Homo sapiens
agccgagtgagaccagttggataatgtcaagggcgatagtatccaagaaaacggaatggcatccctctctgtaccatgtcacgcaggttgagtcattttagacctgtgacaacaccgagctcgcgcataaggatggcgcttcgataaccctgtttctgacattaggaacccatcttgaagaaaagaagtcacaccttggcaaccgtggtgctgcgcgtctctatgatggttggtgaattgcaagatgcttcaggtgaaagacctctgtagcattggtagagagcatctaagtctcgcatgtggttgcgcaccgtccgaaagtgcatcagccattcgaggatatcgttcagaaggctgaagatccagtcgatcaatggtactgcgccatcctcgtcgcattgatcaaaacaaggtaggtttgagtacgtctatagcatggtggagtacaacgctgggacaaatggagacctctaccactagtgcatggaaattatgagatagtaccagcaacatgagttccgatcgccctgtcactcttgggtagtcgtaccggatcctggagatgagtaggaatattggctaggagtcatctacgatgcaaggaacccgtgaatcttgggtcataggaggccaatcaacttctacgtaacgttcgtgaagcacagagatggagcacctagtttgaagcaaaatgatcaaggtgggccaagaaaatcctaaacgaaattaagcgcataggggctatccacggtccattggcaggacgatgtcaccgcagagatttggttcttcgtccggactatgtgtgtactaggcagtctgggggaaaagcattggggaatcgcgagaacacttggggtccttggtaactccttggaattttccctaagtaactcgaatatctagccaattggccgggaaaccccctgggataaactgaccttggtttgcactttactggttgcggtgcttacccaagatgtggggtcgcttgacataatgcccgttacctgagttcttaaag

SEQ ID NO: 557668 - DNA, 240 bp, Homo sapiens
ccatgggattgatgtctcaggttagttaacggataacacgtgtccacatcaaattaatcgatctcttaaacagtctcgtgcaggaccgtactttacctgacaacgacagtatgagaaaagtattcaggtaacactttagaaaccagttagcccataaatctgattagaagtataaggtgctctgaagtgtcctaaatattaatatcctgtaataaagctctttaaaatgaaaaaaaaaaa

SEQ ID NO: 557669 - DNA, 346 bp, Homo sapiens
ccttatatgctgttagatttctgaataatgcatgtaggtctgctccaggtagtgatgcctgactattcgttctagttcactctcgttaaagctatttcctcactgtgtcgggcatcagtggtggtcttggcagccacgttaaggttacttatcacatgctacccttatatactaagatcatgcaactggctggtctctcactgaagtatgaggttgaccttcataggtgctctgtactgctcacgggggtttgggttgctccagactacaccttctgaccagacttcccagtggtttggagcccatttccacgggtaaactgcttgatccacagtctaccagcctg

SEQ ID NO: 557670 - DNA, 466 bp, Homo sapiens
ataggctagatacagaatctgggttcaaataattttcctcacaatactgaaagcttgttttgctgtcttttaacatctaagtattttgaaaatgaaattctgatgttagtgttgtcattctatggtagtgacccacttttccttcttagtagctattataatcttatatgggccattttcattcatcctacttcgtaatttgtggactcttttgacatgaacatttttctctctcagctttacaacactttccctcctccatcttctctgttgtttctggaattcctcttaataggctattggatttcatgggctgatcctctatgttgcttatcttttctcctccctgtttttctatctttttactgtaattctgagaaagaggtggttaggagataaaactgtgttattagaaaacaaactgaaggcggccgagcatggtggctcatgcctgaaggagaaatct

SEQ ID NO: 557671 - DNA, 381 bp, Homo sapiens
cagtcgttgtgctattgtatgagacgtggtcttgtactgctgccaggttgtagtgcatgtggctgatcacagctcacttgccacctccaccttccaggttcaagctatactccagcctcagccttccaagtagctgggaataacagtgtgtaagccaccacacgcggctatttttgtgtatttttagtagagaccaggtttcaccatgtcgcccaggctggtcttgacctcctgagctcaggtgatggtgagccacctgcctcagcctcccaatgtgctgggatcccaggaatgagccaccgcgcccggccatatggtcggaacatttatgctcctaatgcaccctgaaatgggtctgaacactaagcacacgggataccg

SEQ ID NO: 557672 - DNA, 891 bp, Homo sapiens
tccttttggggattcgccccccgcgccgctgctgattgggagctggttaccggtgcactttcgtgggcacggtaatccacggaacttgggtcacacccggagttatcagcgtgtgatggtccccactgaaccatttacgtctcttgtatgaacggcgcaaatctaggggcgccgcctagtttctcgccccaagtatgtgaccgtatagcgtgccgttccccccgacaatatgccgcgttgtgaacggtgcccccctggttatgtcttttattaggataagggggggaccccaactctgtgatgtctaaagagagtttgtacagcgtcaaataggaaatgtttcccgtcaagattcggctccccctcgggtaccgcgaaaattcctgtggaaccgagttcgcacagaatttcgtcgaccccgaaatctcgattttagcaggtctcgcgggaaattagttttgagaggtagcactctccatgaggtatcttttcctagcattcgtaataaaagggtgtgagcccgcacactccaccgttcccaatggagggatttatacacgagcgctcgccacttccttctgccagtgccaggctagtaaaaatgtgggccaaacgctctattacaacgtccccacctttattcagcacttgcccaatagcgtgtcgagcgcttatttcccacccagtgtccagcagagtaaaatatccggcgtattcagcgacaacgtttgccccaaatcccgggatgtgcggggggagtctctccccataccttttctgcaaggctcccgaacattgccctttaatagttcgcccctacccgcaattatgattttattatggggttgcaaagaaactcaaataggaaggggtcaactccacccaacaagc

SEQ ID NO: 557673 - DNA, 827 bp, Homo sapiens
atccttattatgattagctattgttcctttacgtagctacgaacatgtatgttgacgtgtgcggaatgtagtaagaaaagttttctgtaatattggtatattatatttaacgaacatatttggaacctggcgttaaaatggtaggagtaaaacagatgatcagctttataaaaccatccttccaagcgtggaacatataattttggacctcgagaagtgcaaaatccagtcctagaggtctttgcttagtattccttcaatcaactttctagtaaaaatatcctatattaccataattctcaaaaccagttatacaatcattgtgtaggatatctataaagtactaatcttattgtggatttgacgaatttttacatgttttttttcttttttagtttgtacttctaagaagttgtattacatgtacagattcgtgtaaccactgcaaccacattaaactaatgaacacaaagtccctcatgctaccttttaatgcttacactccatccaaacctaactctgccaaccacttttctcctatcagtataatttcatcattgttcatgaatatgataaaaataaaattgtttgtgtgtaaatggttatcgtatagattttatataaataagttatatgaatttttattgatagagagtatgtgaagcttttggcactttttgtcactcagcaaattactcctaaggtgtatatgaggttgatgaatagttgtatttagtatttttcttttaccaccagaccatcctaaccagatgaaagttgtttatatcttgagagtactatacatatctgactggtaagtagtgtat

SEQ ID NO: 557674 - DNA, 1452 bp, Homo sapiens
gacaccgagagagcttgctcgactgcgtaggattgtcgtcgcgctccggcgcctagaatctcgcttaagaaggcaggaggcttgggacacgtggctgcaatgcgcctgatgcgcatcaagatatggacccttaggaagtagaagggcgctttgggtagcgagagagcgaggctcacgcgcacacatcaggacgagcgtcacgctcggcttttgttgacaatgtgacgccatgatattactcaggggctgtggatgctggtcatgaggattccgagttcctcctactataggctggcctgatacacgctgcgcgtctcgtgcacgagttactccaggtatcctatccgcgacgggggccgtgtcagactcggactcacagatggtatagggtcaaggtcctggcgtttctcgacctgtgtcctcgacaatcgtagcatgagcccgacgatcaacatatatagccaaaagcaaggaatcgcaaagcacaggatgaatgttaggggcctcaggcggtactgtaactataggacagtgcttgtggtgggctaagatgggcgcggaactgtctgcctaaatcggagaagacaggaaccccagcacttggatgccttttcggacgcactagagtcgttgtacaggaactcggttggaggctgaccatatgagcttggagtgaacctcatggtaagagtcgtacgagcccttgcgcgtgggtgttgcgagtttgtccaccgacgtactcggtgggaatgcgccaattccgacagtcgtgtgttgagctccttttcttttatggccgttgctcgcgttggttcgctcagcgaaagacacgtgggagacgggtcccacggtttatctttgacacgtatagtccatacggggggagatacgggggcaactgaacattgggggaaccaggttcgttaaggttccccactaaggggaaggaagcactccattggaaatccaaccgttgttacggcccgttttcgtacaacaaggtgttggaaagctccgggcataggaactcaaagcggcgggctttttgcgcgttaacagccttggggtgggggaacgacttaatgcagggaatccgaattttagcgaacttgtaactcgggagttaccggaattgcagcaaattccccggccccggttcacaccttgagagggacagctttgagctagacactcggctcccggttgaggggattccccgttaaacggtttcatttagatggtggcctttccggttaagttctgccccgataggcgcgtcaggcaaacagagggggcaaagaagtggccgttagcaacggaaaccctttttgtccccacctttaagaagcgatgtggggggtattaaacagtcgttacgcaccgtaggtattgaacaggttttatctcgggttcccatttacatataccatatagctgttcggagccaattag

SEQ ID NO: 557675 - DNA, 477 bp, Homo sapiens
cgtgctgacctcctgtaggccaaattatgggggttgtgctgctgggttccagagtacagggaggcagccagggttcttctgtctataaacttgggcttaatgcatgctgttcaagaggatttggtttgggtcctaaattaatccattgctatgcgggcttgggattgagataggttgaaagagaaactaaaaacctaaaaggtatattgacttcccacagaggaacccgtgtgacttaatcttttccccaacgcagggtgtcctttgtagtttgacatagccttatgttaattctcgatatacttagcaattttaagccagtgatttaaacaatggattgggatggaaaagctctgaaaagttaaatttgtggctgacacaaagaactcgaatatttaccaaaagtaatagaaatgtgtaaatgtgttttggtggtaaactgtccttcatttagaattagttgagaagctggtgtat

SEQ ID NO: 557676 - DNA, 292 bp, Homo sapiens
caagcgatcatgcgggatgtttctaatacttaagaaaacaagatgtttccagtcattttaaaagaatgcctaggttgaggagttccttttgtggtgtagcagaaatgaatctgactaggaatcatgaggttgcaggttccatccctggcctctctcagtgagttaacgatccggcattgctgtgagctgtggtgtaggttgcagacgtaggtcggatcctgcgttgctgtgtctgtggtgtaggctggtggctacagctcccattcgacccctagcctgccgcatgttcgct

SEQ ID NO: 557677 - DNA, 239 bp, Homo sapiens
aactgcgattgtgtgggagacatcatgtgtccccatggcattgaagagttgatttgaacgatgacgtccccattgtgggtgaaaagtcttatcctggataactcctggaccataccattccgctactggcatttgtccaaacatatcaagcagtcctccaagttgggtcctatccattttcatcctgggtggcattaacggtccctccagaaagaagttcacttcttcattccttaagc

SEQ ID NO: 557678 - DNA, 341 bp, Homo sapiens
ctcatcgatttatatatttgctcttttaacaactaatttattgagtgtcttttatgtactatactctactagaacattgccctaaagaagcaacattctattgacagatacagataagtaccatgcagatacctacaagagggaggaaaaatggctacattatgggcattatgagatgctgtggtagcccatgggaagggtatctggtctgctcttggacagggcattatagaagcaaatgccttcaggtagcctaagaaagagtctgggcctcatgtgtagctcagtgtggctaagagggcagaatgtgaccttcagactactgagggggaagagtgggg

SEQ ID NO: 557679 - DNA, 112 bp, Homo sapiens
ctcactcacccaccacattaacaacataaaaccctcattcacacgagaaaacaccctcatgttcatacacctatccccctcgtgctgtccacctcctcttgccctcctctgt

SEQ ID NO: 557680 - DNA, 112 bp, Homo sapiens
acccttgcaatctacaaagagactgttcataactgctctataggaagaaaggttgaactctgtgagttgaatgcagagatcacaacgtgtgtttctgcgaatgattctttgt

SEQ ID NO: 557681 - DNA, 212 bp, Homo sapiens
cggcacgagggcagctaactgtaaaagatgccacattcagccatatccaattgccacctatgaagagagaaaagggggaaagacaccaactaattttctccttttctcttccaccccttctacccatctcttacataccctggattgagggggaaacagtaactgatttagactgcactctagcctgagtgacaaggtgagaccctgtctca

SEQ ID NO: 557682 - DNA, 639 bp, Homo sapiens
ctggggtcacctaagctggtggtgtgcgggatcatttcattgtttcggtcatgtggagaactggtgaagggaagcatgggagctggaccggccttcccagcccgtaccgtggtcatgtccaggctagaggctggaggggagaaacacggccccaccgcagcatgactgaggggcagaggcacaggtgggagggccagcggagatcagcgtggacaggagcgacgcactttgtagcactggctgtggctgtatgctgttgcgatttctgtgtgctcctgttgcacagatctgcttgtttcacactgatccgtatgtcacctgcggtgtgcacaacagtggctggagtgtggggcatttaggccatgctgtgctctaccttcaattgagtaaaatcgagtgagaggttccgggcagacaggatcgacgcccagtccagtccggcagagggaacacacgggtccttcattgtcctgtaagggtgttgaagatgctccctggcggcccaccaagcagacatagatgggaggaggcgccgcatcagcccctcacccctgccatcatctgaagagacggcgcctctgcagcaacgacagggcttcaggaggtgcccgctggcacacagctacgtcttccgtaaga

SEQ ID NO: 557683 - DNA, 1486 bp, Homo sapiens
ccctgttcatactcatcattgctggtcagcctgtccaaccacatgttccgtgtggcaatcatgcatctcaacagttgcatgcagcacactttgcacttgtgtcagcaggccagcatgcatgttgcagggccacacacattcagcacacacatccattccaacctgggccatttctgccaccaaaacgactgaacatgcatttccatatctcctctctcactgggcacacacagggcacagctccgccatttttccaaaggccccactatcggggcacacccctctcacgttctccagttacccgtcaccttcacaggctatctttcacaggatcgccacacccagggacaggggcagcaacaacacacgttttatcacccgctctctcgaagcaatcattcattcaaaggggcctcgccacgagtggcaaccccatggctccagcaagtggccttatctcgggcaagccaaagtccatccaaattgcgcccacaggggccttcccgaaggccaccctatattgcctcggggcaataggttggcgctcctctcattatgcgccacacaccttgtgccatccaggccacttctcgtcaactcggggcccgagcttagggccattcggcactggccacacacgcaatggcggcaccacagttcaactgttatattccgtcacaggctcaattatctcggcgaacccaccacgttccatccaccaattcaacagggggccattggggcacaggcctttccaagcagccccttcccgatcttgtggcgcctgacaaacccacgcaggtagaaaggacgagccttcaaacctaaatttggtacacaccgaacgcggtcccttcaacttcaacgcagtttttacacccatttacaatttggcgttctggactacaaacaccccacaactaggggacactgcatagcaccaaaccatacccacctccgggttggcccacccacaccatgattgccggtctgacaacacaggcgttcccccacacggtacatatcggtccttcgggcactcttactccttgctgtgcggcagcgcttccccaccaaacagtatatgctagcacaccacacagcggggacctccccaaaacaggctgtggccccacctacactttggggggcctccgggcccattacccgaacaagcaacttttagtccccgttgtcgcgatcacacactactccccaaccaggactatgctcctaacctactaagccaactgtatacccgccttacatccaccgcgcgctggggcagccagtgtatgctaccccgattaacaaccgcagcgcgctcatcgcgtattgcggccactctacatttctacaccactagtgccggtgcggcgcaatcagcgacaactgtccctagtgttcccccgacatcacctgagcgcccactccacctggctgctgtggacacacaccagtattcacgccgctaccgcaaacactt

SEQ ID NO: 557684 - DNA, 942 bp, Homo sapiens
  misc_feature (851)..(851): n is a, c, g, or t
accggggcgaccgtttgataagaagtaagactacacacatacagtgtatggagcgaggaccgacaccagatgggataaaggatctcgcacgccgtgacaacgcgaagggcgcgcaaaaggaagccgaagagatagaacaaatcgcaagcgaaaattcggcagtacaaacagggcgatcgcagcacaattgatattaatatagtacgcgggtgggtggtaatagtaggctaccgtaatatggagagatcatgcctaaaacagcacttacatagttaagactaacgttatctcacaagtttggcgacgcaaccaactttgattgaaggagcgtgtacgaagcgtaatggagcgcggaattgctgggcagggttttttcctatcggttaggtcgacgcaaaagggaaggatatcactggagtcactaggtccggtgttgggcaattctaattctatacatgagaaaacgatattttaggaattaaaggaaaataaaagcattctcatataaataaaacaagaatttgttgttactagacctagccttaatgaatggctaaaggaagctattcaaacacagaggaaatgatgacagaaacaatcttggagaatgagaaaggaagaaggaacaatggaaagatgaaaaatatgggtacataacatgagctatccattatcttgtgagttttataaatcataaattatgactagaacaaaacgtatagcagcatctgatattcaaagcagtgatatgtaaaagtggggatggtaaagggtctaatacaaaagtgaagtttccacacttcacttggaatagtaagatgctgacaccagtaaactgttataagtcacantatgtatatagtaaccacaacagaaaccagtataaaaaaaacagagagcggccgtcctttttttcaatgacaaacaaatcgaaacaaggaa

SEQ ID NO: 557685 - DNA, 276 bp, Homo sapiens
  misc_feature (7)..(7): n is a, c, g, or t
cttatgnttattcaggctgaggaaaagagcatattattcacttggaaaggaacaagtaagacatttaatttattggggtgtttcagtaatgtttttccaatagtatattggttttctttctagtttgatatggtttagtggatcctgaaccctgggattaagcagatttagctcttcatattggtgctgcacagtggcagctggctgggcaggcagtgacttggaaacaggaaagaaggcagagactggaaccaagtacctccagtttattctttt

SEQ ID NO: 557686 - DNA, 215 bp, Homo sapiens
aaaagccaaattccccatggtctgggctctgaaagttttgaaaaaaaatttggcccatttgaaaataaattcctcctttaggcccccaaaaataaacagccttggtaagattttcagatatctattgtgggtcttttaaaggttttgccccttttgttatgaggaattaaacatggatccccttccctatattaaaattgcccttttttttttta

SEQ ID NO: 557687 - DNA, 376 bp, Homo sapiens
  misc_feature (48)..(49): n is a, c, g, or t
  misc_feature (164)..(164): n is a, c, g, or t
catgagctggtaccctcacgctacatttggttttcacaaagctagccnnggcagtggggaccgggcaagctcccagaatcaagtcacccagttaagacaccagaaagggccacaactgccgtccctgggctccagggaggaaaccggccacaccaggcagagcngctcgcctcccaagacagggtccgggggaccgtcccgtggtgacacacacagttgtggccacaccgcccatgccctaatcaaacacaccaggctccctgcaccatcacccccaccccgggaggtgggtcccaacttgccgcctatttaaagggaggaaacagggaacggctgctgaccattccacagggctgtccctagcggtgagggcggc

SEQ ID NO: 557688 - DNA, 662 bp, Homo sapiens
cgccgagtcccctcgctagattccctccgtcgccgcaagatgatgtgcggggcgctctccgtccaggcaagccggtcgaccgccgagacctcagcacatcgcacgaccagggtgaggtcgcccaggcttgaatgaagaagagaaaacgacaggacagtgccctgtgtttaaggccgcggtcatttcagggagccaggtggtcgtcggtggaccaacatgtacttcactcaaggtgcacgctcggacgacgagcgagcttcgtacaccgtgcgagatgttccaatgcgtactccctgcatgagaaacgaagcgcctggaccttatctaatcgtaccagagccaataaagcgcaagcatgatgagctgacctatttctgatccgtgactttggacaagggccccttcagccagaatgacgtgacagcccgtcagtcctccgtctaccagagcgtgcacttgtgattcctccagtaagcttcagtctccgggctgtgccccttgcgtgtcggaacggcgcgcgggattctgcagctgcgttttgcattttctcttcctaacatttcatcggtgtctgcttacttgtcccttccccaagtacggtgcatctctacattacttttcacgaatatttttgcacaatcgaatataatttttcggaaatt

SEQ ID NO: 557689 - DNA, 1133 bp, Homo sapiens
gttgcagagatggtggagctagaataaaaaaacaaaaaaagcccttttcagtttggtgcactgtgtatggcccgtgtagaattgatgcagattttctgaaatgaaatgtttggtttacgacgagatcataccggtaaagcagggaatgacaaagcttgcttttctgggtattgttctaaggtgtattggtgactttaactggttatatttaattggccaatataaggtaaatatagattatatattgtcatagggtgtttcacaaaagcttagaacctttaacctttccagaccaccccaacaggtgctgtgaatatttcagaagtcagtcatgggttatacatgttgatagtcccaaagcacataagctagaagaagaaattatttctaggagcactaccattcgtgtttttcaacattgaaagtgccacacacattagaactccaacaacattcaatttctcatgtgccacagacgtgacgtgtagtaaatattcggtcacagaatctatggactgaatctaatgcttccaaaaatgtcggttcggtttggcaaatatcaaacattggtcaatgcaagaacattattaattacaaaatgaagattatatacccacttggggataaagctgtactagacctaaatctgtggaactgcattgagaccggtaagagcaagtactcataaggctatatgacttacaaaacaaacaaaaaaacacacaaacaaaaaaacacaaaacaaatagagaacacaagcaagacaggaagagaggaaacacgaacatggaggcgaacataacagaaaaggagaggaagcacacgaacgaacaaaagagagaagagagaaaagaagaaacgaaaacacaacgcagggaagaaaaacagcagagaaaaaaagaagagagaggcacaaccggcgcgagcgaccacaaaggggagacgcaagaagaccccacgccaggaaagaaacacgagaagaaacacgaacacaaacaaacagaggggaaagcacggaacaaaaagaatagaagaaagacagaagaacgcacagccagacgacggagacggcgcgagcaaagcgcgcgcacacgccgcgagcggccgcagacagacaccagaaaggacggcaa

SEQ ID NO: 557690 - DNA, 132 bp, Homo sapiens
gtcgaggctccagtgagccatgattacaccacctcattccaacatgggtgacagattggagaccctatctcagaagagaagaccaaaaaagtgttgagaagacaacttgacagattgagagaggtatttcgc

SEQ ID NO: 557691 - DNA, 137 bp, Homo sapiens
tacaatgtagtatcattgtgatgttgagcagttgtagtgcagcaggtcgcgtgatgtgagatgcagcagataaccggaaaatcacacctcttatgtcagcatttcgcaaggggtcatgtaaacagttgttcaagtat

SEQ ID NO: 557692 - DNA, 212 bp, Homo sapiens
acactggcgacacctcgacgaatctaactacaaacgctaatgtctgaccaaactgaccgacagaccctagatcaccacctatcagagcatatacaaggtacgactaggacaaatccgagtgcgcgttaaggtcgtgtacgtaaagcctactgacggtaaccgagaaccagtcgtctatctacttcaaatctcctgcaaggcagaaaagccta

SEQ ID NO: 557693 - DNA, 240 bp, Homo sapiens
ctttcttctccagtgccccccatggtgaatgtcacctgcagcgaggtctcagagggcaacatcaccgtgacatgcagggcttccagcttctttcccccggattatcacactgacctggcgtcaggattgggtgtatctttgagccacaccacccagcaagtggggggtatgtcctgcctataggggtatggacctaccacacctgggtggccaaccggatttgccaaggaggaggcgcag

SEQ ID NO: 557694 - DNA, 139 bp, Homo sapiens
caggttctgttaggatttttctcccagtgaaaaagcactcaacactgtagttgctttaaaactactcgatgaccttggcgtattgataacctgttttgcttttgccaaagcattttcaaatgccctactttggaaagtg

SEQ ID NO: 557695 - DNA, 339 bp, Homo sapiens
  misc_feature (9)..(9): n is a, c, g, or t
  misc_feature (18)..(18): n is a, c, g, or t
  misc_feature (164)..(164): n is a, c, g, or t
  misc_feature (174)..(174): n is a, c, g, or t
  misc_feature (190)..(190): n is a, c, g, or t
  misc_feature (200)..(200): n is a, c, g, or t
  misc_feature (236)..(236): n is a, c, g, or t
aaccataanattccctgnctctcggaacttgaaactcctactgtaaactgttttccttgaaaatgaaagctgtacaggacgattcactgccatgccagtcaggcgggcttgtcatgttctgtgaatctcgaagtgaagggtgccacccgcccccataccctccnccaccggccnctgtcggggatgccanagcctgccanggtcgcagccagacgtgagcttggcattgaagttgncaaaaggccctggccgggcttgccgtcgctgtcccagggccgtgtccggtgctgtggctgtaaagctgtaggaccctttttaataaatagagaattattaata

SEQ ID NO: 557696 - DNA, 391 bp, Homo sapiens
tgctgttgcgcccttaccttccccagcgtcccagtttttggcagttctggaatggaagggttctggctgccccaacctgctgaagggcagaggtggagggtggggggcgtaaagtagggaattagggccatgcctgcccccctcatttcattcaaaccccaccctagtttccctgaaggaacattccttagtttcaagggctagcatccctgaggagccaggccgggccgaatcccctccctgtcaaagctgtcacttcgggtgccctcgctgcttttgtgtgtggtgaacaaaagtggaacttgggggggtggaaaacccgggggccctgccaccttccttacccgttttaaatataaaaataaagatgtgtttaagggttgaaaaaaaa

SEQ ID NO: 557697 - DNA, 1328 bp, Homo sapiens
tcccctaaaaaattctctttttagggggaatgggaaacggacacctcataaggggttccaaagactcactcaattttctcgtgactttttaacatctcattatctcatttattatattttacaccttaacaaaaagtgccgtgctagtgcatttcttcgcgggccggattggcaacatattttttcccagtggctccataaacaaaacaaacaaaaaagaggggggacgcgacacacaaagatactcccacgcggagggcgccaaaggaacaggaggctacaccagaggagaactccgggacacacaagaggggcacccttacagaggagaacagcagcaactcataccaggccaagaggacaacagaggcacgcgcagcgacaataaacacaggacggagcgcaccgggacaacacggagctaaacaatgggaacacccaaagagcagaacagagacaatcgtctaaaacaaacgagagagaggagagagcaacacaaaatgcgggccacacaaaagacaccaaatagagaggagacaataacaacaaccacacactagagggacacacactccccacacacaccaacaacaggcgataaacacgagggaaaaaaacaaaccaagcgaaaaacaagcacagagacagcgtcattagaaacacgccataagcaggatctcacacgtaaaaaaatacaaatataatagggaaaaacaaatgctataaaacacaaagacgaaaatactactcaagaaacgaagaatcaagaagaaagacacaaaaaatcgacgaccaacacagacaacaaacaaagacagacaaagacacacagtgaatcaacgacaaaagaagaagagaaagaggaagaggaaaaagaagcaaaagaaaaagcaaggagaaaacgagaaggagacaaacagaacagaaagagagaggagaacagaaaagagaaaaaccaaagagagcgcaagaagcagagtagggagagcggcgcgcaggcaccaggtaagaaacaaccggccaacagagaaggatggcgcgtcgaggcggacaaaagaggacgacaaacaaagacgaaagaactagaagcgagcgcaagggtgggaagagatcgaagacgcgggagcgaatatgcgacagtaagagggaatagaagagaaaaggtcaagacaataaataaagacagagatggagaggacaggacacgatagaggctgcagaagggacggagagagcgcgtgaagcggcgacgcgcatacgcgagagcgagggaagcgagacagcgacggaacgagacgagcggggggagggggcgaagatgaaccagc

SEQ ID NO: 557698 - DNA, 127 bp, Homo sapiens
aggaacgatgccagactgtccatagttcatcatgccattggtccatagaagttcatcccagccatctgctgggtcatctgagataaggttccattgcagctgctgagctggctggaccccatacaca

SEQ ID NO: 557699 - DNA, 101 bp, Homo sapiens
cctagtcttagaacgtttcaacttgcaaatgtgactacggactttatgttagataatagcactgtatcagtgttaaattctccgaatttattttttttttt

SEQ ID NO: 557700 - DNA, 831 bp, Homo sapiens
  misc_feature (793)..(793): n is a, c, g, or t
tgagcgggtgtcacgcctgccgcaccgtagctcccggggcctccgcggggagcgcgtccccgcatccagccgacccccggggctggcacgtgctgcgcccggtccgtgctgatgggggcgtgatggccccgatctccccgaccccgccttctctgcttagaggaggaggagcagtcgtgcagcggcgagctaggtgaggctgactgctgcctgccgagtacggcgcggcggacaggggactgcagtcagctgctgtccacttggggctgtgcgggggtccgcgtcccggcgagtgttccctggagcactccctgagtagctggcagcttatccccactgtccgctagacccgctcctggtccccggactctgctctgctggttggcgctggcccccgtgcaccggtctgggttcggcccccggccgaggtgtagggcggacgcaaagggggacgcacgaatctggggggaattgacgccgggattttgcagggctgaaactcgacacgcgccaagggggggccccctggcaggagacacccttgagcgctggacattgagatatactgcataccaggaaaattcacaactagcgcccggtggcaccgcatttacgaaattttggacaaatcatattaatcgccaacttccctaacattagaatgaagcggccctgtggtgtcgacaacttagtggaagaggaaaaaacaattgtccccaacaacaggagacaaaaacctggagagcaagactgaggagagcacatataaattcatgaaaagactataactccnttgggagaagcaaagccccccatcgatgagttcatacc

SEQ ID NO: 557701 - DNA, 968 bp, Homo sapiens
  misc_feature (1)..(1): n is a, c, g, or t
  misc_feature (564)..(564): n is a, c, g, or t
  misc_feature (568)..(568): n is a, c, g, or t
  misc_feature (580)..(580): n is a, c, g, or t
  misc_feature (590)..(590): n is a, c, g, or t
  misc_feature (718)..(718): n is a, c, g, or t
  misc_feature (733)..(733): n is a, c, g, or t
  misc_feature (740)..(742): n is a, c, g, or t
  misc_feature (744)..(745): n is a, c, g, or t
  misc_feature (747)..(747): n is a, c, g, or t
  misc_feature (749)..(749): n is a, c, g, or t
  misc_feature (764)..(764): n is a, c, g, or t
  misc_feature (787)..(787): n is a, c, g, or t
  misc_feature (826)..(826): n is a, c, g, or t
  misc_feature (829)..(829): n is a, c, g, or t
  misc_feature (858)..(858): n is a, c, g, or t
  misc_feature (869)..(869): n is a, c, g, or t
  misc_feature (871)..(872): n is a, c, g, or t
  misc_feature (882)..(884): n is a, c, g, or t
  misc_feature (886)..(886): n is a, c, g, or t
  misc_feature (888)..(888): n is a, c, g, or t
  misc_feature (890)..(890): n is a, c, g, or t
  misc_feature (892)..(892): n is a, c, g, or t
  misc_feature (894)..(894): n is a, c, g, or t
  misc_feature (912)..(912): n is a, c, g, or t
  misc_feature (914)..(914): n is a, c, g, or t
  misc_feature (917)..(917): n is a, c, g, or t
  misc_feature (925)..(925): n is a, c, g, or t
  misc_feature (934)..(934): n is a, c, g, or t
  misc_feature (936)..(936): n is a, c, g, or t
  misc_feature (939)..(939): n is a, c, g, or t
  misc_feature (947)..(947): n is a, c, g, or t
  misc_feature (968)..(968): n is a, c, g, or t
ncccctcagcaacagctcacccaccgttcgccttatgtgtgttccgtcctaaaaccaccccttttcgtgctttctatgctcgagggctcatttctcacgcatctgttccaggcaggcaaacagaaccaccaccgcctaccacatcccacacaccaaagagcccctggatctgcgacccgcgccagggtcaccctccggccccaccgccccgcatgaacaacgccgcactcgttgccgctctcacggctctgtgcccgcggacttgattctcgcgcataaggtttccccccttctcccttgaggggcaggcccctccctcttcactcccaaataacggccccaaccccgcattggccaaacggtggccactttcttaaccggaaaaggtgcccaaccctgttggcgcccaacgagctcaacgccattcccggccttttatttggatacagatccaacgtcaccctgacgaaaacaaaaaacatggtggtccgggcctgtggttcccactagttcctccgagaattaacccctatgggccaagtttttctgatcctccattgctcncctnggcaggaaccancagaccaacngccttttgtgagaccttcccctccctatccccaactttaaaggtgtgagagtattaggaaacatgagcagcatatggcttttgatcagtttttcagtggcagcatccaatgaacaagatcctacaagntgtgcaggcaaaacntagcagnnncnncnancaacgcataaagaanaatggccgggcaggtcattgctngaagtctcagccatgacggactcgtttcagaggtaattntgngcgcccaccagccaggccacccagccgtnggaggaagggngnntggcaaggcnnngncncntngntgtctgtgcgaaaggaanantgncccggaanttcctgtantnaangtcacaanaaatcccgagtccggccggan

SEQ ID NO: 557702 - DNA, 272 bp, Homo sapiens
gtcatttctctttagagtcttttatctggaacagtttgtcaatctttaatggtgccgacatttttgaagtgtagaggccacttttacctatctctcgagttttaaaaaaatgtggcgtggcatagtggctcactcctgtaagctcaacactttgggaagctgaggtgggtagatcacttgaggtcaggagttcaagaccagcctggcaaacatggtaaacccagtctctactaaaaatacaaaaattagctgaacatggtggtgtcgacgcg

SEQ ID NO: 557703 - DNA, 357 bp, Homo sapiens
gactctagagcatcccctctgcgtaactcataatagcatgtggaacttgagtgtccaaggtctccagaggatgaaagcaggagtctgtcagggtcctactgagacagcacagccaacctagctagcaacatttgtcatagtctgaacaatatatacttatagaattcagtcaaagatacacaatctagaaacagcttcatggggtggactctaacagtagttgcaatgttttagaatgagacttacttctctgctatctagatctgaactccttggcttctttacttagttcaagccccagcctaggaaagccagttacctaaaagttggctcaggagtctaagagcttaacctaaa

SEQ ID NO: 557704 - DNA, 215 bp, Homo sapiens
gaggaagccaagagctcggacagaggcggagaggggcgggaagcgcaacaggtcacctggaggaagccccatactgacctcctcatgctgctgacacaggcaggatgtgcattgaactcagggtcacctccaggaatcggaccttgctatgagaaccacgggtatcagtctgagcacatctgtcctccgagaccaccagtggctcccaatggcta

SEQ ID NO: 557705 - DNA, 803 bp, Homo sapiens
agacgaggggtggggaatagaagccggtggccggggcgtgtgaagtgttacaagtcggccggattgggtgaaacaattgcgggagaggtgagcgttccgaggataaaagagggtagttgccgtgtggcaggagcagtagagtctcgcggggcggacgtactgtgcaagtctttggtgtagtagggaggacgtgctagtagtgctactggtagagagtaattgaccaggagggtgtggccgctagcccgacagtggcctggggcaaatgtcaggtcgtccgcgccgtgtcagacagagggccacatgtagagggattttaagcctgggtcattcggggtgcggggcgccgtctgaggaccagccgttccttgtagcctaatatgttggtttaaatatgcatagctacaggggttccgtaagaatgctgtcgcagtcacgtcgaacagttatgtgttgttggtctcgaccagtttctgaagccgttctgtagaggtcgtttatatccatgtcaccttaccagccaggcagtggcaatggtctcgacacaactataggttccgtagtaagtcttttcatacgcagtgctgggcgcggggggcagataagcaataggagtagggcagtggagagtagagtaatacatagaatgaattgaattgcagtattctgggaaagaaccaagaatacagaaagacaaaagaaaaaaaaatagaaaaaaatagaagtaaaaaaataaaaatagagaacacagacaaacatgagagtaaaggaagaaaaaaacaagaaaaaaagaggacatacgc

SEQ ID NO: 557706 - DNA, 700 bp, Homo sapiens
  misc_feature (23)..(23): n is a, c, g, or t
  misc_feature (26)..(26): n is a, c, g, or t
  misc_feature (33)..(33): n is a, c, g, or t
  misc_feature (39)..(39): n is a, c, g, or t
  misc_feature (42)..(42): n is a, c, g, or t
  misc_feature (44)..(44): n is a, c, g, or t
  misc_feature (48)..(49): n is a, c, g, or t
  misc_feature (63)..(64): n is a, c, g, or t
  misc_feature (68)..(70): n is a, c, g, or t
  misc_feature (87)..(87): n is a, c, g, or t
  misc_feature (89)..(91): n is a, c, g, or t
  misc_feature (131)..(131): n is a, c, g, or t
  misc_feature (134)..(134): n is a, c, g, or t
  misc_feature (142)..(142): n is a, c, g, or t
  misc_feature (157)..(157): n is a, c, g, or t
  misc_feature (179)..(179): n is a, c, g, or t
  misc_feature (188)..(188): n is a, c, g, or t
  misc_feature (191)..(191): n is a, c, g, or t
  misc_feature (196)..(196): n is a, c, g, or t
  misc_feature (246)..(246): n is a, c, g, or t
  misc_feature (280)..(280): n is a, c, g, or t
  misc_feature (397)..(397): n is a, c, g, or t
  misc_feature (399)..(399): n is a, c, g, or t
  misc_feature (434)..(434): n is a, c, g, or t
  misc_feature (495)..(495): n is a, c, g, or t
  misc_feature (587)..(587): n is a, c, g, or t
  misc_feature (672)..(672): n is a, c, g, or t
aatccccggggattttgtgccanggnatactgntaactnatngnattnnaatttttctctagnnactnnnatagctaagcaaatgangnnncatgccagtctttcttcttttatacacaacagacaaaagngtnggggggcnagacaccaaccagcnattttttcccctggaaccagancatcatacngcngagtnccttcaaaccatcaaagtacagccttccttccaatgttgcataatctgtncaaaatcacagtataaatacaaagttcttccatncattttacaaaaccagcaaaactcttcaataaaatcctacaggaaaaagtagaccaatcttcatttacaaacagcatttttaacagttattattttaaattgttacaaaacataagngncaaaatcttaaatccttaaagtcacacgatttccnacagaaataagaccctcgccccacccatattacttatgactcaggacagttgttccgtccncacggggacccacgggccaacttttcaccaacccccaccagagggggaggccggccccagcactggccccggcccccagacgggcttcagcncgggcctgggcgcgggcccggggggccgcggcggcgagggcctcacggtactgcactggccagttctgcggttccttcttatgcngtttggccacgaaccccaggacttccat

SEQ ID NO: 557707 - DNA, 143 bp, Homo sapiens
gtgagagacggggaagtgacagtgatggtagtgtcagtgaagtacggttcttagctcttttccgattcattatttgacttgtgttgagttttaatgagttctttatatatgtctggtctcagactcctgaggtcaagtaatcc

SEQ ID NO: 557708 - DNA, 527 bp, Homo sapiens
  misc_feature (46)..(46): n is a, c, g, or t
  misc_feature (152)..(152): n is a, c, g, or t
  misc_feature (194)..(194): n is a, c, g, or t
  misc_feature (204)..(204): n is a, c, g, or t
  misc_feature (218)..(218): n is a, c, g, or t
  misc_feature (335)..(335): n is a, c, g, or t
gtcctgggatagcgagatccatgtctggctgtgtacatggcaggcngctcccaaggcgcgtatgctcctcatgtcccttcctctatctccaagccagccatgtgtggctgagcacctctcacacttcgaacctctccttcctctcacctctncatgacccaactgggtgtcagactaatcgcaggatcatcccncctattttanagggcatatgacanagcaacccttaattcgcctctgcaactttaagttcccttttgttattggaaagtaaccctgttccccaggttttgacggctgaggatgtagccatcttttggagaccattccttggnatccccacagggactctctgcagatctttgggcttctgcctttgtgcagcctcctcttccctggtactgtgtcctgcaaactctcctgtactctcacctctgcctcttcaactcagggagtctgttgggttctgcctgcctgccctgacttcctgcggtgattccctctgcaaggaacccacgcgggtaccg

SEQ ID NO: 557709 - DNA, 1445 bp, Homo sapiens
  misc_feature (33)..(33): n is a, c, g, or t
aagcagtggtatcaagcgcatagtcgccattanggccggggagaagccgggaggactgggtgcgcctgcagggatcggaagccggttggggtgtgagaggttttctcgctctagggagattcttcaagcaatcactatgtcaacagacacaggtgtttcccttccttcatatgaggaagatcagggatcaaaactcattcgaaaagctaaagaggcaccattcgtacccgttggaatagcgggttttgcagcaattgttgcatatggattatataaactgaagagcaggggaaatactaaaatgtccattcatctgatccacatgcgtgtggcagcccaaggctttgttgtaggagcaatgactgttggtatgggctattccatgtatcgggaattctgggcaaaacctaagccttagaagaagagatgctgtcttggtcttgttggaggagcttgctttagttagatgtcttattattaaagttacctattattgttggaaataaactaatttgtatgggtttagatggtaacatggcattttgaatattggcttcctttcttgcaggcttgatttgcttggtgaccgaattactagtgactagtttactaactaggtcattcaaggaagtcaagttaacttaaacatgtcacctaaatgcacttgatggtgttgaaatgtccaccttcttaaatttttaagatgaacttagttctaaagaagataacaggccaatcctgaaggtactccctgtttgctgcagaatgtcagatattttggatgttgcataagagtcctatttgccccagttaattcaacttttgtctgcctgttttgtggactggctggctctgttagaactctgtccaaaaagtgcctggaatataacttgtaaagcttcccacaattgacaatatatatgcatgtgtttaaaccaaatccagaaagcttaaacaatagagctgcataatagtatttattaaagaatcacaactgtaaacatgagaataacttaaggattctagtttagttttttgtaattgcaaattatatttttgctgctgatatattagaataatttttaaatgtcatcttgaaatagaaatatgtattttaagcactcacgcaaaggtaaatgaacacgttttaaatgtgtgtgttgctaattttttccataagaattgtaaacattgaactgaacaaattacctataatggatttggttaatgacttatgagcaagctggtttggccagacagtatacccaaacttttatataatatacagaaggctatcacacttgtgaaattctcttgtctaatctgaatttgcattccatggtgttaacatggtatatgtattgttattaaagtaagcgagcaccaccaatacacacacacacacacacacaaccctgagagagagaaagagagagagataacta

SEQ ID NO: 557710 - DNA, 423 bp, Homo sapiens
gcacgagcgcacgtaggtctacacgacactactttccctataatatgatcataacactcttatgagaacgccctcataatcattttccttatatggttcctatacctggatgcccttttcctatacacttacacacaactattctggccggcattattctaatcctcattggccttccattcctatacattctttacataacagacaaaggcaacgatccctctccttaacatctcaattggccaccaatgggactgagacctaccagtacacacgactaccggggactatatcttcaactcctacatacatttccccattattcctataaccaagcgaactgggaatccttgacggtgacacatcgagtagtacttccgagtgaagcccccattcgcgtaataattacattacgacggtttg

SEQ ID NO: 557711 - DNA, 1326 bp, Homo sapiens
  misc_feature (33)..(33): n is a, c, g, or t
aagcagtggtatcaagcgcatagtcgccattanggccggggagaagccgggaggactgggtgcgcctgcagggatcggaagccggttggggtgtgagaggttttctcgctctaggaatagcgggttttgcagcaattgttgcatatggattatataaactgaagagcaggggaaatactaaaatgtccattcatctgatccacatgcgtgtggcagcccaaggctttgttgtaggagcaatgactgttggtatgggctattccatgtatcgggaattctgggcaaaacctaagccttagaagaagagatgctgtcttggtcttgttggaggagcttgctttagttagatgtcttattattaaagttacctattattgttggaaataaactaatttgtatgggtttagatggtaacatggcattttgaatattggcttcctttcttgcaggcttgatttgcttggtgaccgaattactagtgactagtttactaactaggtcattcaaggaagtcaagttaacttaaacatgtcacctaaatgcacttgatggtgttgaaatgtccaccttcttaaatttttaagatgaacttagttctaaagaagataacaggccaatcctgaaggtactccctgtttgctgcagaatgtcagatattttggatgttgcataagagtcctatttgccccagttaattcaacttttgtctgcctgttttgtggactggctggctctgttagaactctgtccaaaaagtgcctggaatataacttgtaaagcttcccacaattgacaatatatatgcatgtgtttaaaccaaatccagaaagcttaaacaatagagctgcataatagtatttattaaagaatcacaactgtaaacatgagaataacttaaggattctagtttagttttttgtaattgcaaattatatttttgctgctgatatattagaataatttttaaatgtcatcttgaaatagaaatatgtattttaagcactcacgcaaaggtaaatgaacacgttttaaatgtgtgtgttgctaattttttccataagaattgtaaacattgaactgaacaaattacctataatggatttggttaatgacttatgagcaagctggtttggccagacagtatacccaaacttttatataatatacagaaggctatcacacttgtgaaattctcttgtctaatctgaatttgcattccatggtgttaacatggtatatgtattgttattaaagtaagcgagcaccaccaatacacacacacacacacacacaaccctgagagagagaaagagagagagataacta

SEQ ID NO: 557712 - DNA, 1328 bp, Homo sapiens
  misc_feature (342)..(342): n is a, c, g, or t
gatctgtttcgcctggccagcgagtcccgagtccgatgagactagtggtcgcgccagatcgggatgtagacctcagcattgctttatgcttatgagtaacatgcgaactgcagtagtattgtattgatccacgactgtgtgagtgcagccaatggaagcccttcatactgtcaggtacccaaatatgcctcacgatgtgacaagtcttgactggcacttgattagtgttggtggtaggataggaatcgctactaggcacaaatcgcgagacgagggcggtacgaccgaatatcgtacctccgttggtgacctcctagaggggggctttgaattcgagttggnttgaggtgtggctttgccgagaaggccgctcgagatttgcttagtcgaggaaacctaacgcgaggaagaacataagccgggggggctacaaagccatttttttttggggccctcgaagggtttaaggttcccgggaaacttcttcccctttgggccaagggaccagggggaagtctttttgccacaacggttttaccggaatggttcgtaggaggaggaaccgcgacacattggcccaaaggggccctttgtgagggtttcgctttaccgcacaaacgcgcaatacgtccgcaccgcacagcgtatgtggcctttcaaagcaacagggcacataacacaccgaagagcggcggtggggtccaaatagagcttaccctttatgagaaagcaaccataggcgactttgcgcgccttgcgccagtcacctcttgttcgagccgccaccttggctaagtcgggtgagggggcccaccccagaagcgggttgcaagggtgcgatagaaggagaatggcgaaagaaaatagcttggccaaaagcacgttggtgaaaaagcgggtccctcaccaactatgtccaaatctggttttggggggttagcctcccccctttggtggcccccgtggtttggttatatgtcggagttactttcgccttttttaaaaaaccgcccaggtggacagggcacatttataggcgcccttttggggtttttccacccgcccccgccccaaaaaaaaaagtgtttaaagacccacaatttctcaaaagaaaggggaacagctggggcttgataaatgtggggttaaccccctttgggggggcaatctttttgtaccacaacggggcccctctggaaacacccggcaacacacaccacctttggtgttattaacaccgggcgccccccggtatagggggcaaactttttaccacacagcgggggggaaaacccgcccaacaggcaaaggtttctcttaaacgtttg

SEQ ID NO: 557713 - DNA, 511 bp, Homo sapiens
caccaaagagtcaaactcgtgcctagaaaccgattatagatcatgcccacgaggatccacgctactggcagcatcgaggatgagggatgaagggtctgtgctagatcaaaaggcaacggaggatacgatgtggcagagaagtcgcatgtggagagacctatgctaataacaggcttatggaaaagctagggaaaagtggttgcccgcttaccccctttccctaccccttcaagcacccgcatggagataagggcttaatagttaagagctgctataaacacagcttgcttaaatgtaaagagaagcccaggggtactacaagcatatccttcggatgcttcactccagaaagagggagtagaggcaagtcctcattactaataaaaatccaggtgatgctaacacttctcttgaccttcggataataacgcttagtatgtctctactgcccacaaggacggctccatggggttgtcctaatttcagcattcggaagcccatagagagggtt

SEQ ID NO: 557714 - DNA, 1469 bp, Homo sapiens
  misc_feature (33)..(33): n is a, c, g, or t
aagcagtggtatcaagcgcatagtcgccattanggccggggagaagccgggaggactgggtgcgcctgcagggatcggaagccggttggggtgtgagaggttttctcgctctagaacctcatagaaattctttctcagggagattcttcaagcaatcactatgtcaacagacacaggtgtttcccttccttcatatgaggaagatcagggatcaaaactcattcgaaaagctaaagaggcaccattcgtacccgttggaatagcgggttttgcagcaattgttgcatatggattatataaactgaagagcaggggaaatactaaaatgtccattcatctgatccacatgcgtgtggcagcccaaggctttgttgtaggagcaatgactgttggtatgggctattccatgtatcgggaattctgggcaaaacctaagccttagaagaagagatgctgtcttggtcttgttggaggagcttgctttagttagatgtcttattattaaagttacctattattgttggaaataaactaatttgtatgggtttagatggtaacatggcattttgaatattggcttcctttcttgcaggcttgatttgcttggtgaccgaattactagtgactagtttactaactaggtcattcaaggaagtcaagttaacttaaacatgtcacctaaatgcacttgatggtgttgaaatgtccaccttcttaaatttttaagatgaacttagttctaaagaagataacaggccaatcctgaaggtactccctgtttgctgcagaatgtcagatattttggatgttgcataagagtcctatttgccccagttaattcaacttttgtctgcctgttttgtggactggctggctctgttagaactctgtccaaaaagtgcctggaatataacttgtaaagcttcccacaattgacaatatatatgcatgtgtttaaaccaaatccagaaagcttaaacaatagagctgcataatagtatttattaaagaatcacaactgtaaacatgagaataacttaaggattctagtttagttttttgtaattgcaaattatatttttgctgctgatatattagaataatttttaaatgtcatcttgaaatagaaatatgtattttaagcactcacgcaaaggtaaatgaacacgttttaaatgtgtgtgttgctaattttttccataagaattgtaaacattgaactgaacaaattacctataatggatttggttaatgacttatgagcaagctggtttggccagacagtatacccaaacttttatataatatacagaaggctatcacacttgtgaaattctcttgtctaatctgaatttgcattccatggtgttaacatggtatatgtattgttattaaagtaagcgagcaccaccaatacacacacacacacacacacaaccctgagagagagaaagagagagagataacta

SEQ ID NO: 557715 - DNA, 118 bp, Homo sapiens
tttctttgctcagctccacggtgacggctgagatggagggtttgtctccgcataggctgggatcttcttggatcttcatctggagcaggcaggtggggacggccattcaacgcctccg

SEQ ID NO: 557716 - DNA, 834 bp, Homo sapiens
  misc_feature (33)..(33): n is a, c, g, or t
aagcagtggtatcaagcgcatagtcgccattanggccggggagaagccgggaggactgggtgcgcctgcagggatcggaagccggttggggtgtgagaggttttctcgctctagaacctcatagaaattctttctcagggagattcttcaagcaatcactatgtcaacagacacaggtgtttcccttccttcatatgaggaagatcagggatcaaaactcattcgaaaagctaaagaggcaccattcgtacccgttggaatagcgggttttgcagcaattgttgcatatggattatataaactgaagagcaggggaaatactaaaatgtccattcatctgatccacatgcgtgtggcagcccaaggctttgttgtaggagcaatgactgttggtatgggctattccatgtatcgggaattctgggcaaaacctaagccttagaagaagagatgctgtcttggtcttgttggaggagcttgctttagttagatgtcttattattaaagttacctattattgttggaaataaactaatttgtatgggtttagatggtaacatggcattttgaatattggcttcctttcttgcaggcttgatttgcttggtgaccgaattactagtgactagtttactaactaggtcattcaaggaagtcaagttaacttaaacatgtcacctaaatgcacttgatggtgttgaaatgtccaccttcttaaatttttaagatgaacttagttctaaagaagataacaggccaatcctgaaggtactccctggatggtgctgtatgcccgtattatgataagcacctctaaacattctcagtattgag

SEQ ID NO: 557717 - DNA, 1391 bp, Homo sapiens
  misc_feature (33)..(33): n is a, c, g, or t
aagcagtggtatcaagcgcatagtcgccattanggccggggagaagccgggaggactgggtgcgcctgcagggatcggaagccggttggggtgtgagaggttttctcgctctagggagattcttcaagcaatcactatgtcaacagacacaggtgtttcccttccttcatatgaggaagatcagggatcaaaactcattcgaaaagctaaagaggcaccattcgtacccgttggaatagcgggttttgcagcaattgttgcatatggattatataaactgaagagcaggggaaatactaaaatgtccattcatctgatccacatgcgtgtggcagcccaaggctttgttgtaggagcaatgactgttggtatgggctattccatgtatcgggaattctgggcctttagttagatgtcttattattaaagttacctattattgttggaaataaactaatttgtatgggtttagatggtaacatggcattttgaatattggcttcctttcttgcaggcttgatttgcttggtgaccgaattactagtgactagtttactaactaggtcattcaaggaagtcaagttaacttaaacatgtcacctaaatgcacttgatggtgttgaaatgtccaccttcttaaatttttaagatgaacttagttctaaagaagataacaggccaatcctgaaggtactccctgtttgctgcagaatgtcagatattttggatgttgcataagagtcctatttgccccagttaattcaacttttgtctgcctgttttgtggactggctggctctgttagaactctgtccaaaaagtgcctggaatataacttgtaaagcttcccacaattgacaatatatatgcatgtgtttaaaccaaatccagaaagcttaaacaatagagctgcataatagtatttattaaagaatcacaactgtaaacatgagaataacttaaggattctagtttagttttttgtaattgcaaattatatttttgctgctgatatattagaataatttttaaatgtcatcttgaaatagaaatatgtattttaagcactcacgcaaaggtaaatgaacacgttttaaatgtgtgtgttgctaattttttccataagaattgtaaacattgaactgaacaaattacctataatggatttggttaatgacttatgagcaagctggtttggccagacagtatacccaaacttttatataatatacagaaggctatcacacttgtgaaattctcttgtctaatctgaatttgcattccatggtgttaacatggtatatgtattgttattaaagtaagcgagcaccaccaatacacacacacacacacacacaaccctgagagagagaaagagagagagataacta

SEQ ID NO: 557718 - DNA, 220 bp, Homo sapiens
cccgtttgaaaggtggatggaagtgatccccagtgcccccagttttgcctcgggaccccccgtgttgagccccaaagagtttcttgtgtattgatggccggaccccctcgtttccgcagtgggtgctttcctggaagacgtttccttttttttgtattaatgaagcctggtaaaattaccccctgtttgaaaatcaaaaacatggcttccccgcagctta

SEQ ID NO: 557719 - DNA, 168 bp, Homo sapiens
acgtaaaattttagcctatctagtatcttcaaattgtggtctttgtaacaaccaaataacctttggtggtcactgtaaaattaatatgtgggagacagaatccatgtacctttgctaaggttagactgcatactccatcggactgtgaatttgaatgtttgtgctata

SEQ ID NO: 557720 - DNA, 308 bp, Homo sapiens
tcctctccatctctcctttcttttgtcctcctctctccgtctgcccgtctcttttacctctctctctcctctccatctctcctttcttttgtcctcctctctccgtctgcccgtctcctttacctctctctctcctctcattctctcctttcctttgtcctcctctctccatctgcccgtctccttttacctctctctctcctccccatctctcctttcctttctcctcctctctccatctctcctttcttttgtcctcctctctccgtctgctcgtctccttttacgtcgacgcggccgcgaattta

SEQ ID NO: 557721 - DNA, 540 bp, Homo sapiens
  misc_feature (48)..(48): n is a, c, g, or t
  misc_feature (144)..(144): n is a, c, g, or t
  misc_feature (334)..(334): n is a, c, g, or t
  misc_feature (364)..(364): n is a, c, g, or t
  misc_feature (376)..(376): n is a, c, g, or t
  misc_feature (398)..(398): n is a, c, g, or t
  misc_feature (406)..(406): n is a, c, g, or t
  misc_feature (416)..(416): n is a, c, g, or t
  misc_feature (426)..(426): n is a, c, g, or t
  misc_feature (438)..(438): n is a, c, g, or t
  misc_feature (449)..(449): n is a, c, g, or t
  misc_feature (463)..(463): n is a, c, g, or t
  misc_feature (466)..(466): n is a, c, g, or t
  misc_feature (472)..(472): n is a, c, g, or t
  misc_feature (487)..(487): n is a, c, g, or t
  misc_feature (499)..(499): n is a, c, g, or t
  misc_feature (531)..(531): n is a, c, g, or t
tgccgggaagtaaccaaaaaaaccatccccttagggtgggcggggggngtttgtgctggggtcaaaagttttgtactcgtaacacaaggatcatcgatgttgtctacaatgcatctaataccgagttggttggtaccaagcccntggtgaagaattgcttggtgttcatcgacagcccccggtaccgacagtggtacgagtcccattatgcgctgcccttggcccgcaaaaagggagccaagttgactcttgaggaagaagagtttttaaccaaaaaccgttttaaaaaaattcagaagaaatatgatgaaaggaaaaagaatgccaaaatcancagtttcttggaggaccagttccaccaggncaagttttttgngtgcatcgcttcaaggccgggncagtgtgnccgaccaaanggttatgtgntagagggcaaanagttggagttntattttaggaaaancanggcccncaaaggcaaataaanccttgtttggtnttcccccatgtaataaaggtgtttattgtttngttccccca

SEQ ID NO: 557722 - DNA, 1101 bp, Homo sapiens
agagggatagggccagcaaggcaggtatcgaagcgagtgtctggcagccgggagcccagcgaagagagcgagcaacgcgttaggaaaacgagcgaagctaaagggagtaggggagaaccactcataggttcccgccgccatttccctttgacagctagtgattttgcctttcccgtggctgccgatgagagaatgctggagctctggcgactatcagcgcaagctaagatttctcagctagtggacaaacgatcatgtccaagtcctgagaagggggtaaccaaagcacccgcgtcagcagatactcactcatgcgtagcatcgagagtgaagctcgtgttgcgctcagaggacgcatccacaagagttatgctgaagaagatgttctaaagatctctgtaacttagcgatggttggacgcaccattggtcgagggttgtaaaaaagagtacgaaacgtcgaagcaatgaaatgcatatagacgtttcagtctatgcggcccttgggaatgggtaggccgggccatgagcatcacatggaagagcacctaaaggagtggagacgtcacgcatggaatctccgcataggagcccaagtcgcctttggagagcaccaaagcaggaattcctcggttaggaggacgccaagactaaggtaagcacctggtcacgaggagcttggaggtcagaacgtgagggcgtatgccagcaactagtgatgccccagagatggagagatggcagagagcgaagacgcgaaggaaggggccaagaaggcagatcgctagaaggtggggaaactacgagaaaacgggaagcacttaacttgaattaggtgtaaaggaattcactactcgtaagcaagacacgcaatcttgtaggaagacgcacaagagaaattgagcaatcgaaccatggtaccaatgtaaccaaagggccagtggtgtcaatcaaaagatacacgggggccctgtgggaataaggcacgttccagagaggatagagttcccaggaaaggagaagcgagcaacagcgagaaatagctcgaaaaggagacatgacggtaactaggaagaggatatgcaagacaggaggagtcaat

SEQ ID NO: 557723 - DNA, 441 bp, Homo sapiens
ccgagaccacatcagtactccatatttgagcaggccagcatcgtagagtcccttctgcggcacctggggctccagaaccgcagaatcaacctgctgtctcacgattatggagatatcgttgctcaggaactgctgtacaggtacaagcagaatcgatctggccggctcaccataaagagtctctgtctgtcgaatggaggtatctttcctgagacgcatcgtcctctccttctccaaaagctcctcaaagacggaggtgtgctttcccccatcctcaccaggctcatgaatttcttcgtgttctctcgaggtctcactccagtctttggaccggatactcgacccactgagagtgagctgtgggacatgtgggctgtgattcgcaacattgacggcaacctggacatggacagtcttttacaggacattaatcaaaggaaa

SEQ ID NO: 557724 - DNA, 1566 bp, Homo sapiens
  misc_feature (823)..(823): n is a, c, g, or t
catggcggtctcttccttggggggatggtttttctctcggtgggtggggtgcgtattgtatgttctcctccgtggtgtggtgtttagttatcagaggggcgttgtggtggtggtggcctcccccctcgttgtctgccgccccaccacacgtttgttgggtcggcggcccgaccgtcttcggtgtggtgttgcgtcaaacagctgcggcgatagtctggtttggttggggttgttcgctccgtttggttcgtctgtctctgtggcgtggggggaggagtatgttgtttgtttatttgatatgtgtgtgttgtttgttctgtccccgctcttgccgccttctgttttttttattatgggtggtgctgtcttctcgctaaggagggtggtcttcgctcctctgtagtggttgtttttgttgttgctcctcctcctgggggggggcggcccacctcttttttttcttctcctcacaggaggatgtttgtatgaggtggtgtgtgttttttttagaggatgagttgtatgttgtgttccgccgccgcgtggtgcctcgctggtaggtagcgtctctgttcacactcttttgttgctctgcggcgctccgcgtggctgcgcgccccccaccgggggggttcttcacgacggcggccgctatttttgtgtgtcgttttatattctgggggtggtattctactcaacataggggtgctcactcacttctgtgtgtttttttgggtgtgttgtttttaatgagtcgcctccctccacacgagagatgatgtggtgtgcgcccccccccccggccgacacacaacagtcgggnggggcgcgcactactactactactctctgtgcgtctcacagagagtgtttctctcagatggtgtgtctctcccatcatgtgtccctacagagagagcttttttcttgtgggggtgtgcacacacacagagagtcgtcgcgtcactatacgcgcctcacacacactgtgtcgtctccttctctctcacagagaggctcacccgcgcccctgctgtgcggcgtgttgtgtgtgtgtgtgtgagcgctcctctctctctctctctcttgtctctcctcctgcgtgcgcgcgctctgtgcgcgctctgtgtgttctccgcgcaccctgctgtgtgtctctcttagagagatagcgtgtctctctgtgtgttgtgtgtggggtgtctcgggcgggtggtgtgatctcctccctctccccgcgcggggtgtccctctctctcacacccctgtggcgcgcgcttttctccacacagcgcgccaacctcttgtgtgcgccacctttttgtagagagcactcttcccgtgtactctcgtgcccccgcgaccctctctgtgtgaagagagagaaactgtagttttcccccattttccctctctaaagagagagattattcctcggcccaccctcttctctcaaacacccaccccccgattttttctcctctgccccgcgggccccggcccccccggggggcccacacaaaagaggtttttaaaccaaaaaaaaaaaagaggatttaaggggga

SEQ ID NO: 557725 - DNA, 373 bp, Homo sapiens
  misc_feature (201)..(201): n is a, c, g, or t
  misc_feature (205)..(205): n is a, c, g, or t
  misc_feature (213)..(213): n is a, c, g, or t
  misc_feature (217)..(217): n is a, c, g, or t
  misc_feature (219)..(219): n is a, c, g, or t
  misc_feature (228)..(228): n is a, c, g, or t
agaagggtgagcaatagagaaggaagtgaatcactagcacttcacaagtgctgctgcagaggcctgccatagagagctggctgagacctaggtgctctcctgctgatctgagagggcagaaaaataaataaatagaaatgtcaaaaagaggacagcagcagtgtagggaagggaggcagtagaggaacgaaactcccgggngagnccaacgtngcangngtcaggatngctgtgggtggttcaaatgtgagaaccaataccctccttccctagctaaagttgttcccccatcagcctcagtttccaccatctctgaggcattcacaggaggaataactggtgtgttaaaatccaccaaccacttatatacagg

SEQ ID NO: 557726 - DNA, 374 bp, Homo sapiens
  misc_feature (168)..(168): n is a, c, g, or t
  misc_feature (198)..(198): n is a, c, g, or t
  misc_feature (210)..(210): n is a, c, g, or t
  misc_feature (232)..(232): n is a, c, g, or t
  misc_feature (240)..(240): n is a, c, g, or t
  misc_feature (250)..(250): n is a, c, g, or t
  misc_feature (260)..(260): n is a, c, g, or t
  misc_feature (272)..(272): n is a, c, g, or t
  misc_feature (283)..(283): n is a, c, g, or t
  misc_feature (297)..(297): n is a, c, g, or t
  misc_feature (300)..(300): n is a, c, g, or t
  misc_feature (306)..(306): n is a, c, g, or t
  misc_feature (321)..(321): n is a, c, g, or t
  misc_feature (333)..(333): n is a, c, g, or t
  misc_feature (365)..(365): n is a, c, g, or t
ctgacatctcaccgtgcgacagtgtgtacaattcccactatgcgactgcccctggtccgcttcaaggtaggcaagctgattcctgaaggaagacgatgattgagacaaccctcgagctaaaaaaattcagaagaaatatgatgaaaggaaaaagaatgccaaaatcancagtttcttggaggaccagttccaccaggncaagttttttgngtgcatcgcttcaaggccgggncagtgtgnccgaccaaanggttatgtgntagagggcaaanagttggagttntattttaggaaaancanggcccncaaaggcaaataaanccttgtttggtnttcccccatgtaataaaggtgtttattgtttngttccccca

SEQ ID NO: 557727 - DNA, 501 bp, Homo sapiens
  misc_feature (28)..(28): n is a, c, g, or t
  misc_feature (59)..(59): n is a, c, g, or t
  misc_feature (162)..(162): n is a, c, g, or t
agtaatagcgagaatcgtaacatatagnatcacactagccctagagtaaacaacacaanctactacctgaaatttaaatacccatcacaaacatacaaattttccaacatactaggatattatccctccatcatacaccgcctaccaacataccacaacctntctataagccaaaaatccgcatcatcattactagacttaatttgactagaaactattctaccaaaaataacctctttcatccaaataaaaatatcaatcatagtatcaaatcaaaaaggcctaatcaaactatactttctctccttcctaatcactattataatcagcataacactatttaattaccacgagtaatctctataataacaacaactccaataagcaatgatcaaccagtaacaataactaatcaagtaccataactatataaagcagcaatccccatagcttcctcactaaaaaaccctgaatcacccgtatcataaattactcgatccc

SEQ ID NO: 557728 - DNA, 226 bp, Homo sapiens
  misc_feature (160)..(160): n is a, c, g, or t
  misc_feature (204)..(204): n is a, c, g, or t
gaatctcaaaaatattttgctgagttaaacaagctttgcacaaagtagtatattatgtatgatcccatgtatagaaagatctagaataaggaaaaacaaattatgatagaaaagatgttgcttctggtgattgggtggagctctgatggactgggaaggnagcatgaggggagccttggtggggttggatggtaatttaaggtnccctgaccaggggtttggggtt

SEQ ID NO: 557729 - DNA, 345 bp, Homo sapiens
ggcatactgatagctccacaggtgtccttgactctggacatattggctgtgaccctgtaagatgtcactgacagtccgcattgagaaacaggggataaatcacttggtcagtctctctgtatgataggatcatgagtgtgatgctttggcaattcagatcagcattagactctgggactaaatgaacgaaatgattgtcaactcgagtatgcacctcgattaagtagttgctactatctaatgaacgcggcacgagttctgggaagattcagactcgtgtcacgtcgttcagagaatatgggggatgggcacaggatgaactgatatatttgggaagattgccgc

SEQ ID NO: 557730 - DNA, 870 bp, Homo sapiens
  misc_feature (642)..(642): n is a, c, g, or t
tccccaaaaaacttggggaaaagaagggaacttttttttggtctcaaaaaaaaaaaaggtgttctgtgtttaacccggactgtgtggctgctcacatgtgccgtgtatcccaggacgttggggaggaccgaggcaggttgtgtctcaccggtccagaagttgtggaccctttgtgcccactgtttgttaaccccctttttatattacaattaaaaatatcctctgggcgtggtggtagacaccctgttatcccattacttgggcaacacggggcgaaaaactcgtgaacggcgacaggaagatgttgctattgggccgaaaatgttgccatggtgatcaagtggtggaaaggaaaagaagtcctcttctaagagaaaaggatatcactaaaaaaacattttagtggggctgtcaagagaaagctttttccgtgagaaaataacggggtagagtatatactcatatagtttggaacgtgatcttgcaacgggacaaattggtcttaggacgtgattgtctacaaaaagtgtggttggggggagagataatttgcggcatacgtttcccctttcactaacacagagcggcacacgtggagatttccacaaccactttgtgtagcgtagtggtcccaagtgatcnttggaaaagcaaaccactgttctacaacttccttttgtcaagaaatagaaccgatagtttgttgagcccatattctttctttttacacaagtacgatgtaagcacacagggaaaaaggcgggttcacagcaggcaattaaaaaatgcatactccaggcttaatgctctggtaaacaaacccgcttccgctgtcctcagacccttaactgtacctcaagagacagaaat

SEQ ID NO: 557731 - DNA, 212 bp, Homo sapiens
  misc_feature (40)..(40): n is a, c, g, or t
  misc_feature (47)..(47): n is a, c, g, or t
  misc_feature (66)..(66): n is a, c, g, or t
  misc_feature (68)..(68): n is a, c, g, or t
  misc_feature (103)..(103): n is a, c, g, or t
aatatagtttgaagctgctattagacacgcgggaggagcnaccttcnaatgaatcttcaaattggnanatactgcttcaccacctgttggggataagttgcanatggaataatttagtatggtttgtagctattttgatgaccacctcgtctgggtacctccccctgtgtggtctctctgtggggtatcggacttcgattccgtattctggg

SEQ ID NO: 557732 - DNA, 166 bp, Homo sapiens
tcctcaccgtggatgccactgcaccctgcatgatggcagggaacctaccctttctccagaaccagtctcgtctaacctgctctccacccagggatgcagtagtgcaatgcagaaagcgcatgtcagagcagagccatctggggcaaccttctttcttcaaaactag

SEQ ID NO: 557733 - DNA, 215 bp, Homo sapiens
  misc_feature (142)..(142): n is a, c, g, or t
  misc_feature (168)..(168): n is a, c, g, or t
  misc_feature (185)..(185): n is a, c, g, or t
  misc_feature (193)..(193): n is a, c, g, or t
atctaaggatcccgtattacactaacgggcagatagttgaggtcatgagttcggacagcctgggaacatggtgaaaccccatctctcctaaaattacaaaaatcccggacatggtggcaggtgcctgtaatcccagctactntgggaggatgaggcaggataatcacnttgaacccgggaggcgngaggttgnccagtgagctgagaatcatgcc

SEQ ID NO: 557734 - DNA, 380 bp, Homo sapiens
ggaacgccaaggtaagctcctgagcgtcttcggggcctgatctcagcagctgtgatcacaagtcaaaacgaatcacataggttctctcgacaggtgcagagacagagtcttcccggatcggagtccagatcagaatagctcctctagcggaactgccttcgtggcccaacgcagagatcatagggctgctcttctgcttgccgcagcttgtggccagtctcaatggctgcaaatgcctcctcagcatagcgactagtgacgaaccggtagttgtccccttggactcggaagtggatggtgcactcctcaatctctccaaaagtggagaacctctgtgtcagctctgatcgagtcatgcggccaggtatctttccaatgaa

SEQ ID NO: 557735 - DNA, 3167 bp, Homo sapiens
  misc_feature (16)..(16): n is a, c, g, or t
agcgtggccgcctggngcccgcccgagctgccgccttgtcgagctgagtccgcgctcccgcccaggcggcggccgacgcgacgccccgagcgcccggccccgccgccgcggcccggcagactgcctctgtcaccgggtccctccacccttgtctcctgtgcggccagcgtcagagccatggcgacggaggagaagaagcccgagaccgaggccgccagagcacagccaaccccttcgtcatccgccactcagagcaagcctacacctgtgaagccaaactatgctctaaagttcacccttgctggccacaccaaagcagtgtcctccgtgaaattcagcccgaatggagagtggctggcaagttcatctgctgataaacttattaaaatttggggcgcgtatgatgggaaatttgagaaaaccatatctggtcacaagctgggaatatccgatgtagcctggtcgtcagattctaaccttcttgtttctgcctcagatgacaaaaccttgaagatatgggacgtgagctcgggcaagtgtctgaaaaccctgaagggacacagtaattatgtcttttgctgcaacttcaatccccagtccaaccttattgtctcaggatcctttgacgaaagcgtgaggatatgggatgtgaaaacagggaagtgcctcaagactttgccagctcactcggatccagtctcggccgttcattttaatcgtgatggatccttgatagtttcaagtagctatgatggtctctgtcgcatctgggacaccgcctcaggccagtgcctgaagacgctcatcgatgacgacaacccccccgtgtcttttgtgaagttctccccgaacggcaaatacatcctggccgccacgctggacaacactctgaagctctgggactacagcaaggggaagtgcctgaagacgtacactggccacaagaatgagaaatactgcatatttgccaatttctctgttactggtgggaagtggattgtgtctggctcagaggataaccttgtttacatctggaaccttcagacgaaagagattgtacagaaactacaaggccacacagatgtcgtgatctcaacagcttgtcacccaacagaaaacatcatcgcctctgctgcgctagaaaatgacaaaacaattaaactgtggaagagtgactgctaagtccctttgctcctgcccgcgagagactgtcgggaagttgacccggattggcaagaaacagggtgtcttggaggtggtcccccagatctgcgcctgggggtcaggacagggcctgatttgagcctcctctctgaagatgatttggccgagcggaaggtgtggaccaccggaaagttcttaaaagttgctggtgacatttcttgccaattctaacactgtctagggaagagttcctagtctattgtgttcaaacagagtcaacaaaagtttttaattttttattacagaagggtgaagttcaatttaacatgcgttgtgttttttcagtaaacgttctgtatctttttgatattccatgacccagtgcacgctgtggcctgtcaccgccaccgtggccccgccagctggcctcccctttggcccacgccggccgcccccattctctgctgcgtagatgccctggcccagggccctgactcctccattcccgccagtagctgttcctagtgtattttcgtctttctggaaaacagcattgagtggttgttttctgtgtaaagagccgtttgtgtcttgggagtttgtggcccacatgccgatagcacggtcatcgcacatgactctcccgtttgtctcagtgtccctgcaacaagcagcaccgcagactgtaataaaaggtggggttttgtgaatggttgtggcaagtgcgtccttgtgaagctcgtctccatgtggctttcttggagaaaggctcccctggggcaagagggtggaaggtttctttggacaggaggtgctgaggctggctgcacctgctctctgaagacgccttcctctctaggttcattgttcagtgttgctggaggcggggaacgggggtggggaggttcttagttgcgaaggagccaagctcctgatggacttgcgttgggatgtgggggacacctgtggcatggtaaggctccctgagtcccttactccaggtcagatgccagtgggactcatgcgccctatgagggctgcagggccagtgctgcccctcggactcctcgaggggttgggtgctaagcgcgagcctcgccgtccctgctggagccctcgcctgcctgcccctctgcctgtgctcctggcactgtggcttcccggtgctcacctgcacagcagttaacagcagaggccgagcgggagcctctggggagcgaggctgaaacctgaacctgcccatggagacagttgtggtgagggttgccacacacagtgagggcggagcagggtggctgagggcacaggtgcctgggtctgtcccacggggcagggctttggggctgtgatgctctgggaagccagcttgggtcctgggtctacagagggccctggccccggagcccagccagctctgcctctctcagggcctggagtcctgggggagctcagccagctctgcctttctcagggcctggagtcctggatgaatcctgcaggtttttggttgcaccggcccagggaggaagcggggggtttgtcaggtgggctctcctggaggtcctcgagtggcaggggtgaggaggggattatctgaggcatctggagatgtatatcctgtggtttcccctgcccctctgtttccgatgaggtgtacggatgagtgacctgcactaagaagtgagttgccacagtgaaaatgggttggtttttgtcttcgacgctcagggtctgggcgcctcgcatttgcagtctgttgtgacagacacggggagctccgcgtgccagcctgtggctgccctgctgtgggggtcctggggccggcgaggccccttcagtcttgttctggggggacggcccactccggggagggggtgtgctgtgctgagcgctgtatccctgaatatagtttattttttctacatttgaattctgttgtagatttatgtaaaaatacattctttttgaaaataaaaattttcatgtcttctaaaaaaaaaaaa

SEQ ID NO: 557736 - DNA, 3167 bp, Homo sapiens; identical to SEQ ID NO: 557735
  misc_feature (16)..(16): n is a, c, g, or t

SEQ ID NO: 557737 - DNA, 705 bp, Homo sapiens
gcttggacattctagacttaaaaattaaccttgaaagcccagcatatctaatcatttctagcatgtggagaactgaagatgattcttttagccagaaatttcagttatctcagtgttatgcaagttccctatctgatcttcctcttttgcttgccttactcttgtgagacaactattaggtgtgttttaaatgggttgtcccaaaggagaagagactttcctgttctcagccctctcaagataagcagaactgagattaggaaaaaagcaactgagccagagccaattttcacaggaatttaaaaatatcagtgtgaaaacaaaatgagcagtgaagcctagctatttaaagggcatgcaaaagagaagttggaaaaggaacatgagctggcagctaactggacgagtgtggtgactaattagtttcctatgatgtaaacatatttggtattttatgtcatttattttaattttttttgaccatgactcgcaataagaaataaatattattggatgacccactgtccactttatataatactaaaatgaaaatactttcttccctttaccacctataccttctcttctgtttgtattttaaagtactggtagcaaacatcctgttaactgcatttcattatctactaatgggtcagaccaagatttaaaaaccacagtgccctgtgaacagtgagatttacatgg

SEQ ID NO: 557738 - DNA, 3095 bp, Homo sapiens
  misc_feature (16)..(16): n is a, c, g, or t
agcgtggccgcctggngcccgcccgagctgccgccttgtcgagctgagtccgcgctcccgcccaggcggcggccgacgcgacgccccgagcgcccggccccgccgccgcggcccggcagactgcctctgtcaccgggtccctccacccttgtctcctgtgcggccagcgtcagagccatggcgacggaggagaagaagcccgagaccgaggccgccagagcacagccaaccccttcgtcatccgccactcagagcaagcctacacctgtgaagccaaactatgctctaaagttcacccttgctggccacaccaaagcagtgtcctccgtgaaattcagcccgaatggagagtggctggcaagttcatctgctgataaacttattaaaatttggggcgcgtatgatgggaaatttgagaaaaccatatgacaaaaccttgaagatatgggacgtgagctcgggcaagtgtctgaaaaccctgaagggacacagtaattatgtcttttgctgcaacttcaatccccagtccaaccttattgtctcaggatcctttgacgaaagcgtgaggatatgggatgtgaaaacagggaagtgcctcaagactttgccagctcactcggatccagtctcggccgttcattttaatcgtgatggatccttgatagtttcaagtagctatgatggtctctgtcgcatctgggacaccgcctcaggccagtgcctgaagacgctcatcgatgacgacaacccccccgtgtcttttgtgaagttctccccgaacggcaaatacatcctggccgccacgctggacaacactctgaagctctgggactacagcaagggaagtgcctgaagacgtacactggccacaagaatgagaaatactgcatatttgccaatttctctgttactggtgggaagtggattgtgtctggctcagaggataaccttgtttacatctggaaccttcagacgaaagagattgtacagaaactacaaggccacacagatgtcgtgatctcaacagcttgtcacccaacagaaaacatcatcgcctctgctgcgctagaaaatgacaaaacaattaaactgtggaagagtgactgctaagtccctttgctcctgcccgcgagagactgtcgggaagttgacccggattggcaagaaacagggtgtcttggaggtggtcccccagatctgcgcctgggggtcaggacagggcctgatttgagcctcctctctgaagatgatttggccgagcggaaggtgtggaccaccggaaagttcttaaaagttgctggtgacatttcttgccaattctaacactgtctagggaagagttcctagtctattgtgttcaaacagagtcaacaaaagtttttaattttttattacagaagggtgaagttcaatttaacatgcgttgtgttttttcagtaaacgttctgtatctttttgatattccatgacccagtgcacgctgtggcctgtcaccgccaccgtggccccgccagctggcctcccctttggcccacgccggccgcccccattctctgctgcgtagatgccctggcccagggccctgactcctccattcccgccagtagctgttcctagtgtattttcgtctttctggaaaacagcattgagtggttgttttctgtgtaaagagccgtttgtgtcttgggagtttgtggcccacatgccgatagcacggtcatcgcacatgactctcccgtttgtctcagtgtccctgcaacaagcagcaccgcagactgtaataaaaggtggggttttgtgaatggttgtggcaagtgcgtccttgtgaagctcgtctccatgtggctttcttggagaaaggctcccctggggcaagagggtggaaggtttctttggacaggaggtgctgaggctggctgcacctgctctctgaagacgccttcctctctaggttcattgttcagtgttgctggaggcggggaacgggggtggggaggttcttagttgcgaaggagccaagctcctgatggacttgcgttgggatgtgggggacacctgtggcatggtaaggctccctgagtcccttactccaggtcagatgccagtgggactcatgcgccctatgagggctgcagggccagtgctgcccctcggactcctcgaggggttgggtgctaagcgcgagcctcgccgtccctgctggagccctcgcctgcctgcccctctgcctgtgctcctggcactgtggcttcccggtgctcacctgcacagcagttaacagcagaggccgagcgggagcctctggggagcgaggctgaaacctgaacctgcccatggagacagttgtggtgagggttgccacacacagtgagggcggagcagggtggctgagggcacaggtgcctgggtctgtcccacggggcagggctttggggctgtgatgctctgggaagccagcttgggtcctgggtctacagagggccctggccccggagcccagccagctctgcctctctcagggcctggagtcctgggggagctcagccagctctgcctttctcagggcctggagtcctggatgaatcctgcaggtttttggttgcaccggcccagggaggaagcggggggtttgtcaggtgggctctcctggaggtcctcgagtggcaggggtgaggaggggattatctgaggcatctggagatgtatatcctgtggtttcccctgcccctctgtttccgatgaggtgtacggatgagtgacctgcactaagaagtgagttgccacagtgaaaatgggttggtttttgtcttcgacgctcagggtctgggcgcctcgcatttgcagtctgttgtgacagacacggggagctccgcgtgccagcctgtggctgccctgctgtgggggtcctggggccggcgaggccccttcagtcttgttctggggggacggcccactccggggagggggtgtgctgtgctgagcgctgtatccctgaatatagtttattttttctacatttgaattctgttgtagatttatgtaaaaatacattctttttgaaaataaaaattttcatgtcttctaaaaaaaaaaaa

SEQ ID NO: 557739 - DNA, 3343 bp, Homo sapiens
cggaatgcggtcaccagctccggtaaccgttggttcctgggcattgccccggccaattcggctgcctccacgtttcccgaatcaactgccatcggaattccgctgcccccaaagctctggactggccatgaaggggccaagtgctttccgggctgcctgcttcgaggacaccagcactcctgccacgggccattcgtccatcgcatgccagtggccctccctcctcagggttcggcagtccactccaaggctctaagaagtgaagcaggcggcgagaatgtgcagtcgttgaggccagaggaccgggcctcagcttctccttaagcccctgagtcctcctctggggaccacccccttgtacctggaggtgaaaatgcccgcccaggagggaagggctggcccccggagagcccgctgcgaagtgagtttgcgcactgcggagcgggcgcgggtgactccagagcggccctgccagtccgcggggctggcggggagcaggttcgtgcaccgcgggctctgtgcatgcagaggcgggaagagcccccagcccggcagccggccccgcgggaaggcgcagcccgggcttccgaaccctgtgaacgcgcaggttcctggtcttccagatgggcaggaatcgtcctgcccgcccggggtgggaggccacatgggggcactgcgcccgggcgcggccccaggtgctttccaaatgcccactgccgctctcatccgtaccagcgatgatcaagaaggggcctggtcgcccggggaggtgccccggcccgaatcgactccggagacaacgccgggcgacgccacctgcgcaggtcccggaggccgctggtgtctgtgtacagggcgtgctgtctgtggaaacgcgagggcacactagcactttccagactgcctctgtcaccgggtccctccacccttgtctcctgtgcggccagcgtcagagccatggcgacggaggagaagaagcccgagaccgaggccgccagagcacagccaaccccttcgtcatccgccactcagagcaagcctacacctgtgaagccaaactatgctctaaagttcacccttgctggccacaccaaagcagtgtcctccgtgaaattcagcccgaatggagagtggctggcaagttcatctgctgataaacttattaaaatttggggcgcgtatgatgggaaatttgagaaaaccatatctggaaccttcagacgaaagagattgtacagaaactacaaggccacacagatgtcgtgatctcaacagcttgtcacccaacagaaaacatcatcgcctctgctgcgctagaaaatgacaaaacaattaaactgtggaagagtgactgctaagtccctttgctcctgcccgcgagagactgtcgggaagttgacccggattggcaagaaacagggtgtcttggaggtggtcccccagatctgcgcctgggggtcaggacagggcctgatttgagcctcctctctgaagatgatttggccgagcggaaggtgtggaccaccggaaagttcttaaaagttgctggtgacatttcttgccaattctaacactgtctagggaagagttcctagtctattgtgttcaaacagagtcaacaaaagtttttaattttttattacagaagggtgaagttcaatttaacatgcgttgtgttttttcagtaaacgttctgtatctttttgatattccatgacccagtgcacgctgtggcctgtcaccgccaccgtggccccgccagctggcctcccctttggcccacgccggccgcccccattctctgctgcgtagatgccctggcccagggccctgactcctccattcccgccagtagctgttcctagtgtattttcgtctttctggaaaacagcattgagtggttgttttctgtgtaaagagccgtttgtgtcttgggagtttgtggcccacatgccgatagcacggtcatcgcacatgactctcccgtttgtctcagtgtccctgcaacaagcagcaccgcagactgtaataaaaggtggggttttgtgaatggttgtggcaagtgcgtccttgtgaagctcgtctccatgtggctttcttggagaaaggctcccctggggcaagagggtggaaggtttctttggacaggaggtgctgaggctggctgcacctgctctctgaagacgccttcctctctaggttcattgttcagtgttgctggaggcggggaacgggggtggggaggttcttagttgcgaaggagccaagctcctgatggacttgcgttgggatgtgggggacacctgtggcatggtaaggctccctgagtcccttactccaggtcagatgccagtgggactcatgcgccctatgagggctgcagggccagtgctgcccctcggactcctcgaggggttgggtgctaagcgcgagcctcgccgtccctgctggagccctcgcctgcctgcccctctgcctgtgctcctggcactgtggcttcccggtgctcacctgcacagcagttaacagcagaggccgagcgggagcctctggggagcgaggctgaaacctgaacctgcccatggagacagttgtggtgagggttgccacacacagtgagggcggagcagggtggctgagggcacaggtgcctgggtctgtcccacggggcagggctttggggctgtgatgctctgggaagccagcttgggtcctgggtctacagagggccctggccccggagcccagccagctctgcctctctcagggcctggagtcctgggggagctcagccagctctgcctttctcagggcctggagtcctggatgaatcctgcaggtttttggttgcaccggcccagggaggaagcggggggtttgtcaggtgggctctcctggaggtcctcgagtggcaggggtgaggaggggattatctgaggcatctggagatgtatatcctgtggtttcccctgcccctctgtttccgatgaggtgtacggatgagtgacctgcactaagaagtgagttgccacagtgaaaatgggttggtttttgtcttcgacgctcagggtctgggcgcctcgcatttgcagtctgttgtgacagacacggggagctccgcgtgccagcctgtggctgccctgctgtgggggtcctggggccggcgaggccccttcagtcttgttctggggggacggcccactccggggagggggtgtgctgtgctgagcgctgtatccctgaatatagtttattttttctacatttgaattctgttgtagatttatgtaaaaatacattctttttgaaaataaaaattttcatgtcttctaaaaaaaaaaaa

SEQ ID NO: 557740 - DNA, 259 bp, Homo sapiens
aacagtgtttaatggacaagcatatgtttatctcagtgaatgttccatgtgcatttggaaaaaaagtattattgctgctgttggtgtaatgttttactacaatgtcaattgggtctatttgggttgatagtgttcatgtttttaaatatccttataaattttactgtctacttgttctattgctgagaggaggcctattgaagtctccaattataatttgggattactgttttacttttacagatgtttttcctttata

SEQ ID NO: 557741 - DNA, 2078 bp, Homo sapiens
  misc_feature (16)..(16): n is a, c, g, or t
agcgtggccgcctggngcccgcccgagctgccgccttgtcgagctgagtccgcgctcccgcccaggcggcggccgacgcgacgccccgagcgcccggccccgccgccgcggcccggcagactgcctctgtcaccgggtccctccacccttgtctcctgtgcggccagcgtcagagccatggcgacggaggagaagaagcccgagaccgaggccgccagagcacagccaaccccttcgtcatccgccactcagagcaagcctacacctgtgaagccaaactatgctctaaagttcacccttgctggccacaccaaagcagtgtcctccgtgaaattcagcccgaatggagagtggctggcaagttcatctgctgataaacttattaaaatttggggcgcgtatgatgggaaatttgagaaaaccatatctggtcacaagctgggaatatccgatgtagcctggtcgtcagattctaaccttcttgtttctgcctcagatgacaaaaccttgaagatatgggacgtgagctcgggcaagtgtctgaaaaccctgaagggacacagtaattatgtcttttgctgcaacttcaatccccagtccaaccttattgtctcaggatcctttgacgaaagcgtgaggatatgggatgtgaaaacagggaagtgcctcaagactttgccagctcactcggatccagtctcggccgttcattttaatcgtgatggatccttgatagtttcaagtagctatgatggtctctgtcgcatctgggacaccgcctcaggccagtgcctgaagacgctcatcgatgacgacaacccccccgtgtcttttgtgaagttctccccgaacggcaaatacatcctggccgccacgctggacaacactctgaagctctgggactacagcaaggggaagtgcctgaagacgtacactggccacaagaatgagaaatactgcatatttgccaatttctctgttactggtgggaagtggattgtgtctggctcagaggataaccttgtttacatctggaaccttcagacgaaagagattgtacagaaactacaaggccacacagatgtcgtgatctcaacagcttgtcacccaacagaaaacatcatcgcctctgctgcgctagaaaatgacaaaacaattaaactgtggaagagtgactgctaagtccctttgctcctgcccgcgagagactgtcgggaagttgacccggattggcaagaaacagggtgtcttggaggtggtcccccagatctgcgcctgggggtcaggacagggcctgatttgagcctcctctctgaagatgatttggccgagcggaaggtgtggaccaccggaaagttcttaaaagttgctggtgacatttcttgccaattctaacactgtctagggaagagttcctagtctattgtgttcaaacagagtcaacaaaagtttttaattttttattacagaagggtgaagttcaatttaacatgcgttgtgttttttcagtaaacgttctgtatctttttgatattccatgacccagtgcacgctgtggcctgtcaccgccaccgtggccccgccagctggcctcccctttggcccacgccggccgcccccattctctgctgcgtagatgccctggcccagggccctgactcctccattcccgccagtagctgttcctagtgtattttcgtctttctggaaaacagcattgagtggttgttttctgtgtaaagagccgtttgtgtcttgggagtttgtggcccacatgccgatagcacggtcatcgcacatgactctcccgtttgtctcagtgtccctgcaacaagcagcaccgcagactgtaataaaaggtggggtttgtgaaaaaaaaaacacagtaactgggtattaaatatagtagtgatacatcgaagtattaaaaagagggggggggcttattaattggggggagatactacgcacttttttaaggggccaaggagtattaaaaggggggtaaaagggggaaagaatgttgttggaaccattttgtgttgcccccaaatgaggatattggtgagttggatgat

SEQ ID NO: 557742 - DNA, 318 bp, Homo sapiens
  misc_feature (318)..(318): n is a, c, g, or t
tagagcaccgcggtcatttctctgtagtaagcaaattagaaaccagctgcccatcttccataaacagtaagattaggcagatgatgaaactaacatggcaaatgtatgatgctaagccaacagtatacaaaagagatccctgtgagtactggagcagaggaccccatctttgggagtgtgccagtggggattccctagacagcacaggaaagtaaaggagaatcttagagtttccttgcaccgtataactcccaggcaccctagcccgatcgccgagaaggcaaccatggaagctgaattagcaaagaaggtcataan

SEQ ID NO: 557743 - DNA, 111 bp, Homo sapiens
atgctcgatcgttacagcaagcttgcggggtaacctgagccccccatctctccttcctcaaccactggacgtttatatattataggcaggtatgaaatgggcacctagtca

SEQ ID NO: 557744 - DNA, 1946 bp, Homo sapiens
  misc_feature (16)..(16): n is a, c, g, or t
  misc_feature (1846)..(1846): n is a, c, g, or t
agcgtggccgcctggngcccgcccgagctgccgccttgtcgagctgagtccgcgctcccgcccaggcggcggccgacgcgacgccccgagcgcccggccccgccgccgcggcccggcagactgcctctgtcaccgggtccctccacccttgtctcctgtgcggccagcgtcagagccatggcgacggaggagaagaagcccgagaccgaggccgccagagcacagccaaccccttcgtcatccgccactcagagcaagcctacacctgtgaagccaaactatgctctaaagttcacccttgctggccacaccaaagcagtgtcctccgtgaaattcagcccgaatggagagtggctggcaagttcatctgctgataaacttattaaaatttggggcgcgtatgatgggaaatttgagaaaaccatatctggtcacaagctgggaatatccgatgtagcctggtcgtcagattctaaccttcttgtttctgcctcagatgacaaaaccttgaagatatgggacgtgagctcgggcaagtgtctgaaaaccctgaagggacacagtaattatgtcttttgctgcaacttcaatccccagtccaaccttattgtctcaggatcctttgacgaaagcgtgaggatatgggatgtgaaaacagggaagtgcctcaagactttgccagctcactcggatccagtctcggccgttcattttaatcgtgatggatccttgatagtttcaagtagctatgatggtctctgtcgcatctgggacaccgcctcaggccagtgcctgaagacgctcatcgatgacgacaacccccccgtgtcttttgtgaagttctccccgaacggcaaatacatcctggccgccacgctggacaacactctgaagctctgggactacagcaaggggaagtgcctgaagacgtacactggccacaagaatgagaaatactgcatatttgccaatttctctgttactggtgggaagtggattgtgtctggctcagaggataaccttgtttacatctggaaccttcagacgaaagagattgtacagaaactacaaggccacacagatgtcgtgatctcaacagcttgtcacccaacagaaaacatcatcgcctctgctgcgctagaaaatgacaaaacaattaaactgtggaagagtgactgctaagtccctttgctcctgcccgcgagagactgtcgggaagttgacccggattggcaagaaacagggtgtcttggaggtggtcccccagatctgcgcctgggggtcaggacagggcctgatttgagcctcctctctgaagatgatttggccgagcggaaggtgtggaccaccggaaagttcttaaaagttgctggtgacatttcttgccaattctaacactgtctagggaagagttcctagtctattgtgttcaaacagagtcaacaaaagtttttaattttttattacagaagggtgaagttcaatttaacatgcgttgtgttttttcagtaaacgttctgtatctttttgatattccatgacccagtgcacgctgtggcctgtcaccgccaccgtggccccgccagctggcctcccctggtctggttttgctgagtgcgtctccgtggggctgttcagcatcttcctgtctcctgtgttccctgtaacctggcagtggggtctatctgtgtcatttaggaaaacaagctgtgtggcacatcctggcacatcctgctcttcagcccatgaaggaagctctcaaaacactgcggtggggtaaggtgttggcagtgtggattcaccgtcccagcaaggagctaccttagggtcaaggatgagttctganaaataggagaaaagaaagactcagtgaagaggagaatcaggtatggttacccagaggaagggcagaggatgctgaatcccagtagagtgatgcccgctcc

SEQ ID NO: 557745 - DNA, 1736 bp, Homo sapiens
  misc_feature (16)..(16): n is a, c, g, or t
  misc_feature (1599)..(1599): n is a, c, g, or t
  misc_feature (1620)..(1620): n is a, c, g, or t
  misc_feature (1665)..(1665): n is a, c, g, or t
  misc_feature (1725)..(1725): n is a, c, g, or t
agcgtggccgcctggngcccgcccgagctgccgccttgtcgagctgagtccgcgctcccgcccaggcggcggccgacgcgacgccccgagcgcccggccccgccgccgcggcccggcagactgcctctgtcaccgggtccctccacccttgtctcctgtgcggccagcgtcagagccatggcgacggaggagaagaagcccgagaccgaggccgccagagcacagccaaccccttcgtcatccgccactcagagcaagcctacacctgtgaagccaaactatgctctaaagttcacccttgctggccacaccaaagcagtgtcctccgtgaaattcagcccgaatggagagtggctggcaagttcatctgctgataaacttattaaaatttggggcgcgtatgatgggaaatttgagaaaaccatatctggtcacaagctgggaatatccgatgtagcctggtcgtcagattctaaccttcttgtttctgcctcagatgacaaaaccttgaagatatgggacgtgagctcgggcaagtgtctgaaaaccctgaagggacacagtaattatgtcttttgctgcaacttcaatccccagtccaaccttattgtctcaggatcctttgacgaaagcgtgaggatatgggatgtgaaaacagggaagtgcctcaagactttgccagctcactcggatccagtctcggccgttcattttaatcgtgatggatccttgatagtttcaagtagctatgatggtctctgtcgcatctgggacaccgcctcaggccagtgcctgaagacgctcatcgatgacgacaacccccccgtgtcttttgtgaagttctccccgaacggcaaatacatcctggccgccacgctggacaacactctgaagctctgggactacagcaagggaagtgcctgaagacgtacactggccacaagaatgagaaatactgcatatttgccaatttctctgttactggtgggaagtggattgtgtctggctcagaggataaccttgtttacatctggaaccttcagacgaaagagattgtacagaaactacaaggccacacagatgtcgtgatctcaacagcttgtcacccaacagaaaacatcatcgcctctgctgcgctagaaaatgacaaaacaattaaactgtggaagagtgactgctaagtccctttgctcctgcccgcgagagactgtcgggaagttgacccggattggcaagaaacagggtgtcttggaggtggtcccccagatctgcgcctgggggtcaggacagggcctgatttgagcctcctctctgaagatgatttggccgagcggaaggtgtggaccaccggaaagttcttaaaagttgctggtgacatttcttgccaattctaacactgtctagggaagagttcctagtctattgtgttcaaacagagtcaacaaaagtttttaattttttattacagaagggtgaagttcaatttaacatgcgttgtgttttttcagtaaacgttctgtatctttttgatattccatgacccagtgcacgctgtggcctgtcaccgccaccgtggccccgccagctggcctccccccncgcccaccccccccccccccncccccccccccgcagaccccccggcccaggcccccgacccccccnccccccccactacccccccccaccccactcccccccccccccaaaacaccaccaaccccnccccccccgag

SEQ ID NO: 557746 - DNA, 641 bp, Homo sapiens
  misc_feature (142)..(142): n is a, c, g, or t
  misc_feature (178)..(178): n is a, c, g, or t
  misc_feature (484)..(484): n is a, c, g, or t
  misc_feature (491)..(491): n is a, c, g, or t
  misc_feature (515)..(516): n is a, c, g, or t
  misc_feature (571)..(571): n is a, c, g, or t
gcggagacggtgatcgcacctggggccgcctaacagatggacccccgattgaagccgtggaacggctcacaccggcacgtgctgcacctgcccaccgtcttccatcacctgccacacctgctggccaaggagagcagtctgnagcccgcggtgcgcgtgggccaggccgcaccggagntgtcggtggttgatgggcatcccgaagcgtgcgtgcagcgagtgttgctacctcgctactctgtacttgatcagctctgtcatctcgctctatctccgatgcttgagtccacgcatggtagtaaggatggagctcggtcactcgtgggtgctgatcgtcgcgagacatgatctcacagtatcacttcggcatgtgacagagaacatcaaggccttgttccccacggagatccattctgggctcctggaggtcatctcaccctccccccacttctaccctgacttctcccgcctccgagagtccttnggggacnccaaggagagagtcaggtggaggnncaaacagaacctcgattactgcttcctcatatgtacgcgcagtcaaagcatctanacgtgcagctggagatgacatcgtggccaagcccaactacctgagcaccatgaagaactttgcactgcag

SEQ ID NO: 557747 - DNA, 179 bp, Homo sapiens
  misc_feature (145)..(145): n is a, c, g, or t
  misc_feature (155)..(155): n is a, c, g, or t
ctccattccattccattcctttctttccacaggatttcactctgtcacagaagctggagtgcagtatcacaatctcagctcacatttcttttcaccattccatagtattccattccatcccattccattccactctatttcattncactacactncactccactccattccgttccact

SEQ ID NO: 557748 - DNA, 289 bp, Homo sapiens
gatctagaggtccggtggaattcctatatatctagaaaggctaggtgggcaagtttcctcgggccttatgcaactacttgtggtggaaaagagataaggggacttaacaaactttccttggtcacacagaccatggggcaatatctcctagggtttatagtcagactagtcttaatggaagttttaataccggcttggtcattagcaatcggtgtaacctaagtaagacaattgactttggtgctccagttttcggatcggtaagataagcgcttccattagattattg

SEQ ID NO: 557749 - DNA, 214 bp, Homo sapiens
tgatagaacgtattgatgatcaatgagcatcaactgggccatttctgcctgacacggtgaacgatcatcaacctcctccacctccatcggttggtcttggagtctgggtttcctcacgcatcttggctaattgaccgcacagtaccatcggtacagccaaatcgttacgcttaatacactgtcccactcagataccgagtctcaaattcgttaa

SEQ ID NO: 557750 - DNA, 588 bp, Homo sapiens
  misc_feature (12)..(12): n is a, c, g, or t
  misc_feature (440)..(441): n is a, c, g, or t
  misc_feature (451)..(451): n is a, c, g, or t
  misc_feature (470)..(471): n is a, c, g, or t
  misc_feature (492)..(492): n is a, c, g, or t
  misc_feature (505)..(505): n is a, c, g, or t
  misc_feature (561)..(561): n is a, c, g, or t
  misc_feature (586)..(586): n is a, c, g, or t
acggatagcggntctgcacgtgtgtgcatgtccagacagcatatctgtgcacatgtgtgtgtccaggcaatatctgcacgtgtgtgagtgttgaggcagcattatctgtgtgtgtgtccaggcagcatatctgcgtgcgtgtgtgtgtccggacagcatatctgtgcatgcgtgtgtgtgtccggacagcatgtctgcgtgtgtgtgtgactagacagcatatctgcgtgtgtccaggcagcatatctgcgcctgtgcacgtgtgtctggaagtgtgtgtccaggcagcatatctgcatgtgtgtgcctgtccagacagcatatctgtgcacgcgtgtgtgtgtgtgtccaggcaatatccggcatgtgtgtgtcaaggcagcattatctgtgtgtcaggcagcatattggcacgtgtgtgtccggataccatattgcanntgtgtgcgtncaacagaatcctgtgtgtnntgtgtgtccagcagacattcnatggtgttcctgngtatgttaagcacatgtcttggatgtctggatgcttgtcgtgtgctgctttggcantatttggtccagcggatattgtctntc

SEQ ID NO: 557751 - DNA, 220 bp, Homo sapiens
gtcgacttttttttgaattttaaagatcagatttatttggagaaagcaaaaaacccccaacccaaagatgggattttacatctaagacatctccaagattacaatctacagattacaaatcccggattacaatctacagattacatcccactcctgaatacatgtaaaatgtatacaaaaatatcttctatgaaaatggtttgtaatctggtcgacgcgg

SEQ ID NO: 557752 - DNA, 338 bp, Homo sapiens
agtgatacctttacagtacagcagagggggacttatatggcagctccataatcacattgaatactacacaaccacccagtatcatgcccatagaaaaggagagggatctgggcgcccacacagaggtgaaatgatgcccaaggtcacatatctagaaaaaagaagagccagtataagagccgggtcatctcacccaaagcctgtggccataatcacctccagtcagaagattatctgccacccccagccctcctctcctcaccacccagttactcttcgctgcgtgtgggatcattcgcttggacagcctgaggagaggtgcactcttctagagtcga

SEQ ID NO: 557753 - DNA, 111 bp, Homo sapiens
cccccccccctggggggcttgggcaaaggttttttttggggaaggcttaatgtagaagacccggaggatctaaaaaatgaagaaatggatctcgaagagcaagagggctat

SEQ ID NO: 557754 - DNA, 1683 bp, Homo sapiens
gcggctccaggcagagggccacggcccacccacacgccacctctagccccgccccgcggccccttcacccggtgggcgggtgggcgggtcatcgccatgcgcgcgccttgccattggcccgcgccggtggaggcgggcctgctcacgtctgccgggccctctgttagtcgtttggcagcggatagaggacacgaccaagatggcggcggtgtctggcttggtgcggagaccccttcgggaggtctccgggctgctgaagaggcgctttcactggaccgcgccggctgcgctgcaggtgacagttcgtgatgctataaatcagggtatggatgaggagctggaaagagatgagaaggtatttctgcttggagaagaagttgcccagtatgatggggcatacaaggttagtcgagggctgtggaagaaatatggagacaagaggattattgacactcccatatcagagatgggctttgctggaattgctgtaggtgcagctatggctgggttgcggcccatttgtgaatttatgaccttcaatttctccatgcaagccattgaccaggttataaactcagctgccaagacctactacatgtctggtggccttcagcctgtgcctatagtcttcagggggcccaatggtgcctcagcaggtgtagctgcccagcactcacagtgctttgctgcctggtatgggcactgcccaggcttaaaggtggtcagtccctggaattcagaggatgctaaaggacttattaaatcagccattcgggataacaatccagtggtggtgctagagaatgaattgatgtatggggttccttttgaatttcctccggaagctcagtcaaaagattttctgattcctattggaaaagccaaaatagaaaggcaaggaacacatataactgtggtttcccattcaagacctgtgggccactgcttagaagctgcagcagtgctatctaaagaaggagttgaatgtgaggtgataaatatgcgtaccattagaccaatggacatggaaaccatagaagccagtgtcatgaagacaaatcatcttgtaactgtggaaggaggctggccacagtttggagtaggagctgaaatctgtgccaggatcatggaaggtcctgcgttcaatttcctggatgctcctgctgttcgtgtcactggtgctgatgtccctatgccttatgcaaagattctagaggacaactctatacctcaggtcaaagacatcatatttgcaataaagaaaacattaaatatttagtttggacttgaatatcaagtcgttgaaatttatttgaaatacttgctggcactgcacctggatttgtactgcaagacctgactattcataacggaaaacgatttctaaagcaacagcaggtatttttgtacagggaagtttaaatgtgtttgtgtatggaaaactctccactctcctcccctagatgccatgcttccttttgtctgttacggttgccatgttctttgaataacaaattatataacattttatcctctctcaccacaaggacaaagtatggatgtggcagagtcctgatgaaagatgtatccaaacaagataacttatatgtataaaattaaagcatataatatacatttactgttagtttgttttgataaggaataaaggaatttctaacatga

SEQ ID NO: 557755 - DNA, 248 bp, Homo sapiens
aaagggagccaagacgaacgtggttgatccattttctaagaaagcattggtcatgcatgtgcacacagccacctgctcatgttccacatcatcacagcacacatcattggcacaagcacgctccgtcacccaggcacccaaggcaacccaacacattgccatctgcatggtctccaagggtcgtgatgtttgcacagtgcagtcttgctgcatttgccagcacatgcatgcacagttgccatttcagc

SEQ ID NO: 557756 - DNA, 903 bp, Homo sapiens
ggtacccgggacccggtgtctgctcctgtcgtcttcctggctcctgaatccctagtccactatagcgggtgaggtgcatctccatccacgtaggccaggctggtgtccagattggacaagtgcctcgtgcctagggagctctagtgcctggaacacggtatccatgccgatggggtcaggatggccgagatgtggatcgaaaggaccatggggggagtgatgatgactccctttcggaaactagcctgtcttcaggtgaagataggggcgtctggacaaagacgacgtgggccgcggggctagttgttcgttaggactatggaaactcgcacaggatacatatgatgtaaggttactgtcagctggacttagcataccgcacagacatctatccagcgccgtgagcagcctcatcataggcagagggaagatgctgcccaaataactatgcccggatggtgcaactacaccattgcgccaggagatcattgaccttgatgtttggaggaccgaattcagcgagctggctgaacagtgctaccggtcgttcagggcttcttggttacaccacagctaaggtagggggaactggttctgggtacacctccgctgcttcatggaacgtctctcagggagtatggcgatgaaaatccaagctggagtggctccatttagccggcaccccgaggtgatacaccaggctgtagttgagcccctagcaaatccggtccatcaacgacaccagagcaaactctggagcactctgattggtgccttcatggtagaacaatgaggccatctatgacatctgtcgagaaacctcgaatatcgagcgccccacctacataacttaaccggcttatagcaagatggtgtcctccatcatggtccctgaattgtggg

SEQ ID NO: 557757 - DNA, 1639 bp, Homo sapiens
gcggctccaggcagagggccacggcccacccacacgccacctctagccccgccccgcggccccttcacccggtgggcgggtgggcgggtcatcgccatgcgcgcgccttgccattggcccgcgccggtggaggcgggcctgctcacgtctgccgggccctctgttagtcgtttggcagcggatagaggacacgaccaagatggcggcggtgtctggcttggtgcggagaccccttcgggaggtctccgggctgctgaagaggcgctttcactggaccgcgccggctgcgctgcaggtgacagttcgtgatgctataaatcagggtatggatgaggagctggaaagagatgagaaggtatttctgcttggagaagaagttgcccagtatgatggggcatacaaggttagtcgagggctgtggaagaaatatggagacaagaggattattgacactcccatatcagagatgggctttgctggaattgctgtaggtgcagctatggctgggttgcggcccatttgtgaatttatgaccttcaatttctccatgcaagccattgaccaggttataaactcagctgccaagacctactacatgtctggtggccttcagcctgtgcctatagtcttcagggggcccaatggtgcctcagcaggtgtagctgcccagcactcacagtgctttgctgcctggtatgggcactgcccaggcttaaaggtggtcagtccctggaattcagaggatgctaaaggacttattaaatcagccattcgggataacaatccagtggtggtgctagagaatgaattgatgtatggggttccttttgaatttcctccggaagctcagtcaaaagattttctgattcctattggaaaagccaaaatagaaaggcaaggaacacatataactgtggtttcccattcaagacctgtgggccactgcttagaagctgcagcagtgctatctaaagaaggagttgaatgtgaggtgataaatatgcgtaccattagaccaatggacatggaaaccatagaagccagtgtcatgaagacaaatcatcttgtaactgtggaaggaggctggccacagtttggagtaggagctgaaatctgtgccaggatcatggaaggtcctgcgttcaatttcctggatgctcctgctgttcgtgtcactggtgctgatgtccctatgccttatgcaaagattctagaggacaactctatacctcaggtcaaagacatcatatttgcaataaagaaaacattaaatatttagtttggacttgaatatcaagtcgttgaaatttatttgaaatacttgctggcactgcacctggatttgtactgcaagacctgactattcataacggaaaacgatttctaaagcaacagcaggtatttttgtacagggaagtttaaatgtgtttgtgtatggaaaactctccactctcctcccctagatgccatgcttccttttgtctgttacggttgccatgttctttgaataacaaattatataacattttatcctctctcaccacaaggacaaagtatggatgtggcagagtcctgatgaaagatgtatccaaacaagataacttatatgtataaaattaaagcatataatatacattta

SEQ ID NO: 557758 - DNA, 170 bp, Homo sapiens
actgtggaacaaggctaatgtggactcaatgcggacatcccacgttgtggcttctcaaagtgctagaaattatatggcatgagccacgtgcccccagacacaagcgtgacttcttgaagctcttaactaacattaggcaccctcaaaaccattccttctcccgcttgagt

SEQ ID NO: 557759 - DNA, 1630 bp, Homo sapiens
gcggctccaggcagagggccacggcccacccacacgccacctctagccccgccccgcggccccttcacccggtgggcgggtgggcgggtcatcgccatgcgcgcgccttgccattggcccgcgccggtggaggcgggcctgctcacgtctgccgggccctctgttagtcgtttggcagcggatagaggacacgaccaagatggcggcggtgtctggcttggtgcggagaccccttcgggaaggtgacagttcgtgatgctataaatcagggtatggatgaggagctggaaagagatgagaaggtatttctgcttggagaagaagttgcccagtatgatggggcatacaaggttagtcgagggctgtggaagaaatatggagacaagaggattattgacactcccatatcagagatgggctttgctggaattgctgtaggtgcagctatggctgggttgcggcccatttgtgaatttatgaccttcaatttctccatgcaagccattgaccaggttataaactcagctgccaagacctactacatgtctggtggccttcagcctgtgcctatagtcttcagggggcccaatggtgcctcagcaggtgtagctgcccagcactcacagtgctttgctgcctggtatgggcactgcccaggcttaaaggtggtcagtccctggaattcagaggatgctaaaggacttattaaatcagccattcgggataacaatccagtggtggtgctagagaatgaattgatgtatggggttccttttgaatttcctccggaagctcagtcaaaagattttctgattcctattggaaaagccaaaatagaaaggcaaggaacacatataactgtggtttcccattcaagacctgtgggccactgcttagaagctgcagcagtgctatctaaagaaggagttgaatgtgaggtgataaatatgcgtaccattagaccaatggacatggaaaccatagaagccagtgtcatgaagacaaatcatcttgtaactgtggaaggaggctggccacagtttggagtaggagctgaaatctgtgccaggatcatggaaggtcctgcgttcaatttcctggatgctcctgctgttcgtgtcactggtgctgatgtccctatgccttatgcaaagattctagaggacaactctatacctcaggtcaaagacatcatatttgcaataaagaaaacattaaatatttagtttggacttgaatatcaagtcgttgaaatttatttgaaatacttgctggcactgcacctggatttgtactgcaagacctgactattcataacggaaaacgatttctaaagcaacagcaggtatttttgtacagggaagtttaaatgtgtttgtgtatggaaaactctccactctcctcccctagatgccatgcttccttttgtctgttacggttgccatgttctttgaataacaaattatataacattttatcctctctcaccacaaggacaaagtatggatgtggcagagtcctgatgaaagatgtatccaaacaagataacttatatgtataaaattaaagcatataatatacatttactgttagtttgttttgataaggaataaaggaatttctaacatga

SEQ ID NO: 557760 - DNA, 1078 bp, Homo sapiens
  misc_feature (920)..(920): n is a, c, g, or t
gcggctccaggcagagggccacggcccacccacacgccacctctagccccgccccgcggccccttcacccggtgggcgggtgggcgggtcatcgccatgcgcgcgccttgccattggcccgcgccggtggaggcgggcctgctcacgtctgccgggccctctgttagtcgtttggcagcggatagaggacacgaccaagatggcggcggtgtctggcttggtgcggagaccccttcgggaggtctccgggctgctgaagaggcgctttcactggaccgcgccggctgcgctgcaggtgacagttcgtgatgctataaatcagggtatggatgaggagctggaaagagatgagaaggtatttctgcttggagaagaagttgcccagtatgatggggcatacaaggttagtcgagggctgtggaagaaatatggagacaagaggattattgacactcccatatcagagatgggctttgctggaattgctgtaggtgcagctatggctgggttgcggcccatttgtgaatttatgaccttcaatttctccatgcaagccattgaccaggttataaactcagctgccaagacctactacatgtctggtggccttcagcctgtgcctatagtcttcagggggcccaatggtgcctcagcaggtgtagctgcccagcactcacagtgctttgctgcctggtatgggcactgcccaggcttaaaggtggtcagtccctggaattcagaggatgctaaaggacttattaaatcagccattcgggataacaatccagtggtggtgctagagaatgaattgatgtatggggttccttttgaatttcctccggaagctcagtcaaaagattttctgattcctattggaaaagccaaaatagaaggcaggaccctatactggggtccctcanacggggccgcttaacgcgggcacaaaaggggaggggcggaaatccgcccgacacggcggccagacccgcgcacaccccgggggcgcacgggacacaccgaaagagcacggcgaggaggggacacaaacacacaaaataaacgaaggggccggcatcag

SEQ ID NO: 557761 - DNA, 444 bp, Homo sapiens
tcactccaacgggtgacctccactgggcagcctgcctcaggaatgcctctcctctcatccttcttcaggcacagaggcccgccctccatacaacttccagaaagacagctctgcacacctaaagaacctccacagacccctgcatcaggacaacagcctctcctggcactcaggaccagcctcctcctagctgcctgcaaattgtcacagaacacacctgtcggctctgaccccatgccttcactcttgctgtcctctctgctcagagcaccctcccaccacccctgcctgccagtgccagccacgcacgttggatgacagctgaccccctctgcaaccaaaaccttccaaaccatggccaagcagatggctcccttctctctcccatcccccatgactgtaaggacctcaaatacacagattgatcaagtgtaaaaaaaaaaa

SEQ ID NO: 557762 - DNA, 444 bp, Homo sapiens
  misc_feature (4)..(4): n is a, c, g, or t
cccnggtcaaggactcatagcataagaaaccaatatttagtttggacttgaatatcaagtcgttgaaatttatttgaaatacttgctggcactgcacctggatttgtactgcaagacctgactattcataacggaaaacgatttctaaagcaacagcaggtatttttgtacagggaagtttaaatgtgtttgtgtatggaaaactctccactctcctcccctagatgccatgcttccttttgtctgttacggttgccatgttctttgaataacaaattatataacattttatcctctctcaccacaaggacaaagtatggatgtggcagagtcctgatgaaagatgtatccaaacaagataacttatatgtataaaattaaagcatataatatacatttactgttagtttgttttgataaggaataaaggaatttctaacatga

SEQ ID NO: 557763 - DNA, 400 bp, Homo sapiens
  misc_feature (4)..(4): n is a, c, g, or t
cccnggtcaaggactcatagcataagaaaccaatatttagtttggacttgaatatcaagtcgttgaaatttatttgaaatacttgctggcactgcacctggatttgtactgcaagacctgactattcataacggaaaacgatttctaaagcaacagcaggtatttttgtacagggaagtttaaatgtgtttgtgtatggaaaactctccactctcctcccctagatgccatgcttccttttgtctgttacggttgccatgttctttgaataacaaattatataacattttatcctctctcaccacaaggacaaagtatggatgtggcagagtcctgatgaaagatgtatccaaacaagataacttatatgtataaaattaaagcatataatatacattta

SEQ ID NO: 557764 - DNA, 1031 bp, Homo sapiens
  misc_feature (466)..(466): n is a, c, g, or t
  misc_feature (484)..(484): n is a, c, g, or t
  misc_feature (507)..(507): n is a, c, g, or t
  misc_feature (514)..(514): n is a, c, g, or t
  misc_feature (520)..(520): n is a, c, g, or t
  misc_feature (522)..(522): n is a, c, g, or t
  misc_feature (524)..(524): n is a, c, g, or t
  misc_feature (530)..(530): n is a, c, g, or t
  misc_feature (547)..(547): n is a, c, g, or t
  misc_feature (668)..(668): n is a, c, g, or t
  misc_feature (854)..(854): n is a, c, g, or t
  misc_feature (864)..(864): n is a, c, g, or t
  misc_feature (885)..(885): n is a, c, g, or t
  misc_feature (894)..(894): n is a, c, g, or t
  misc_feature (898)..(898): n is a, c, g, or t
cacgcgtctgccacgcgtcgctgcttctcccttgaaatccttgctggtgtccaccaggatttcctgtgaggtgccgggaatgagcaaggatggtctgcaccagctgacggaaagcagcttctgtacacagatgggagggtgaagggggagaatgaaaatcgaagcaaacttttattctgttgggaatcagaaggaggcagagaagcaggcagtgctcatgtgatgaagagggtagccctttcaggagtgagcagagctgagggttttggtaggagttgggctctggtggtgttaaggactattggtctttggggtttgaagagcctcataggcgagagtctcctggtaaggtgtctatgcgtggggagaacactattgtgggttggaatactcgcggagagagtatgttcctcatactctataacgtgaaagtgtgctctccactgcgagggtgccactctaaggnggatagacagggaccccntctactgaaccttgaggaaaggnggaaggnagaaangngnttagancttggatgcagaccttncaaagggttaaatgtaaccatatggatcaaccacatgcacatccttactacagaatccgtcctttcatttcaacttatagcaagctatgatttttatatataaatattatataaataatgnataaaacattaaaagttaactatgtaagatattatttctgaaacaatttagctatatccactatgattataaactgtgtctcgacctgtgttatttacattagctgcttaaaaaagcattgagttaatttttttaaatatcaactaaaatatcatagttctgtggtagcccttgttttataatganatacctgccnctagagaaactgtataaaccnttaaattgncagnatttttgtaaggttcccttttgtaaagagaataatattcaaagccttttgtagcatccaaagtgaaaacttgtatctgcgaaactatacttgtattaaatgtgctttttaaataaaagctcgtacccccccta

SEQ ID NO: 557765 - DNA, 484 bp, Homo sapiens
  misc_feature (14)..(14): n is a, c, g, or t
aaccgacgtcgtanagaataattgtaatcactagtactatttgtactgtatttttaacacatcattaattatcatatctctatgttcaatatttttaaaagctacataaataacaatgtattgtattcttggaaactgataagagacattttaggtgttcttaccacaaaaacaaaagataaatatgtgggccctgcgtggtggctcacacctgtaattccagtactttgggaggccaagatgggtagatcacgaggtcaggagatcaagaccatcctggccaacatggtgaaaccctgtctccactaaaaatacaaaaattagctgggtgtggtggtgcgtgcctgtaatcccagctactcaggaggccgaggcgggagagagactcgcttgaaccagggagtcagaggttccagtgagccaagatcgcgccactccactccagcctggcgacagagctgagactctcctcaccagacaaccc

SEQ ID NO: 557766 - DNA, 1940 bp, Homo sapiens
gcggctccaggcagagggccacggcccacccacacgccacctctagccccgccccgcggccccttcacccggtgggcgggtgggcgggtcatcgccatgcgcgcgccttgccattggcccgcgccggtggaggcgggcctgctcacgtctgccgggccctctgttagtcgtttggcagcggatagaggacacgaccaagatggcggcggtgtctggcttggtgcggagaccccttcgggaggtctccgggctgctgaagaggcgctttcactggaccgcgccggctgcgctgcaggtgacagttcgtgatgctataaatcagggtatggatgaggagctggaaagagatgagaaggtatttctgcttggagaagaagttgcccagtatgatggggcatacaaggttagtcgagggctgtggaagaaatatggagacaagaggattattgacactcccatatcagagatgggctttgctggaattgctgtaggtgcagctatggctgggttgcggcccatttgtgaatttatgaccttcaatttctccatgcaagccattgaccaggttataaactcagctgccaagacctactacatgtctggtggccttcagcctgtgcctatagtcttcagggggcccaatggtgcctcagcaggtgtagctgcccagcactcacagtgctttgctgcctggtatgggcactgcccaggcttaaaggtggtcagtccctggaattcagaggatgctaaaggacttattaaatcagccattcgggataacaatccagtggtggtgctagagaatgaattgatgtatggggttccttttgaatttcctccggaagctcagtcaaaagattttctgattcctattggaaaagccaaaatagaaaggcaaggaacacatataactgtggtttcccattcaagacctgtgggccactgcttagaagctgcagcagtgctatctaaagaaggagttgaatgtgaggtgataaatatgcgtaccattagaccaatggacatggaaaccatagaagccagtgtcatgaagacaaatcatcttgtaactgtggaaggaggctggccacagtttggagtaggagctgaaatctgtgccaggatcatggaaggtcctgcgttcaatttcctggatgctcctgctgttcgtgtcactggtgctgatgtccctatgccttatgcaaagattctagaggacaactctatacctcaggtcaaagacatcatatttgcaataaagaaaacattaaatatttagtttggacttgaatatcaagtcgttgaaatttatttgaaatacttgctggcactgcacctggatttgtactgcaagacctgactattcataacggaaaacgatttctaaagcaacagcaggtatttttgtacagggaagtttaaatgtgtttgtgtatggaaaactctccactctcctcccctagatgccatgcttccttttgtctgttacggttgccatgttctttgaataacaaattatataacattttatcctctctcaccacaaggacaaagtatggatgtggcagagtcctgatgaaagatgtatccaaacaagataacttatatgtataaaattaaagcatataatatacatttactgttagtttgttttgataaggaataaaggaatttctaacatgaaaaaaaaaaaataaaaaaaaacttgagatgcagtggcaggagcctcgggaataacttgcctgccccgccaagcagcaaagtgtctcctctagtgtttctaactcatggactgcacccatttctgcctgccccacaagctctaggcttgacagttcaaggtacgatcctcttcctttcttcttccttcttcctcctaggcaagaagcttgcaaaattctgggcctaagcaagtggcttcttcctgggacccaacagga

SEQ ID NO: 557767 - DNA, 1031 bp, Homo sapiens
  misc_feature (466)..(466): n is a, c, g, or t
  misc_feature (484)..(484): n is a, c, g, or t
  misc_feature (507)..(507): n is a, c, g, or t
  misc_feature (514)..(514): n is a, c, g, or t
  misc_feature (520)..(520): n is a, c, g, or t
  misc_feature (522)..(522): n is a, c, g, or t
  misc_feature (524)..(524): n is a, c, g, or t
  misc_feature (530)..(530): n is a, c, g, or t
  misc_feature (547)..(547): n is a, c, g, or t
  misc_feature (606)..(606): n is a, c, g, or t
  misc_feature (614)..(614): n is a, c, g, or t
  misc_feature (619)..(620): n is a, c, g, or t
  misc_feature (624)..(628): n is a, c, g, or t
  misc_feature (630)..(631): n is a, c, g, or t
  misc_feature (635)..(637): n is a, c, g, or t
  misc_feature (639)..(640): n is a, c, g, or t
  misc_feature (642)..(642): n is a, c, g, or t
  misc_feature (644)..(644): n is a, c, g, or t
  misc_feature (648)..(653): n is a, c, g, or t
  misc_feature (655)..(655): n is a, c, g, or t
  misc_feature (660)..(660): n is a, c, g, or t
  misc_feature (668)..(668): n is a, c, g, or t
  misc_feature (854)..(854): n is a, c, g, or t
  misc_feature (864)..(864): n is a, c, g, or t
  misc_feature (885)..(885): n is a, c, g, or t
  misc_feature (894)..(894): n is a, c, g, or t
  misc_feature (898)..(898): n is a, c, g, or t
cacgcgtctgccacgcgtcgctgcttctcccttgaaatccttgctggtgtccaccaggatttcctgtgaggtgccgggaatgagcaaggatggtctgcaccagctgacggaaagcagcttctgtacacagatgggagggtgaagggggagaatgaaaatcgaagcaaacttttattctgttgggaatcagaaggaggcagagaagcaggcagtgctcatgtgatgaagagggtagccctttcaggagtgagcagagctgagggttttggtaggagttgggctctggtggtgttaaggactattggtctttggggtttgaagagcctcataggcgagagtctcctggtaaggtgtctatgcgtggggagaacactattgtgggttggaatactcgcggagagagtatgttcctcatactctataacgtgaaagtgtgctctccactgcgagggtgccactctaaggnggatagacagggaccccntctactgaaccttgaggaaaggnggaaggnagaaangngnttagancttggatgcagaccttncaaagggttaaatgtaaccatagggcccccccccccgcccccccccccccccgaccccnccctcccntcccnncccnnnnnannccannncnntnanacannnnnntnacacnaataatgnataaaacattaaaagttaactatgtaagatattatttctgaaacaatttagctatatccactatgattataaactgtgtctcgacctgtgttatttacattagctgcttaaaaaagcattgagttaatttttttaaatatcaactaaaatatcatagttctgtggtagcccttgttttataatganatacctgccnctagagaaactgtataaaccnttaaattgncagnatttttgtaaggttcccttttgtaaagagaataatattcaaagccttttgtagcatccaaagtgaaaacttgtatctgcgaaactatacttgtattaaatgtgctttttaaataaaagctcgtacccccccta

SEQ ID NO: 557768 - DNA, 481 bp, Homo sapiens
acgttagacgactaacaatacaaaactagggggacgcagagcgatgtgcctgtaacacaacgactcgggaggctgaagcaggagaatcgctgagcccgggagtgcacaggttgcagtgagcgaagatcgtgctagtgcactcgagcctgggtgcagagactttcgtctcaaaaatataataatccagtgtgtattttatacttaagtacatctcaattgagactggccacatttcaaaagtgcattagccacatgagggcagtggttgccatattgaacagtatacttcaaagagtccttttggatcttctagtgaagataatcatatggactgagaataataattgttcctttttcactccttatacttttccctccccctgacttttcttgatacacttgcctggcaaggcccttagtgaaaaatcgaatggaagcagtgatactgtcatcttagtctttttccagacaaagggaaaca

SEQ ID NO: 557769 - DNA, 2007 bp, Homo sapiens
gcggctccaggcagagggccacggcccacccacacgccacctctagccccgccccgcggccccttcacccggtgggcgggtgggcgggtcatcgccatgcgcgcgccttgccattggcccgcgccggtggaggcgggcctgctcacgtctgccgggccctctgttagtcgtttggcagcggatagaggacacgaccaagatggcggcggtgtctggcttggtgcggagaccccttcgggaggtctccgggctgctgaagaggcgctttcactggaccgcgccggctgcgctgcaggtgacagttcgtgatgctataaatcagggtatggatgaggagctggaaagagatgagaaggtatttctgcttggagaagaagttgcccagtatgatggggcatacaaggttagtcgagggctgtggaagaaatatggagacaagaggattattgacactcccatatcagagatgggctttgctggaattgctgtaggtgcagctatggctgggttgcggcccatttgtgaatttatgaccttcaatttctccatgcaagccattgaccaggttataaactcagctgccaagacctactacatgtctggtggccttcagcctgtgcctatagtcttcagggggcccaatggtgcctcagcaggtgtagctgcccagcactcacagtgctttgctgcctggtatgggcactgcccaggcttaaaggtggtcagtccctggaattcagaggatgctaaaggacttattaaatcagccattcgggataacaatccagtggtggtgctagagaatgaattgatgtatggggttccttttgaatttcctccggaagctcagtcaaaagattttctgattcctattggaaaagccaaaatagaaaggcaaggaacacatataactgtggtttcccattcaagacctgtgggccactgcttagaagctgcagcagtgctatctaaagaaggagttgaatgtgaggtgataaatatgcgtaccattagaccaatggacatggaaaccatagaagccagtgtcatgaagacaaatcatcttgtaactgtggaaggaggctggccacagtttggagtaggagctgaaatctgtgccaggatcatggaaggtcctgcgttcaatttcctggatgctcctgctgttcgtgtcactggtgctgatgtccctatgccttatgcaaagattctagaggacaactctatacctcaggtcaaagacatcatatttgcaataaagaaaacattaaatatttagtttggacttgaatatcaagtcgttgaaatttatttgaaatacttgctggcactgcacctggatttgtactgcaagacctgactattcataacggaaaacgatttctaaagcaacagcaggtatttttgtacagggaagtttaaatgtgtttgtgtatggaaaactctccactctcctcccctagatgccatgcttccttttgtctgttacggttgccatgttctttgaataacaaattatataacattttatcctctctcaccacaaggacaaagtatggatgtggcagagtcctgatgaaagatgtatccaaacaagataacttatatgtataaaattaaagcatataatatacatttaaaaaaaaaaaaaaaaaaaaaaaaaggggggggggtaaaaatttccctcggggggcccaagtttagggttacccgtttttttgtcaagggggccctatagggaggtcggaattattaaggctaggacgtgggccggccgtttaacaacccgtcgctgagtgggagaaacctgctagcctggggactctgcggggagaggagaccctttaccttgttggggctgggccttatgtgtggcaaattacctacagaagattaaaaggctccaagggtaaactataacatttttcacgttgtttcctgtgtaaacctacgctgaattatgtggccgtgaaatttcgtacagagtatattttgactatttttcgg

SEQ ID NO: 557770 - DNA, 114 bp, Homo sapiens
  misc_feature (96)..(96): n is a, c, g, or t
tgaaccaaacaatctcttttcaaaacagggtgcttctccatttcttcttatggaagccagaagccaggagaaaaaaatatatatatatatattgtnaaagatcaatccatctcc

SEQ ID NO: 557771 - DNA, 1935 bp, Homo sapiens
gcggctccaggcagagggccacggcccacccacacgccacctctagccccgccccgcggccccttcacccggtgggcgggtgggcgggtcatcgccatgcgcgcgccttgccattggcccgcgccggtggaggcgggcctgctcacgtctgccgggccctctgttagtcgtttggcagcggatagaggacacgaccaagatggcggcggtgtctggcttggtgcggagaccccttcgggaggtctccgggctgctgaagaggcgctttcactggaccgcgccggctgcgctgcaggtgacagttcgtgatgctataaatcagggtatggatgaggagctggaaagagatgagaaggtatttctgcttggagaagaagttgcccagtatgatggggcatacaaggttagtcgagggctgtggaagaaatatggagacaagaggattattgacactcccatatcagagatgggctttgctggaattgctgtaggtgcagctatggctgggttgcggcccatttgtgaatttatgaccttcaatttctccatgcaagccattgaccaggttataaactcagctgccaagacctactacatgtctggtggccttcagcctgtgcctatagtcttcagggggcccaatggtgcctcagcaggtgtagctgcccagcactcacagtgctttgctgcctggtatgggcactgcccaggcttaaaggtggtcagtccctggaattcagaggatgctaaaggacttattaaatcagccattcgggataacaatccagtggtggtgctagagaatgaattgatgtatggggttccttttgaatttcctccggaagctcagtcaaaagattttctgattcctattggaaaagccaaaatagaaaggcaaggaacacatataactgtggtttcccattcaagacctgtgggccactgcttagaagctgcagcagtgctatctaaagaaggagttgaatgtgaggtgataaatatgcgtaccattagaccaatggacatggaaaccatagaagccagtgtcatgaagacaaatcatcttgtaactgtggaaggaggctggccacagtttggagtaggagctgaaatctgtgccaggatcatggaaggtatttcaaagaaactggttctagaatacagtcaagctatagtaaacatcatgtacctgaatacgtacaggataaagagattgaaagctaggagtggccaaacgacttcaactttaaacttgtaagtttggcatttctcttcaggcagatatttttaaaagcaaatccagaaagcggttccccataattagcattccttacattttcttcttcctggtcagccacacctctgtgcccaaggtggtagtgcccagctggcatttgcactctctcagttgagccttccttctcctagggtcctgcgttcaatttcctggatgctcctgctgttcgtgtcactggtgctgatgtccctatgccttatgcaaagattctagaggacaactctatacctcaggtcaaagacatcatatttgcaataaagaaaacattaaatatttagtttggacttgaatatcaagtcgttgaaatttatttgaaatacttgctggcactgcacctggatttgtactgcaagacctgactattcataacggaaaacgatttctaaagcaacagcaggtatttttgtacagggaagtttaaatgtgtttgtgtatggaaaactctccactctcctcccctagatgccatgcttccttttgtctgttacggttgccatgttctttgaataacaaattatataacattttatcctctctcaccacaaggacaaagtatggatgtggcagagtcctgatgaaagatgtatccaaacaagataacttatatgtataaaattaaagcatataatatacattta

SEQ ID NO: 557772 - DNA, 116 bp, Homo sapiens
tacatagatatacatgtgctgcgtgggggacgtagtaccctagtctaccagcctgtgggaccacagccgaatccttccactaatctgtacctaggaacgaggcggtgatccctcca

SEQ ID NO: 557773 - DNA, 1760 bp, Homo sapiens
gcggctccaggcagagggccacggcccacccacacgccacctctagccccgccccgcggccccttcacccggtgggcgggtgggcgggtcatcgccatgcgcgcgccttgccattggcccgcgccggtggaggcgggcctgctcacgtctgccgggccctctgttagtcgtttggcagcggatagaggacacgaccaagatggcggcggtgtctggcttggtgcggagaccccttcgggaggtctccgggctgctgaagaggcgctttcactggaccgcgccggctgcgctgcaggtgacagttcgtgatgctataaatcagggtatggatgaggagctggaaagagatgagaaggtatttctgcttggagaagaagttgcccagtatgatggggcatacaaggttagtcgagggctgtggaagaaatatggagacaagaggattattgacactcccatatcagagatgggctttgctggaattgctgtaggtgcagctatggctgggttgcggcccatttgtgaatttatgaccttcaatttctccatgcaagccattgaccaggttataaactcagctgccaagacctactacatgtctggtggccttcagcctgtgcctatagtcttcagggggcccaatggtgcctcagcaggtgtagctgcccagcactcacagtgctttgctgcctggtatgggcactgcccaggcttaaaggtggtcagtccctggaattcagaggatgctaaaggacttattaaatcagccattcgggataacaatccagtggtggtgctagagaatgaattgatgtatggggttccttttgaatttcctccggaagctcagtcaaaagattttctgattcctattggaaaagccaaaatagaaaggcaaggaacacatataactgtggtttcccattcaagacctgtgggccactgcttagaagctgcagcagtgctatctaaagaaggagttgaatgtgaggtgataaatatgcgtaccattagaccaatggacatggaaaccatagaagccagtgtcatgaagacaaatcatcttgtaactgtggaaggaggctggccacagtttggagtaggagctgaaatctgtgccaggatcatggaaggtatttcaaagaaactggttctagaatacagtcaagctatagtaaacatcatgtacctgaatacgtacaggataaagagattgaaagctaggagtggccaaacgacttcaactttaaacttgtcctgcgttcaatttcctggatgctcctgctgttcgtgtcactggtgctgatgtccctatgccttatgcaaagattctagaggacaactctatacctcaggtcaaagacatcatatttgcaataaagaaaacattaaatatttagtttggacttgaatatcaagtcgttgaaatttatttgaaatacttgctggcactgcacctggatttgtactgcaagacctgactattcataacggaaaacgatttctaaagcaacagcaggtatttttgtacagggaagtttaaatgtgtttgtgtatggaaaactctccactctcctcccctagatgccatgcttccttttgtctgttacggttgccatgttctttgaataacaaattatataacattttatcctctctcaccacaaggacaaagtatggatgtggcagagtcctgatgaaagatgtatccaaacaagataacttatatgtataaaattaaagcatataatatacattta

SEQ ID NO: 557774 - DNA, 716 bp, Homo sapiens
gactgtccctcccagtagcctgaggactccaaagtccaagctctggtttttgaagcctcgtatagagaagtgagtgactttgacgtgggtgccagggaaagaaagacacaagccaaacccattcccgaacatcagactcagggtttctccagtcccttctccctctgggtcttgcccctctgtccttggacacttccacaccacacctcatccacccacacacaatactcagggctggctggtcaaggtatgctgtattgaaggagggtattattgacatagctatgaccaataatgaagccatgctgaggggtggctcagagcagagtccaacccctattgatcaaccatgggcaaagaatatcccatgtgaggttacaggcaattccatgtgaccatgttgtccctcctgattcagggcccattccttaggagggagaactgaaaaccaggcctaaaccattagagacaatgtcccccaacccccagccacttctacaacctttgcttaagcctgtggaccagagccagtgctgctggaagaggcaagatgcttctggacagcaagactagggcacaactctccctcccttagctagctgcagactcagcaaataaagcccttgcaccaggaaaaaaaaagaaagaaaaaatatacaaaatagactctagactagctacaaagcaccaaacaaagcaaaacgaaaaaaacaagg

SEQ ID NO: 557775 - DNA, 771 bp, Homo sapiens
  misc_feature (397)..(397): n is a, c, g, or t
  misc_feature (649)..(649): n is a, c, g, or t
  misc_feature (678)..(678): n is a, c, g, or t
atagaatgtgggaaatgtaccacttttgaaggcgtagactatgaaattacaaatgctgcaaaattttcttcccaatacttacgtggcattttataaatttccaccaataaacgtgtattatttttattgaaaaagcatatttttaacatgcccttctagatgccctcctagccagactgaatcacctcccatttgatttttcttaattttctacctttaggtgctggctcattcattaacatcaatttccattcataagtgctcacaaacccacttttcctcttgcctgagtgcctcacataccctactgcctgagatggttccagaggcggtctcctctctcccttagaaacaccaggcacacacctgcccccagtctcgcctgcactctcctttnctcccgcagagaggcattcctttctcctcctctcatcctacacacactataagagacaactgaaatctggcctccctcagacagcttcttaattcatttgtgctcaaagccctggtttgagctcacacaacatctagagggttgtacaaaatataaaaaattattatcccctgccctgaatattttggtgtgggatgtggggtattttcccctccataaaattggggccttggggagggctgggacctcgtntcctaggttaatggagtataataacctanaataaaatttcccttttcccttttgaactaactttccacttctttggaggcacaattttttccaggaacactcttttcgcttcttttgtgggg

SEQ ID NO: 557776 - DNA, 292 bp, Homo sapiens
gggcttctccgtgatggagacggcgtccagcctcttcggcttgatgctctgcggctagatgctctgtcgaccttgcgtcatgggctcattctctgaagttgttgaaggacagcacgatgcatacgtcggcgccgcgcaccagctggatggctttctgcaggtcgtccttgttcttcccggacacgcggacctgcgcctcctggatgctcgcctgcaccttgatcttcgagtccttgatcatctggatgatcttcttcgccggctcctgggagatgcctcccttgaccttcag

SEQ ID NO: 557777 - DNA, 426 bp, Homo sapiens
tcgtgagtatcagggatattccccgaggcgtctgatgctgggaagcgatgcgccctatctgctaccacgcaccctgtgccccaagccgaagaatggtcgcaatgaaccggttacctgcccgaagtactgcgcgaagtgtccttgcaccgtaacgaaacaatggaagacctggcgctgcacagaaccgtgtgcgcccggcgctttttcggcttgcctgccatcgattgctgcggcgcattgccccatatcaaacgcgctgttctgactatcgggcacaataatggcaccttgccaatatccgtttccgctatcagagaaaaccttccatgcttgcctggctcatgactatctcgctcaaactacccaatttctgggccgtcaatggcggactgccttcatcaccatcctgatgctggtgctagtacg

SEQ ID NO: 557778 - DNA, 161 bp, Homo sapiens
tcgcggaacgtgtaatcctcaaataatgggtgggctcaggtacactggttactacaccaccttaacgtttaacgaaacgtgcttcttgacgtttgaccactaccaccactactgacgacacgacaacgtacacctctgtgaacacgacttgacttttacta

SEQ ID NO: 557779 - DNA, 223 bp, Homo sapiens
tgaacattcgtgtctctcacataccacacacctacacagccatgtgtgcacatgacacagggtcacagtctcacaagccacactccaaatgccacactctcaccacacatccacacacattcttatttgtttcaaacgaaacctggattaagtcactcggtttcactttccagctttcctcattggccgtcatgccttggatcattaaggacacgaatgttca

SEQ ID NO: 557780 - DNA, 808 bp, Homo sapiens
acggggctgggcggacggggagctgcgtagctcccggcgcccgcggccgatgcccaagcggatgctgccccttcgcgtacgtgttcccggtactgctcaaggtccgcgtgagcgcacagggagttgagccgcgacgtgtgcgccgaggcgctactcggcaggaggtctccgagaagaccaagccgactccatgttcctcggggtgccaggtctaggctggaccacgtgtgggatgacgtgctgtgctgtcgtccacctggccagagtccccgaaagcctggccctacaggggcccccgagggggtgcccgtgggcagatgctgattggaaccacagcggccgactgatcaggagcctgtgggcaggcctccgaagctgacccatctgggggtacgcgtccgatggtcctgttcctctagtgcgtgcgattcctggggtatgggacacggcggactgcggtccagggctggagcgagccctgtggcgggcagtggtgtgcgcacctgtctggggctgctggctccggtgtgctgttccctgtgttggtctcgtgggatcggcttgagcatgtgcgatgaacagtgtctgtgcaccagtgtgtgccattgttctggagacctggaggctggactcatggaccgtgtgtcctttcaccggtgagccacgccgtgcgtgggagcctgtccctgacgatcgctcggtgttcacgctcgaagtgtgggcgtcgactgtggggttgccttttaggtgtccttttttggtgtctattgaggtatgaatgaccctggtaatatttcggcatattgca

SEQ ID NO: 557781 - DNA, 158 bp, Homo sapiens
ctagagttccccttacgctatccacccatattcaggcttccagggagtaagacaccaacctataaaatactgcttttagtgcctctggggaatggaggaagccaggcagaactaggtagggatcctcactactactaataatgctccaaacagagggt

SEQ ID NO: 557782 - DNA, 224 bp, Homo sapiens
ttcttacaagttccaggcttaaacaaaggcacaaattacatgcaacaacgtgatacactcataagtgtgcacatatgctccaaggctctttattagactaacaactaaatgctagcactttgtcacgtgccatcagattttcttatagtcttagagtcatgctaataaaagttcataatgaaattcacagaaccacttacattttcccaatcttagatcagtac

SEQ ID NO: 557783 - DNA, 247 bp, Homo sapiens
  misc_feature (50)..(50): n is a, c, g, or t
  misc_feature (212)..(212): n is a, c, g, or t
cccctttccctctacccactgacaggccccagtgtgtggtgttcccctcnctgtgtccatgtgttctcatttttcaactcccacttatgaatgagaacatgtggtgtttggtgttctgttcctgtattagtttgctgaggatgatggtttccagcttcatccatgtccctgcaaaggaaccagactttttagagaaatagctgattactagncctgggcagggaaaattcaagatgtagttggaaca

SEQ ID NO: 557784 - DNA, 166 bp, Homo sapiens
  misc_feature (5)..(5): n is a, c, g, or t
cgtgntaccagagacttacttcaccttttatttattgagattttgaaaggatatatgtgactctacattctgcttccatgttggtgtgcattgttaccctttccggaaataatccttcacgtcctcgggaacatgtgcaaaacgtgcaggtttgtaacatattacg

SEQ ID NO: 557785 - DNA, 720 bp, Homo sapiens
  misc_feature (678)..(678): n is a, c, g, or t
cccgcccccccccaaaaaaaaagtcttaaaatttttccccaaaccaaaaggtctcactacgcggctgggccttggaggaaaaaaacaaaaaaaaaagcgttttcccaccaaagtttaccctcccagagtgtggtttctctttccccttgccgggttccaggaaataccgcgggttaaaaacccccttcaggaggggggggggaaaaataattctttcgtgtttaaagaatttgggggggggggccaacaaaccgccctttacctaaggggggtgtataagaaccccccctttttgtgcaaaaaagggaccccaaaacctctccgggggggggaggcaaaacccgggtgttgtccccaaaaaggccacaaacggggcaattgtggccaaaattgttcttgggtggtttttgaagaaaataaaggcccttgggggttcagttccctttatccagaaggatccttggcccatgccgaggcttggtatttcccccccccaggttcggtagttgagtaaccttcccaaccctcccttaagccactccaggctggtatggagtaacctgggtgatccatcctgagtcctccataagttccggcaaatcgtcctgtggcactgagcagtataaatagcccatgccaatatacgatctccagatctggttttgcttgaaatggcantgcagagttgcaaggatttcattttcacaaacacggtcttcc

SEQ ID NO: 557786 - DNA, 143 bp, Homo sapiens
  misc_feature (17)..(17): n is a, c, g, or t
  misc_feature (61)..(61): n is a, c, g, or t
aggcatccggagctttngaggggagtctggcagcccggctggcccaggcctgcagcggcancgtttccacagggcgcaggcggccttttcgaggccttttctggggggtctgagggagacctggttgggaattggggctccag

SEQ ID NO: 557787 - DNA, 123 bp, Homo sapiens
gtttctgttttgcctgaataaaatgaatttaaacaagagaatttccacagaaagctttgcggcccgtcaagaatgttcctggcagttttgaacttgaaccaccacgtccccatgtttgaccaa

SEQ ID NO: 557788 - DNA, 104 bp, Homo sapiens
atatataccctgtgtatctatacttggaagtgttcaaggttgccattggttgaaaacactagtgtctctggccatcaaagtgatcttgcttagtcgcgtgctgt

SEQ ID NO: 557789 - DNA, 619 bp, Homo sapiens
  misc_feature (619)..(619): n is a, c, g, or t
tggaaactttaaaacccctcaaaaactgtttattatacaagtgagtttggagtcacgatgggcttatacggaaggattcctggtagcgagcgcgggccccaggcctccaaacttttgggactcgcagcgacgagggtcagctaccagcaggtccggtcatacttggatgaggatgtcttggatctccttctgggaagcctcatccacatattcctgggtaataggccaccagggcttgggagatggactggacggatagcataaatctggggccactgtgacccaccaccctttaccagggacacgggtattgttctaccaccagcaatatcgctcccttgccggagaagcaaaactgggctcccagcagcttggtactgtgtagcggtggcggcggctcaatcattctccaggggggcccgcccgttcaccctttgattgaggcaccattggcccgcgttttggcagtggccgcccacaggttgtgtcgctgtactatctaggcggtccagaaagacctgtgcgacagactggcgaggggggccctttggaccggaattgggctccccagagcggtgggactaaaaacaacctcacaatttgtttggggggccgccan

SEQ ID NO: 557790 - DNA, 673 bp, Homo sapiens
agaatcatgcaggtggaggctggtggttatcggccgaggtaacttgaaggtgccttggggcagacactaccgaagatggggatgagaagagcctggagaaacagaagcacagtgccaccactgtgttcggagcaaacaccgcccattgtttgcctgcaatttgacagagtctacatctaccatctgcgctgctatgtctatcaatgccagaaacctcttggctttagataaggatagctcttacagatccatatgctcatagtcgtgttaccatccatgctggagcaaaaccgacgtgagcatcataccattcatacccatgaatcccacgttgggcaccaagagcaattatagttcagatgaaagttgaacatcctagtggggaaccccagatacagtgctacagatatccactccaaagttatcatgggaagcttcttgacaagtgaccaacgtgggcagaagatgactttataaggacgaagcattgttctctcctgtggtgaaactgaagctcagaaatggacatcacacccaagacttctctggcacccagtaatgaatggagacaagcctgcggggatgtacttgtaactgcagagctgattctgaggggcaaggatggctccaaacttcccattcttccccctcagagggcgccaaatctatacaa

SEQ ID NO: 557791 - DNA, 616 bp, Homo sapiens
  misc_feature (612)..(612): n is a, c, g, or t
gggtgactctagaggaccccgtcggagcaagcggggaattaatgtaaaataaatacaaaatacagggtggtgggttaaatggaacactcaaggaagcatctcttcggaggtattcctttcagtcgggtttaatcccagatctttttacttcccctaggaatagtctataaaaccacacaagggatcggtgaactggtagatcaagtgcacggtaaatctgtgaactggtggtttaaattacataagacatatttttggatctcatcatacaacaccaatacaaaagcaccgcccaggcctctcagcacatgggaccaggcaccttggaagaaggcctgggctccttcgtctttggcaatcttcctccagcagtcaacggtcccggggtacataatatcgggccctttcgggcgggacggcatcatcattctacgaggaacagggtcaaaggggtaggacaccagcccggcgacggccgtcacactcggggcaatcatccagctcacaaaaaggtgcacgttcttggggtcaggcagcatccccttggcagtatcatagactccgaagtaggcagctctatagataatgatgccttggacagagacgttgaanacct

SEQ ID NO: 557792 - DNA, 934 bp, Homo sapiens
ggccaaaagctctgcagtccccggcagtgagctatggactttcttccccctcacaaggctgggggcctcctgctctcgtccctgtgccctccctgcacagggcaaagccagtctgggctctggcacacagagttcatgtttgctgccctcgtccactgcccctcaccccagatggggtgacgtgaggaattgaagcggtgcattggtggttaggccgagtatgagctgtcttgaacatgctggagggaatgatgcagggtgtggtgaacgcaggtcctagtgcaagaataagagctcccatggctcttcgtgtcgcgccgacgtctagtcgccttcacctagaactactagattctctagtagcaagacatttatatcattgacactagagaaagctttacggttgataaccctcatgaactcctaaggtagcggaaacaggcacccaagacttcaaggaccatccggagcgaagaggacaggtacaaccacactcacacccttcaggcgataagcacgcaatgagacatcccagagatcgaacaaaacacccaggacagcgtatccgaagagccaatacagaagcctacacacgacacagcatagacagagatatcacaccaagagaaaaagccacatagggagccatcacgcagcgggtcggagcaacgaactagggctcgcgcacccgtaagcgcacgcaacccgaactccacatggcgacccaccactaccacccaagccataggcacccatccccaaaagagccccaagccaggaaacacaattgaggggagaaaattcaccaaggagcgaacttaacaggcccaaagacgcgaagcccaagagaggacaagaaaacggccaagggaggcacaccttatgcccggagcccatccccacattaggggaactaggagggggtacacgagga

SEQ ID NO: 557793 - DNA, 594 bp, Homo sapiens
gcagtggcatgatcacagctcactgcagcctcagcctccctggggtcgaggtgatcctcttacctcagcctcaggagtggctgagactgcagacgcacaccaccatgcctgacttttgtgtgttttgtagagacggggttttgccatgttgcccaggattgtcttgagctcctgggctctaacaatctgcccaccttggcctccccaactgctggggattacaggtgtgagccatcgcgcctgggtgaaacattatttttaaaacttccttggctgggcacagtggctcacacttgtaatcctagcactttgggaggctggggcaggtggatcacctgaggtcaggagttcgagaccagcctggccaacatggtgaaaacccatctctactaaaaacacaaaaatcagatgtagtgttgcgtgcctgtagtcccagctactcgggaggctgagacatgagaatcacttgaacctgggaggcggaggttgcagtgagccaagatcgtgccactgcagcctgggtggtggagcgagactgtctcaaaaaaaaaaaacccaaaaaaccccccaaaaaaaacaaaaaccaaaaaacca

SEQ ID NO: 557794 - DNA, 771 bp, Homo sapiens
ggtctttatatcgctgcgtggcgatccctgacgcatcgacgtgatgcccaggaagacaggtcgacctggaactccagactcacttccttagatcatcagtccagacttatgtggactgattatccgagatactgtttcattcgtggcgcattgcaggacaatgtgggtgctcccaagccacgcatgcatggcatcgcgctatgatccgcttctgctggagggagaggcctgttgtgggtgcctagtattggtgcaatagaacaacacatgatttgccgcgaaggatcattccgaagggcaacctgttacaccacacacatgccactacctcgtggaagaatacgtgtctgtcctcatataccgggggatatcggtcgggctattgtgtggcaagcacgtgatgactctcaccgttgaaatctagggaccgatgttgcttggaacgaataatggtggccacgtcttgctagcaccggtaggctctgtggttgcctaatcttgcaccacccactcgttagaaggatcaccctaggtggcctaggccccgacgatatcaacattgggtcgtacggggccacgaggaaacgactcgtcccgtgtttttgccatggcatttaaaccgtagtcgacaccacctagaagagtctcccaattggggggcaacccctagtttggaaacattctcatttgaagtcgatggttgcgagggcatgaggtcaacacgaacgttggagggaccagaaaatgctcgggggagcccacgcttgaaat

SEQ ID NO: 557795 - DNA, 382 bp, Homo sapiens
tatcgccggtacccccactgatagcacagtgggtgaagatagccagtctgagcccaggtcagcacttgtacttgggtctggtgccttttctctggtcctcagtttactcttctgtccagcagggatagtagcagcatcttgcagggttctcatgagtcttatgtgggtgaacatcaaagcaactggtgcccaacctccagggagtgctcaatatcattgactgtcaccaccaccaccaccattattattacccttccagggtagccgtgagggaggctgatctcagggaatggctgggggtgacatcatagctgtcatagtcctgcagaggggagctcatagcatcatggtggcccctgtgtatagaggcacagattgcagt

SEQ ID NO: 557796 - DNA, 269 bp, Homo sapiens
gtagctccaagagctctcactgtgacagcccacctcgctcgcagacaccacaagataccaacagagcttctgaaacagatacccatagcattggagagaaaaacagctcacagtctgagggagatgatattgaaagagggaaagaagttgaaagcatcttgaagaaaactcagattggatatgggtttgtcaagtcggccggaaatattcccccaggagtcctctttaacacccgagcgacggcacctcagctgaggcagagctcatga

SEQ ID NO: 557797 - DNA, 502 bp, Homo sapiens
agtatgttgttaatttcacctatttgtctttataatatggcttttagaacatttaaaattatatagctcatggttgttgcttgccctgtatttctattaaataatgctattctataccttcacatttactgattactaaattattactatttaaattattttaaattaccggcataccttgttttattgcactttgctttattgtgcttcacagagactgtgtttttttcaaattaaaggtttgtggcaaccttgtgttgggaaagtctattgataccattttcccaataacgtgctcacttttggtctctatgtcatattttggtaattctcacaatatttcaaaccttttcattattatattcattatggttggtctgtgaccagtggtctttgtgatctttgatgttactattgtaactgattgggggtatcatgaaccactcccatataagatggcaaacttaatcaataaatgttttgtgtgttcaaaaaaaaaaaa

SEQ ID NO: 557798 - DNA, 1038 bp, Homo sapiens
ggtccgcgggagccgtcgccgccgccgtcgcggtcccagctgccagccccgacgcggccccgccgacggacaggatgctggaggaagcgggcgaggtgctggagaacatgctgaaggcgtcttgtctgcctctcggacttacatcgtacgttcctgcccgctgtgactgctgctggtgtgcgccggaccgatgacatgccgacgacgaccgcgcacgagttcaccgtgataccagcatgacagcagtacgacacgtgacagggccagcacctaacggcaacacggaaatgccagtgctgaacaccaggacggggcgcacagatggccggcggacggtgctgatgccgccgcatgcggttgatgcattgcgggctacatggactttctacctacagagccagtacccacgaatggcgccttgcagggaagtcggagacaggcgcagcaccagatggtcaaaatcgagttcgcattgccacaggggcccaaactgggcccggcccgggttgtcccccccaaggaggaccaggtcaggtacccgggcaccaattccacattgggacagaactccgcaaggcacaggcaggaaattgcgttgggacacaattgagaaggaacaccaggcccggtacaaccacagatagatacctctgtggccccgagatgcgaagggacacggaacggggccaccttggcatgtacctaatacagtaaccagacaagaccaatgcaacccaccacagggacttgcgcacttcacgggcccatccgcacaaagaaaggacatcccccggccacatcctttgtacaccggcattggaaaaggataaccattgacatttggcccgcctaacaaggcgacccacaacgcttgcaccaaacccacggcacagtttccccagaaatagaggtcaccagccacatgacccgaggagcggatttcccaaagcacctaaaggggcccggatcaagcgtgaccctaggccctcggcaatattgccacaccggcgatccgaaaacgagcagcgcaggctatga

SEQ ID NO: 557799 - DNA, 1027 bp, Homo sapiens
aggacgaggagccggaagccggacaggagtgaggagaaggccaatgcgtgaagcgggaggagaggcggataacggcaggaggaacggagagcagagatgaagacaatgacatgatgaaagtcagaaaaaatatagtggccctgtttaaagaagaaaagccggtatgctagattgtgaaatacaatctaaagcgctccattcaacatcgagatcccgacgcgttcctgatgaggtgcacgcgtccgcagcccagcccatgccgggcagaccacgtgcgctattgtgctggtctcctgaccttggccagtgaacctgccagccttccaggacaggctggcctggagagctgcccctgaacggacagtcctctcgtctttgcagactggtgcaccttctattccctgttcatctctgtttctagatttagtcaacgtatgaccatacagcaacactcttcgcgggtcatcagggcatttacctcatactacttctcagctttgcttgcaaacgcctaactgcacacgaagccgtctgcacggcacccagccgctgtgagactagctacattctcccagtgtcagaaccactgcgtttctctctgtcccactaacaagcttcaacacgctaaccacatggcaagtcgggatttgacttcctgccactgacggcagaactggaccagaccctcactcattcccccactaacacccacggcacagcgtattgtgtgcgcatcttgcactcttccacacctgatggactcacaccggcttacatgcctgcacgaacaccgctgcgacgtcccataactatcaagacatgtcaactggaactaaccggtcctttaatacggctcgccttaagtcctcccaagtggctacatttcaagctcatcgccatttggtaggcaaacgtgtctcaaaacacccttctcagtatcacacgccactttaaattggtagatactagccactcgccggcccctcacacgcgcaatactctacccacagaacacacgctatactac

SEQ ID NO: 557800 - DNA, 1311 bp, Homo sapiens
  misc_feature (491)..(491): n is a, c, g, or t
  misc_feature (601)..(601): n is a, c, g, or t
  misc_feature (750)..(750): n is a, c, g, or t
ttttttgtttttttttcaaattggaatatttatataaaccagggtagtggccttggtaacatggtgcacacacacctcgcacactcaaaaggatcggccggggggaaaaattacataaattaatgtgccttagggggaaaagtgaaaaattaaaaaagatcccgtggtgagggttttcattatagtgtggtgaggcaattagtgtctccacattcactatacaagagctatgtggccaaatctcgtgtctccagaggagagcagagtttggaagtgtggagggctataggagacgaggaatctcttggggaaaaaatttcaagcgaggtgggcatatagcgagagtctctcttcaatatatgtgagaaagagcctgtgaccattaatgtggtgggactttgtgggcgtggtgaaatcttctcctctctttggggcacacacactaggtgggggaagagaggggttatcactccacgaggggcgcgagacanaaatatagagaagacagagcgggcgggtgggtgacacagacagagagcgctctcgtgggcgagcccaacttttctcccctccaccgaggatattggggtgcgcgaggggngctcatctccagagaaaaagagtgtcttataagtctcttctctctctcgtggaaacacccgagtgttctcagaaacccttttctcccacagtgtgccagagtggcttcctataacccctctcatctctcttataggggtgcacaaggancccactctgtggagggaaaagcctcttaaaagggggttcttcaggggacgaagcatgtggggtctccggggggagcgtccttaataagcgagaacgcaaaggggcaaatacatgaggactccgtgtgcggctcccaccaaaacacgggcgggggcgcggggaggatcatataccgtatatttagcctcccagggcaattccgtgtggcctacccaacggggcaagatattacagggggcggggggataatttttcccacacccttccgttcaaaaataacgagcggtgtatacgaacattacttttgccgacgacacaacccgagcagttttaatatacgccgtggtgggacgacgatatagaattgcggacattatgggcgcgctccataaaaaaaggcacattatcgttgggcggcgattcacaaaaattagtggggcgtgcccacaaaataggggaccacaacgatgtttttatgcagcgagctcacaacacagtgtaatacaaacccgcgggtgaggaaagaaaactactccccgtcatcatatcaaaacaacacct

SEQ ID NO: 557801 - DNA, 862 bp, Homo sapiens
tcctaggtaggcctgtgtatcggccgatggcgaacccggctctggtgtaacgccgggctcggagcgccaaacatgctcgccataagccaggatcagtccccgtgggggtgctttggctggccgagggggctttggtgaccgtgtggtcgtggagtccgagggggctttggctggggtccgaggtcgagtgctggatggctttagatgtgtctgttgtgactgagtgatggagtgtggatggctgttgctgggctggtgcggtgtgtgagtgagtgatgtgaacgaggttggtggagtgcttccattcttggttggcaacctgtgtggtctgttgtgtctgtgttgatgtgaacaaatgatgtgaaaccagtcggggcaagaatgtgattggttggagccgcatcgtgcatgagtggtgtcttcatttgtcgatggacacatgtgaatgattgcacttggtcaccaagaacctggtccctggttgaatcagtttattggatgagaacgagagtctcgatttcgtgaaggagatgacaaaatttgagtaccgagccttggaaccccttccgctccaaagctagcagcagcaatcctgggtggtgtggaccagatccacatcaaacctgtgggctaaggtttctctacctcggggcttgcctcgggcaccacgggtctccccatgttctcctgacattccgttggtccggatggtctagtctatgcaggtcgagttctccccagcgctctggccgtgacttcatttacttggccaggaagaggcccccttattcctgtgatcgggtttgttgaaccaccaatccgcttttcttgatggtggtgtgttttgcgtttggccgccaca

SEQ ID NO: 557802 - DNA, 675 bp, Homo sapiens
  misc_feature (1)..(1): n is a, c, g, or t
  misc_feature (114)..(114): n is a, c, g, or t
ngtgttccttccctcatccccgtaaatagctaagctgttaatggcaagttttgggaccagtttagggccagatttggggggcttgctctcaacacaaaagtgccatgtgacccntcagttccactttgggtctatcccccaaagtgctgaaagcagggactcgagtagtatgcccagccatgtcacagcagcaccatccacagcagccaagggtgaaggcaacccacatgtccatcagccaatgaggaataaactcagtgtgccccaccgacgtggagcaacgtattattcagccttaaaaaggaagaaaattcggacacacagcacaacacgtaagaggcttggagttgttacaccgagtggagggaaccagccacgggactagcactgtgtaatcccactacgggcccctggaacagtcaacccatggagacaggaagtagaggggtgggtgtcagggtgggtgtcagggctggcagagaggaatggggagctagtgttgaagcaggacagggcttactttggcgacgagaaagccctagagagccagtgcagaacaatgcaagtatactcaactgtagagctgaaaatgattcagatgggaattttctcatgtgtattttaccaacaatcttaaaaaacaaagctgcactcatctctccctaaagacttgcc

SEQ ID NO: 557803 - DNA, 822 bp, Homo sapiens
tcgatcagcaggtgtcctgggaatttccctgcttgaacctctcgaaacccaaatccagagtccatacactgcaagatgttgcctccatcatgtcacactcttatgcagcgggcacttgccatgtgtacgtgcgaggtccgcgacgagctgctccagctttaacaagatactgtgaagtagcacgctccagacatggtccagctagctgggagagtctcatgaacctcgagcccacatgagctgccgggacatgtaggagtgcagctgccccgagctggatcagctggtggacatctgtcggaagtgttcggggctccagctccacgagcttgactggagcaggatggggaggctgccacagtatcaagtggtacctgcggacaagctgcccagctttctagcaaatgtgcacaaagcttattagccagaggagtgatggaagctatagcaccggagagagcaatacgtatctgtttgtctaccaaacctgcgaggtagggctgtatcggtttccgctgtgaggccagaaaaaatgtagaagaagtctgagagaaactacttagggcacttaggaattggcaggactatttgtgccacaggacattaatcttcgttgtgttttgtattatgatgaacggttgctatgatatcaagatatattttcgaagaggatggttgcaagctctctatgcttcataatgattctatttccatcttaaaagtatggttttactagtaagaaccaagatcatgcttggacagatgttttaagaataacttactgagatttattgatttgaagattttaaagatgaatggtat

SEQ ID NO: 557804 - DNA, 857 bp, Homo sapiens
ggaaataaacagcttaatggctcacacaaagcctgtttcgtggtctcttcacactgacgtgcatgaaatttgttgccatgacttggatcgggggacctccctttggagatcaatcccccatcctcctgctctttgctccgtgagaaagatccaccttatgacctcaggtcctcagactgaccagcccaagaaacatctcaccatttcaaatccggggctgtgttacacatgccggaaatctggccactgggccaaggaatgcctgcagcccgggattcttcctaagccacgtcccatctgtgtgggaccccactgaaaatcagactgttcaactcacctggcagccactcctagagcccctggaactccggcccaaggctctctgactgactccttcccagatcttctcggcttagcggctgacagactggctgctcggttgcctcggaagcccctatagaccatcacggatgctgaagctttagtccaagaaggcacggacatgtcaggcctctgagaccaagccaagcaattcgcattccccttggtgcactgcacgtatacgcccagatggcctgaggtaactgacgcatcccaacaggaagtgaaaacggcctggccgagcctttacactgttgagatttccaccattgtggtttggtccctggcacaacttaaatgcgggtgttaaccccgtgtgaatttcctaacccgtgtgtcaaaagagcctctccactggtgaactgtggttggaccacggagggtggtgtgaacaacagaaaaaacacccctcttgtgctgctgataatacaactaatcatcaccacgacatcttatatagtgggccacacgcgcta

SEQ ID NO: 557805 - DNA, 306 bp, Homo sapiens
tttacgagatggagcgagtgggtttttcaaagattcgcttggagcttagtggagaagggtgctctcctggctcccgcatgtctgagaaaatcctgagggccgctgggggaggccgtgccttctggactcgtgggcaccaaccctggtaagtgtggagggagtcgtgggggcgtggggcctctccctccaggatcccaggctgctccaggccaggactgggctagggtgccacagcagcctctactctcattctcgaaacccacaggcgctgcctagggtttgggatgcacgccacgattttctctc

SEQ ID NO: 557806 - DNA, 136 bp, Homo sapiens
cactctagacggatccccctgcttggcctatttttttgtttatttttagaaacaggtctcgttatgtcacccaggctgtagtgcagtggctatgaacagcctcaatcattgggcactgcagccttgaactccttag

SEQ ID NO: 557807 - DNA, 746 bp, Homo sapiens
tcttgatttgttgcttcgcaaggccagggctatcttccagggaaggcagacagtggggagacgcagagggactggactgcaggcaagcactttgacgaaagacactgggcgggtttccccacctctcaccccaaagcagaaaatctagcagactgtcagctcaagccccgtcctgtgggcacagacacttacacagggagacgcgtggacgttttaagcaatactttataatacgtggtacatagtgtcggatttccatctttcctgtctcattttttgattcataccaaagaaagaggtagagttacacctaaacacacgaaagacctttttagatttaaattccatttcccttctttgactcgggggaaccctgttgtacagtggtgtggcaaccttttaatctcccagaacacgctgtgggctattctccaaatgtacactcgaggcacagtgtaatgtggcttctccagcaacgagggaattttcaaggtttcgcgggggaagtcttcaggggggccaatgtgttgagggagagggtgggccacgtgaagtgccttgagaaagaacagaagatgtttcccagggaggccttcccgtcggaaaggggttcatcgtaccatacagtgtaatcgcggtgggtacctctagagtggttaaccatttccccattgtgtggggaacttcttgttgagtattttgtccctcttataagagttaacggtgtgtgggtcattacacaccaa

SEQ ID NO: 557808 - DNA, 131 bp, Homo sapiens
cacagtccaaacagtgccaatacagtactagcaaactcagtaaaaaggagtatatgatataggagtatgaactttcaagtatgaagatatatattcaccaggaataattcactctcaaagctatagagagc

SEQ ID NO: 557809 - DNA, 1177 bp, Homo sapiens
  misc_feature (1)..(1): n is a, c, g, or t
  misc_feature (544)..(544): n is a, c, g, or t
  misc_feature (690)..(690): n is a, c, g, or t
ngtgtagtttgcttgcggagctgcgcgtgtgttcaatgagtcgctcatcgcttgtgttttgccgggtatctcctccgtgatcgtccgcggtcttgttgggccactatgagctttttcgctacccctggtgtctccgtcgagttctccggtttctcggcccgtggtcgcgagcgtgtcggaccattgcccccccctagtgtcgcgtgcccccccgcggtcttgtgccccccccgcggtgtcaccccaagcagcatgcttataaaggagatgtttaagaatttaaaggtatcttcggcatattgttgaccccgccgtgtgtccgcagaaacgatcgcctgttggcttccccccgtatttgggccccccccctgccccagggacagcagggtttaccgccccgcggtacccttgacccgtgccaaagggtagcataatcagcgtggttccttaaatagggaccctgttatgaatggctcccacgagggttcaactgttctcgtacttgtgtaagcacgtggaaattggacctggcccgtgaagaggncgggcatatacaccgccatgacgatgtaagaccccctattggagcctcttaaatgttagttaaatcgccacaccagtacctgtaccaaccccaccaggtctcctataactatcccaaaccctgcgcaattagaaaaatttccggtntggggcgacacctccggaggcacgagatccccacccttcctcgaggcacgtaacactgctaaagagacttcacccaccgttcacaaagcgagactatctaataactcccacttgagtcccactataacttgagcccaccgggacccacgttaaccctaagggataaccagccccaatcctattttagagtcccataatcccaccaattagggtttacagacctcgatgttggatccaggaccatccccaatggcgccaccccgctattaaaggttcgtttgttccaaccgattaaagtcctacgtgatctgagttccagacccggagtaatcccggtccggtttctatctacttccaaattcctccctgtacgaaaggaccagagaaataaggcctacttccaccaagccgccttccccccgtaaatgatatcatttcaacttagtattataccccacccccaccccagaaccgggtttgtttaaga

SEQ ID NO: 557810 - DNA, 182 bp, Homo sapiens
  misc_feature (17)..(17): n is a, c, g, or t
  misc_feature (79)..(79): n is a, c, g, or t
  misc_feature (147)..(147): n is a, c, g, or t
gtggagacagggttttntcacattgcccaggctggtctcgaactcttgggctcaagcaatccacccaccttggcctctnaaagtgctgggattacaggtgtgtgcctctgcacccagctcagaacttgtacttaagaagtcattttnaatctagagtgcttgaacgcttccataataatttt

SEQ ID NO: 557811 - DNA, 111 bp, Homo sapiens
  misc_feature (15)..(15): n is a, c, g, or t
  misc_feature (63)..(63): n is a, c, g, or t
  misc_feature (76)..(76): n is a, c, g, or t
gggtgtttggggtgntgttcgtttggccttctgggctttctgggggggcttggtggccttgcnggctccggcggcnttcttgtcccctgctttggtggcaccccccgcaac

SEQ ID NO: 557812 - DNA, 886 bp, Homo sapiens
  misc_feature (380)..(380): n is a, c, g, or t
cgtgttctgttggttctggtgtctgctatggattggtgggtgtggtttttgttccctgctgctcttggtgcagtcgtgatgttttgttatgatagttcaaaatgtgtgttggtttggtgttggtggcttccgtgtggtgttcgtgctgttatagttggggtgtctttttttgtgggtgggcgccccccctggtgttttgtcactcctcactgcggttgttttctgctgtttcgcctctggtggcatcacccgcttatacgtctctgcgagtacttgtgatatacccactgagaaatattgagttccccacaatggcacgtatatgttgtttgtgtgtgataaattgaaaaatatattattattgttctcgtgagaggcgngttttccccacaggaacaaaaaacactcgggctcttgaagtatgcgcagcagtgatattctcgtgtcgcgggggggcgctttaacacagcacacccctctcccacaggggggtgcacatattcacagcgcccccctcttgttctcggtctccttctctccatttcactagcgctccacagcccctgtggccttgggctgtcccgaacacaccctgggccacgagagccccttccttgtgagatatggtggctccctgggccttcccgtggtggaatgtaagccacaggcgtctgcccccctcccgggagagcccctggggtgaagccctccggggccctccctgcttgccacagccgtctccccctctctcccaacacatgcaatttcaccgtttgggtggttttggttttttattttttggaaatgtccaattggataacatcttaacagcccctgataggagcttccaactggagaatagccgaaattaaataactccatttgc

SEQ ID NO: 557813 - DNA, 529 bp, Homo sapiens
gtagcacagatgaatatacgaacgtgtgtctagcggaggctgattctttgaaagtgcttggtagttatattgatagctgtttatagttggagctctgtttctaggtagaacaccattttcagcttcggatgcactaactgtggagtcccattggggatctggttttgtgactattttcccgtgtgctatgagaaggaattacagatccaggtgaaccaggctatgctcattatagaaggacttttacaagtattttgagcagtatctggggatggacattcatacgtagtagtgggttctgtattttcaggatcagggtcttccataagtacactgaaagaagggactgggcccttagcttgcaactggggtatgtgatttgcatgagatgaaggtgaagactgagcatgactcggtgaccatgagacacatggtgattctcccccactatactttatcttatcggtgatcactgcgacgataaagcatctctgagaatcctatttctgacttgttccacgaagttgag

SEQ ID NO: 557814 - DNA, 355 bp, Homo sapiens
  misc_feature (180)..(180): n is a, c, g, or t
  misc_feature (203)..(203): n is a, c, g, or t
tgaccttccggattggggtttcctgagtggacttttttttactgatgttgatgctattcctttctgtttgttagttcttctaacagtcaggcccatctgctgcaggtctgctggagtttgctggaggtccactccagaccctatttgccttggtatcagcagcagaggctggagaatagnaaagattgctgcctgtttttgcntctagaagcttcattccagaggggcacccaccagatgccagctggagctcacctgtatgatgtgtctgtcagcctctgctagaaggtgtcttccagtcaggagaaacggggggtcagggacccacttaaggaggcagtctgacccttagcag

SEQ ID NO: 557815 - DNA, 145 bp, Homo sapiens
tgctgcgtggcatcacgaaatatgcagcacatgtgaagcactggatccactgcggcgtcatcgcgctggcacccacgtcaaacatgtggaagttgactttggtcaccttgaaattgggtcccaaagattccagaagtcaggacac

SEQ ID NO: 557816 - DNA, 174 bp, Homo sapiens
  misc_feature (80)..(80): n is a, c, g, or t
gcgggggaagtactccagaggcagcagcccaagagtacctttgtgtttggatggatttaaggcgcaagtacttccattgngggccacactctctgtgggcatgccatatttctggagcactttgttaagggccggtctgggtccctgttggtacctcagaggtatcgtttccct

SEQ ID NO: 557817 - DNA, 172 bp, Homo sapiens
acttagaggatccgtgacagcacagaggagggggaaatcaagactaaccagatcttgagcggctgtcagatctcacagcaggtgctcctccccaaactggccctcgctaaaatactccttgaagcggagtcgagatcgagggaaatcccctctgtgctgtccacctcctctg

SEQ ID NO: 557818 - DNA, 441 bp, Homo sapiens
  misc_feature (18)..(18): n is a, c, g, or t
  misc_feature (82)..(82): n is a, c, g, or t
  misc_feature (323)..(323): n is a, c, g, or t
  misc_feature (338)..(338): n is a, c, g, or t
  misc_feature (347)..(347): n is a, c, g, or t
  misc_feature (405)..(405): n is a, c, g, or t
gtagatgacctgcgggcngtctgctgggtgtctgtcagtgtgttcttctgccggtgtcttctgctggtgtgttcctctcaangtccagctgcttgtgtttgtcccctctagtgtttcagggtttttacaggcacaggatagggggtatggcgggccaggggtggtgttggaaaatgcaacatttaggcgggaaaacagaaatgcctgttctcacataggtccgtgagtataggcccgagggtgggagacctagccaggggaccccgcctttctctacccagcattttccctgccccgctccggtattcactagcagaaacagnttgctgctttttccntcccctcgnggcttttagaagcccatgaagggagctcttggttgtttgggcagaagaattcccagtnggttcaaggggttaagggataagttgggggaacctt

SEQ ID NO: 557819 - DNA, 368 bp, Homo sapiens
tttctttctaaaaactattagaaaaattgtcttcaaaataataaaaatcaccaggcgtagtggcccacacctgtaatcccagtgctttgggaggccaacgcaggaggatcgcttgagcccaggagtccaaggctgccgtgagctaggactgcatcactgcactccagcctaggcaacatagtgagaccctgtctctactaaaaataaatttaaaaaaaattagctgagtgtggtggtgcatgcatgtagttccagctactcaggaggctgaggctagaggatccttgagcccaggaggttgaggctgcagtgaggtgtgattgcgccactgcattccagcttgggcgacagagcgagacccagtctca

SEQ ID NO: 557820 - DNA, 370 bp, Homo sapiens
tgtccacacgtggcgttgatactgtagtttgcagtaagtggggaagttgggatgtatgagccctccaactgttctttttaaagatcgtatggcagtttctgtgaaaaatgcctttgtaagtttaataaggattgcattgactctgtagatcacttaaggtagtatggacatctttaattcttccaatccatgaatgtagatctttctatttatttgtcttcttcactgtctttcttcaatgtattatagttttcagtgtacagatcttttacctccttagttcagtctattcctaagtatttcattttggtaaatgagattgttttcttcatttcttttgggatagttcattgttaatgtatagaagtgc

SEQ ID NO: 557821 - DNA, 691 bp, Homo sapiens
cccggaggccaaccaaagaccaacttgcaacggctcggacatgcttattgccaaagtcatcgatgcctctaccaatcctgtgaaaaaattgtatttggaccaaacgcttattcccgtgagaagaatataatctctcaaccacccgcagtgtcggaagttcaccatgaaccctggcaagtatgcgcaaagccttcaatgtcagattgcgaacagatcaggaagaccattggatagtgttaatagaaaaggccaggatgcgggatgtacttgtcattgcattcgtatttaaaacacaaagctgctagggccacgctgtaggcaaggggtacaaactttcttataaaggtgtcgcaacaccgaggttttatagggtggttggcccgaatccatctaggaagtttccaagctgtcaggaattcgccaaaatatgttattcacacagttgtgtttcaggcccccctttttaaaaggcagggctttgttaaaaaggggtgacaggtggttttgctcccccattaagaaggccttctgtagtgggttaaatacaagtattaacaattgtggccttgacaccaaggaatttaattccttccacccggcagtgtgagtaggggggtccctcttcttaacccggcatgccacggttcccgtcccaaatcaacaaccaacaattttctgtaccccggaaata

SEQ ID NO: 557822 - DNA, 243 bp, Homo sapiens
tgagaaaatcaaagccaagtaccccgactacgaggtcacctgggctaacgcggggtattgagcactcccagcccggggcctgttgcctccaacagccacttcaaagcccccgcctttgcctgcactccttttgcaggggtggccctgcctgttcctggggcagcctttggtgacgtgctgtcccccaggccttggagacaggctagcctggccccaaaattaaacgtgttgccccccctgcca

SEQ ID NO: 557823 - DNA, 613 bp, Homo sapiens
caggcatcatgtgatcaaaggctcggacgcgctacatccacgcgatagactacggcaagacgggtcagccgagtcatcgaagatagacagggggtctggccgtgcgcactatgctgagtatatcaatcttccagtcggcgtcggcagagttggatatatccagacgaattcttgccaatcggtgagcttcgtcctttgtcctagatctaccggtccccagagccagaccaactgcctgcaaagagaaggcgctcgttgcgataaacataaaagccctgctgggctgtccagccttcagggccagcaagcacttcagaatcctcgcaagaaagcatgtccttgtgcggtaaaagatgacatacggcttcaatccccttgagtgtcgggtgctatgagtacggtagggtagtaaggttaccccggatggtccgtcatgaaaggatcccagggtttcacgaggctgtccgttgagcagaattctgagacgtggtcatcttctctctatatacctgtggaaacaccattccacgatgctgctcgaccttgtatgccaggtcacaaagtcctgaaagtgcttccggagtacgatccgatcagatctcctaggccaagc

SEQ ID NO: 557824 - DNA, 245 bp, Homo sapiens
gggccccccccccctttggggggggcccctttttttacccccccccccccttttccgggggccttttttttgggcccgccccttttccaaaaccctttttgtttttttggccccccttaccccccccttttttttggggcccttttatttttcggggggtttcccgggtttttttgggggggggaattgggggccccccccccccccccctttttttttcctttttttttttttttcccccccca

SEQ ID NO: 557825 - DNA, 220 bp, Homo sapiens
agccgcgagagcgagtctttgtgactcttgtatgcatgtgggtgagggtaaatgtctcgggacgccattgtaacggttcctggaagctgggccctctcattagcatatacagtactacaaaatgcagggcactgtcccaccgggatccagttgcaaagccttgtcttaacagccgagggcctcccttagttgtactggattctcagggagccctctgtgg

SEQ ID NO: 557826 - DNA, 271 bp, Homo sapiens
actgttctgtgcaaaggcctggaggagtcactcagagccaacctccttactgtggctgatgagttccccacaaagtgatgtgcgtcacttcctgtcactggaccccccctggttgtcactccccattggcctctggccagtcacacaggctttggctgtgcctgaaagacctaagacccattctttccatagggcctaacctatggctgtttttcccacccataacaaaacacccgtgaatacccgagctcatagtttactacatccgccg

SEQ ID NO: 557827 - DNA, 368 bp, Homo sapiens
  misc_feature (18)..(18): n is a, c, g, or t
  misc_feature (188)..(188): n is a, c, g, or t
  misc_feature (292)..(292): n is a, c, g, or t
  misc_feature (364)..(364): n is a, c, g, or t
tctaatccactgctggtnggaatataataaaatagtacatgctgagtgtggtggctcacacctgtaatcccagcactttgggaggctgaagtgagaggatcacttgggcccaggagtgcaagaccagcctgggcaacatagggaaatcctgtcgctacgaaaaataaaattagcggggcatggtggtntgtgcctgtggtcccagctacttagaaggcggaggcaggaggatcacttgagcctgagaggctgaggctgggttgagctgtaattttgtcaccatactccaggnctgggttgacaaagtgagacctttctcttttttgtatttttagtagagatgggggttttaccatatttaggncagg

SEQ ID NO: 557828 - DNA, 157 bp, Homo sapiens
  misc_feature (59)..(59): n is a, c, g, or t
  misc_feature (118)..(118): n is a, c, g, or t
tatgccctgaaatgaaacctctaagtttgacaaaatacccacaaaaacagaccttcctngttaacactttataagaaggtgtgacatttggtgggtggtcgttctcaatttataaaanaataaatgactttaaaggagaaataaatttatgtcagga

SEQ ID NO: 557829 - DNA, 256 bp, Homo sapiens
tgaagtagattgctatacctgacttctggctatgaaatgatctacagttataattagatatacttcccctcaatcttgactatactaatctgcagagatatctagacaggaacaatcgtgcgagttcatatataactctgcacctgctatttggatgactctgccaagtcacctaaactctggatctcagtcacctttggtcctgcattcctctacccttctacttgaaaattggaatgcgtccgtcgggggatcc

SEQ ID NO: 557830 - DNA, 209 bp, Homo sapiens
gaatggaataagaccacggcgttaagtctgagtgttaaacctagttaatggaatacctagtaaatatagtactaaaactactgtatagcaatctttgccaaaaacctgatgacggaaaccacagaggtaactaggaaattcccaaattgcgcttaaaaaaaatactacgagacttgagaattttttaacagtaacttcctaagtgtaag

SEQ ID NO: 557831 - DNA, 155 bp, Homo sapiens
tggaataagtatattcatttagtttccacccacctttgtttaatttggggatgtggtattgacaggagagagaaagagagagggaattggtgctaaagcggcggggtaagtgcggaaggaagtaaccctcctccctggctacggcttcgggctgg

SEQ ID NO: 557832 - DNA, 473 bp, Homo sapiens
acgccactgcactccagcctgggcgacaagagcaaaactctgtcttgaaaaaaaaaaaaaaaaaaattgaaaaattcgaaagagcgagggtaattttaggcagggccaggtgtgttaatgggctaccttctcagtgatgcctttgaatttagccaggattttgaaaagttggcacttgggggaattgatgagctgcccctttctcgtccttgttaaaggggggcagtaggaaggttccagcgtcaggtacataaaagttggactccaccatttgtctcctggttactcgctcattatggagccaacgtgctctttttcttctgcgtggctagaattgattgagaagaaaagagaggaaaggagtgtgacgggtattggacccaacacagaaccgattgtttaccacgccgacttttccttcatctgaaagaccaaagagaagtgcccgagagattgggcagttgggcttgcac

SEQ ID NO: 557833 - DNA, 729 bp, Homo sapiens
  misc_feature (530)..(530): n is a, c, g, or t
tggtaaatagagaacaaggtctcgctatgtggtccggaaggtgaccctccccactcatgcccccttgggctggggggcccatttcaagagattaccttgtgaagccatggttatcttgtggcgatggagcgcaccggggggtgaaagatcactcgtggccagtgactaccattctgtaaagttcaaaagggccgtagcgccttcatatttattccatacgtggtggacaaacatcagagggagcatgtctaccctgaagcaagagacaattatctatgtgtgaaacaaaaatagcgtgtgaggagtgtggcctgataacccgagggaagatcgatgtgggtgaagacgaacaatatgtgtagcgcactccaaaagattactaacaactcacacgcacttctgctccacaaggaaagaggagacatagtcagtctataaacaaatactatgaaaagcgcatgtagggggaggaacagcccaccaaaggtggggcgtcgtgttgtggtggggagaaatccaccacaaaaacnacacgctcgacgatgttgcagtaaaaatacaccccaaaagtgaaacaatatcttgtcgagagagaagcggggagtagaaaaagcaccaaaaggaagagacacaacaccagtaaggagcacacgcaagaaaagaaccgcaacaagaagaaggcgtgtggaggacggaccaaacaacaaaacaaaatagcaagcaagagca

SEQ ID NO: 557834 - DNA, 645 bp, Homo sapiens
  misc_feature (494)..(494): n is a, c, g, or t
  misc_feature (503)..(503): n is a, c, g, or t
  misc_feature (556)..(556): n is a, c, g, or t
cctaatgtaagtgaaaagctttagtggtacatacattgcctcaaaatcagaaacagaacattggttcactcatcttaaaccacatcatgggttaaagaaaaaaacattgcaaggaagacttcactcttctagaagggcatgatttggtaagtcctttttccatagtttagagttaaatagatacacaacagactaaattctcttgtgaaagttatgatagaattggctgaacagagaagtatctgtgcagttgctgacacttgtggcctatggagaaatacaccaaatgaagattatagagattcagtggtaggggactgataaagagattgcttagttaataaatagactctatccagtgcattctttgatctattcaattttaggggtttggtttatgaggactctgggtaaagagcatcctccaaactcttgggattatcctcccaatagtctaatagtatccctagtggtgcttgatctctcaaaggttntaagtgctntctggcagccatctctagaatgtcaaatggtcacttttcaagtggaatgacangagctgaaagtatgcaaccctgaggataatgaacttattgatgatgtgctgagaccagtaccccacaatgatggaacctgaggggggtt

SEQ ID NO: 557835 - DNA, 103 bp, Homo sapiens
aagcagttaatacagactcaaaagtgaaatggacatttgacaattctgtgaaatttgcctctgggactccctgggctctgggtgtagattggaggtgccacct

SEQ ID NO: 557836 - DNA, 105 bp, Homo sapiens
  misc_feature (105)..(105): n is a, c, g, or t
gggtcaagacgcgcgggagccggaggcgtctccaccgcagacatgacggaggggcccatgtattaggggccccatgcccacgggtatagagatggtctgactgcn

SEQ ID NO: 557837 - DNA, 118 bp, Homo sapiens
tatataacatgaaatgatgcctgcctgtatgccagtgacagccgcaaccctacaggcctcagtaccttgcagaaggtgatggggtagatgagtcatgcctccactcccattccatgca

SEQ ID NO: 557838 - DNA, 197 bp, Homo sapiens
gcggccgcctactactactaaattcgcggccgcgtcgacatacgcttcgggtacccgcaacctgctggtgcatggtcacagccagggtggtgctatcgcctacctgataaccgcatggctgcggatgcaacagcaatctggttcactgcccgccgacctccgcatcaagacctactgcagtgccgcacccaaacccg

SEQ ID NO: 557839 - DNA, 131 bp, Homo sapiens
tcccttcctagtaatcctttaattctcacccccggggtgcaattttttcccactaaaagagaccaaagcctgatctttgctgattagtcataattaactgactgcacccctatccttggccccttatcgag

SEQ ID NO: 557840 - DNA, 301 bp, Homo sapiens
ggagggtgattgtggacagagtgagtgtaaacacaagatgggcgcaaggaggagaaagacaaggcaggaagataaggacagaggaggtgagatgttggtgaggtgccagtgaatagcagagagagcccaaggttccatggcctgaccctgcgcaaggctgggttgggcctcagtatccccatctgtgaaatgggtataggcggaggagttcaagctccactctcgtttcctccttcgcgtggttagtggggtgaggctgctcgcaggacccaggaggtctgattgacggagacgacccatt

SEQ ID NO: 557841 - DNA, 240 bp, Homo sapiens
gataaaacccctcaaaaaatatatatagaaggaccatgtgtcagcataataaaagccatatactacagacccatagctagcatcttactgaatggagaaatttggaagtcttttaacatcaggaacatgacaaggatgcccacttttaccactcttctttaacatagtattggaagttctggctagagcaatcagaaaggagaaagaaataagggcactcaactgaggagcagcagccaa

SEQ ID NO: 557842 - DNA, 179 bp, Homo sapiens
aacagtgcgtcatgcgttccccactcggtgttaatacacgaatgctgtcaagaacgtatccattttgatcggaatggtaatcatgttgtaccacgtggaatgcttgttcgtgatgcatagtatccatcaccaaagcgtagatatcttcatcgtagacttgttttttcttatctgctaag

SEQ ID NO: 557843 - DNA, 142 bp, Homo sapiens
ctactgtgcagtctcccacctctgactgaccccagccttaaacatcgcccctggcagtaggccttgctgggtggagcctctgtgtgactccatacacctcccaccacaacactcatctgtcaaacaccacgcactctcagca

SEQ ID NO: 557844 - DNA, 140 bp, Homo sapiens
aacgagtgcaagctaaaagaagagacgtcgggcccaggggaacaggcacgagctgaactcttgagcctaacccagatggagagggagaagattgtatgggagtttagagcagctgtatcactcctataacaggagcatga

SEQ ID NO: 557845 - DNA, 290 bp, Homo sapiens
actctccctactgtatcctacttgaggctggaaattgacagttgtttcttgaggcaatctcctgctgtgagagctttctggctctggagcttctaagtgagcacagagtcagataagcttgtcctatagggagtgtctggtgaagggaaggtcaaggttataaggttataattgcatttctaaagcgctaagtaggaagtgaggaacatgagaaaagaaggagagagaaaagaaaaaaaataattaaaaccattttctttctcttagaaaaataggatacagtagggaga

SEQ ID NO: 557846 - DNA, 1448 bp, Homo sapiens
aagcagctacctcggaggcagggcgcgcagtgcgggcggcgatgagagtggggcgcagtccgcgagccccgacgctggggagcccaccgacataacccgtgcaacccaccgcaccccgtgcacaagagagctggcgggcgctggacacgtcgccctgggtgacctatcctcggagtgcagaaatccgcccctgcgagcatcctcttcctccataggctctgaaggcccgggggagcgtgagcgatgcccagcatgcacccgggcaagggcagtcgcacattagtgttaagccagatacaggacggagagggctagtcgtcacgcgtgcaagaggggggatcatcacacatgacttcagcgccgagtgtgcgctcatatccacaggcatcccaatgggtgaccgaccagaaaagcacaaagcatccagggactgaggaaaacggtggaccagatgaagggacggaactggccaggacagaaagatactatcaccatgggcccgagataccccaaggacagaagaacggagagagggttgcgaaacgttgcatatgcgcaagcacacggaagtggaacagacagaccatcacatactccataccacaaaaaaacgcgtaaaaatgaacagacaaggaaaacaggcagtcgggaacagcacggaaaagacacggcatggcatgggcaccaccaaaagaggaactcacaaccattaatacatcgtggggaatccaaggcagatgcacgaggggctaccacgatgacatggtacacggagtgcaacttaacctatggggaattaccgccacgtgtgatggaacacatgggaatagtaacaacaggttgcggcgaagagaacgatcagagaggaacaccccacggcaacagccgaaaccaggcaccacccgcgagagagaaggttacccatattggcagagcaagtggcgcaaagacgagaacgacaggggcaaatggggaacaaagaccagacgagaagaccaacccgagtagggcagcagccagagacgaagcgaaccacattggccaccgaggagaaacgagaggaggcgaaagactcacaacataacgaggagcaacagagacacacgagcaaaggaaagacaaccaggcacagagagccccaacgacacacgagcggcaaaccccatacatggagcaggacaagaggagagataaaagaagcgggatacgacgatgagaggcagacacgcggcaaagcaacacagaaagagagagcacgggcggaaacagcggaacagcacgaacccacgaggagagcaaaagagagcaagaagagagcaaaagaggaaaacggaagaaaaaaacagagaatccacatcgagaagacagagaaacgcagagcgaaacaaacaacagcaaaccgaacacagagacgaacagagaccaagcagcgccggagagaggaagcg

SEQ ID NO: 557847 - DNA, 208 bp, Homo sapiens
tggagggcagacagaagatgaagaacaaaggaacttttacaattttcttttagaaataccagtgattgcaggccaggtatggtggctcacacctgtaatcccagcactttgggaggccaaggcaggcggatcgcctgaggtcaggaattcgagaccagcctgaccaatatggcaaaactccgtctctactaaaaatacaaaacttagc

SEQ ID NO: 557848 - DNA, 262 bp, Homo sapiens
  misc_feature (181)..(181): n is a, c, g, or t
  misc_feature (232)..(232): n is a, c, g, or t
  misc_feature (235)..(235): n is a, c, g, or t
gcgattctcctgcctcggcctcctgagtagctgggactacgggcatgcaccaccacgcccagctaattttttgtatttctagtggagacagggtttcgccatgttggcaaggatggtctcgatttcttgacttcgtgatccgcccgccttggcctcccaaagtgctgggattacaggtgtnagccaccgcacccggcctcaaatacattttttttaatgggccttgtctttnccnggtttaaggcccttttccaaaatttct

SEQ ID NO: 557849 - DNA, 253 bp, Homo sapiens
cccccccccccccttttttttttgtttgcccccggtaaccccctggggttttttggtttcccccccgttggggggggagggggctttttaaagttttaaaaaaaaggtttaagggggtggttcccccaggttttttccctttttaccccccatttccaatggggggggtttttcccccccgggattggttttgttttcccaaaagccccggggggggcccctttttggtttttcccttttggtttttggccca

SEQ ID NO: 557850 - DNA, 469 bp, Homo sapiens
  misc_feature (340)..(340): n is a, c, g, or t
catgacctcgtggccccgtcttggcatgtggctgcttcaggaagggtggagggggcggtggctgtgggagatgaggacaggcagagacgggccccacctgggactgctgtggtctggaacgggcgtctaaactgcctgcagtctgcagcctctgcgtgtctttatggaaccgagaaccaactttgatttgtataaaagctgtacccagtgcggcctacgcatgtccgtcacggtctcacagcggtgagccgctgcctgtctgattcagccttagcccggctcttcctcctccttctgcacaacccgcccgtcttcgacagcctgcgctgcacgggggcancgtgccgggcttgctctgcgttccttgtggatttcctgcttctcagatcacagtcatccatttctacactcttgaaactctcaaacctttgaataataaaaacacaccaagtctttaagctaaaaaaaa

SEQ ID NO: 557851 - DNA, 419 bp, Homo sapiens
tatcgtggacacagcgctgttctcatccgtggtcactgagaggtcagggtcacctgatgactccgcatctgcttgagtccaactacactgtccaatcatcgaatccagatcgtcatcgatcttttgcatgttccagaacaagcttctctagttcaaggaacagatattctggagcttgcttctttgctttgtagaagctgttttaactctgcagcattaatactcatcgtccgtggtgtatgagctccctctacttccatgagtccattatcatctccacagcatccaattgtgtcagagttaagaatttgtctcataaattctaagaatgaagatgcaagctctcctgtgtccttactaaatgtgctgaccactcgtttcagtaaactatgcagagaactactgtttttccttaggtt

SEQ ID NO: 557852 - DNA, 823 bp, Homo sapiens
ggggcttatagggccaactttccgtaaattataaattttttggtgggacagaaaaaaggccggcaccttggcggccacaccaccccccttcttggcccacggcaaccccttatacttggagtggggggaaacaaaggggaaaaaaagggccccccccttggggagaaaaatggtccgctgtttggagacaccctgttgaaaaaacttggatggtatattggtggcacccgctatggcctttatattctgagagactttggaggagcccccctgctcggttaaaaaagccaaactttggagcgcccccccagccgctgaggccccacccccccctcggtggtttttgtagccacctaggcccccaactgtgccgcacagtggagctgctccccaagatttgcacatcatgtgtttaaattgccccaaaacttctctcgtgtggagagggcccctcttttagcctgagaaccgctctagtgagcccctcttttggcctgaaagacacttttagaatgttcctaacacgagtttactgttgtttagacatttgcagggcttcttttccgccaatgccacccacgccgattataattttgtcagccaagctattatctctaatgtagtgccaccccgactacgagcctgtgatcacttcactggtataaattttacctgcttgcacacataactaccatctctctcttaaacgagatcaggttagccaatgatgtaaaagaagctttattgtctagttgttttttttccccccagaccaaggcacagtttccctaagtttgagttgatagttatttaaaagaaacca

SEQ ID NO: 557853 - DNA, 102 bp, Homo sapiens
ggggccgcctactactactactactgctcgaattcaagcttctaacgatgtacggggacatggaaataaagcacatatcgctaccctgggcccctgcaaaaa

SEQ ID NO: 557854 - DNA, 140 bp, Homo sapiens
tgggtgcggaaaaggattggagcctacttccctccggtcagcctggaggagctgaggccctacttcaggcgacccgtgggtgtggcctttgcccgggcccctttagacgtgcaccagaaataaaggcgaagacccaaaaa

SEQ ID NO: 557855 - DNA, 132 bp, Homo sapiens
gagttgttgcggcggtttcggttactgcggtggcagctctgtcttggccggcccttgcactgctcgatttggggcttctatcgtggctttccgaggctgctgctcctgttcgcaaaatgagaccatggaaag

SEQ ID NO: 557856 - DNA, 161 bp, Homo sapiens
gccggtgagcccccatcctgcccctgcccaccaggtactgtgggcctgtggcggcaagatagggggagagagacccagagatgtgagagagagtcagagacagagacagagagagagagagagagacacagagagagacagagagagagcgagcgagcgcg

SEQ ID NO: 557857 - DNA, 351 bp, Homo sapiens
  misc_feature (77)..(77): n is a, c, g, or t
  misc_feature (116)..(116): n is a, c, g, or t
ctggagtaaagtgggtccgtaatccagtatgactggtgtttttataaaaaagaatgtcacatggagagacacatacnaggaagaatgaaatgtgaacaggaaggcagagatcaaangtgatgcctctacaagcaaatgattgccaaagattgccagcaatcaccagaaactaggaggctgacatggaacagattcttttttatagccctcagaaggaaccagcactgttgacactttggtctcgaacttctagcctccagaatcatgagacaattctgttgtttaggccaccccatctgtgttactttgctatggcaggctttggaaataaatacactggtcaatagaaaa

SEQ ID NO: 557858 - DNA, 1194 bp, Homo sapiens
gagcaaaactccatctcaaaaaaaaaaaaaaaaaaaagcttacaattctgactgggaagatgtcaaaacctgtgaaaagctaatttagcagtattaaggcaacacaaacatttagtgtgccaaagtgcatgtgattaagggcttaaagaaaggccagagcattatatttactgtgtagagttagaatagttaggggaagactttgtgtccttatagataaagagataggagggtgggcctgggcccttgaaaataagtaagtggttaaggtaagaatgctggtggtaaggattcctggataaagaagcaattggaaaagaaaggagaaggggaagtaagtaaaggggacaagagaaaacaattttttttttgggaggagaaccataaggcaaatttattaggttggaccaagagacaagagattggggggacatttttcgggttaccaggggaatttacctcttatggtggtgaataattctttaaattattaatttattcctcctggggaaaaaggagtaacctctgggaaatattcccttaaaaaggtgtgggaaggcaagtattgtccctcttgggatggggacaagaagggggggaatattcctgggcccctctccgcgggttatgcggggacaagatacactttaactaagagagaacctatttgggcgaaaaaaacgtcttgaaaactcttctttcccctataaatttaaacagagggtctcgccgttggggtcaaaccacgcgggggcgcaaatttcccaacccccaaattaatctaacatcgggaacaccacaattaagcggcaccgtgccccaaggtataaaggggccccgtgttccccatggaagtggcggactcctctggcacgacaacaaggacattcttctcgggctttaaaccaacccatttttactccgtggccgaactcctcggagccaccctttttaatccccttttttttttcaccccctcaatttggcggcctcaaagtcggggcgcagaacaaaccactccctcacgcgtgttctccctcaccacaggcgggccaccgtgggccggctctgtccattaaaacgattatgaacctggcggcaaacatgtcttctctccaacaccaacgcacagtcatcacaacccaacagcagaaacacactcactcagccatcaacaaaccacaacggcggggg

SEQ ID NO: 557859 - DNA, 313 bp, Homo sapiens
  misc_feature (22)..(22): n is a, c, g, or t
  misc_feature (40)..(40): n is a, c, g, or t
  misc_feature (62)..(62): n is a, c, g, or t
  misc_feature (107)..(107): n is a, c, g, or t
  misc_feature (132)..(132): n is a, c, g, or t
  misc_feature (169)..(169): n is a, c, g, or t
  misc_feature (276)..(276): n is a, c, g, or t
  misc_feature (304)..(304): n is a, c, g, or t
  misc_feature (311)..(311): n is a, c, g, or t
gccaaccatcctgaaacgccantgctcttggtctcctgantgtaccccaggtcctccccagntgcggtgtgcaccaaacgcgcctgcctgatgccctggcctgtganctggggaattcctgggccctgtgancccctaggcggcaggcccaggaatggctgggtagganagggaaaacctttgccccacgtctggctgtgacctcggtgaaagccgacaggagagagatgggaccctcctcctcagtagtggctgccagtccctcgttgcaagganagggtcatcataaccataaataaccctncccattncc

SEQ ID NO: 557860 - DNA, 475 bp, Homo sapiens
cagccaacatttctaagtcctttcctttgccctctgcttccttagaacttgccccagaccccaaatcagggaggaagatttgaacctgcctcctgtctccttgctggctggtcttgcaataaagtctttcttttctcaaaggcagtaccatggtattgcttccgtgtacattgagcagtgagcctgaggcaggaaaatagggtcaggaggcagggaacataaggccaattcacacttcggctgtaacaggaaatatccactccatagggcgtatgctgtaagtgactttgtaactttacttcatcctctgcatttacgtagagggtaagtgaagtaaacaatggaatcatctaggggatatttaaacttccaaaaattctgtatacgggcctttgagcccctatgttcgggccgctcccacactgtggaatgtaatttcgttttcaataaatcccttcattccttccttgcaaaa

SEQ ID NO: 557861 - DNA, 421 bp, Homo sapiens
  misc_feature (14)..(14): n is a, c, g, or t
  misc_feature (40)..(40): n is a, c, g, or t
  misc_feature (66)..(66): n is a, c, g, or t
  misc_feature (83)..(83): n is a, c, g, or t
  misc_feature (112)..(112): n is a, c, g, or t
  misc_feature (116)..(116): n is a, c, g, or t
  misc_feature (252)..(252): n is a, c, g, or t
  misc_feature (276)..(276): n is a, c, g, or t
  misc_feature (320)..(320): n is a, c, g, or t
  misc_feature (390)..(390): n is a, c, g, or t
  misc_feature (418)..(418): n is a, c, g, or t
attatctcagccantttggaaaggcagttttgagatttcncaaagaacttaaaacagaaccctccntttgatccaacaattcncactactggatgtttactcaaagggaaanaaancattttacaaaaaaagacactttggctgggcgcaatggcatcacacctgtaatcccagcactttgggatgccaaggcaggcggatcccgaggtcaagagatgcagaccatcctggccaacctggtaaaaccccatntttaccaaacctacaaaaattagntgggagtggtggcacacgcctgtagtcccagctacttgggaggntgaggcaggagaatcgcttgaacccaggatgcggaggttgcagtgagtcaagatggtgccactccactcncatcctggcaacagagggagactccatntca

SEQ ID NO: 557862 - DNA, 470 bp, Homo sapiens
  misc_feature (13)..(13): n is a, c, g, or t
  misc_feature (52)..(52): n is a, c, g, or t
  misc_feature (72)..(72): n is a, c, g, or t
  misc_feature (156)..(156): n is a, c, g, or t
  misc_feature (195)..(195): n is a, c, g, or t
gcgcacacacatncacacaccacacacataaatatacgtttgtacccgtaanatcccttcccattatcccanaggtttttgtgaagtcctttctggggggtttaggggagagtgtcccccaggaaatgtcccttagccacttgccacccccatgcntcccattctatataacttgaaagaagaaggccgggcacnaggtgtcacgcctgtaatcccagcaattggggaggccgaggcgggcggatcacttgaggtcaggagtttgagaccagcctggccaacgtagtgaaaccctgtctctactaaaaatacaaaaattagccagacatggtggcaggtgcctgtagtcccagctactcaggaggctcaggctggagaatcgcttgaacctgggaggtggaggttgcagtgagctgagaccgtaccactgcactctccagcctgggcaacagagcgagacttcatctcaa

SEQ ID NO: 557863 - DNA, 302 bp, Homo sapiens
ttcagagcggtgagtccttgctcagaaggcgggtagactcgggtccccgcgttggagctacctcctgagaacgggaggcccagccttcaccttgcagcggggtgtgtaggaggtggccttgcttgtcatcactgtgcccttcatccagcctccagccaccagagtttggtcttatgtctcccgctcaatccatcccactccaaactcagactgatatgtcttgagatgacccctgctttcctgataaagaggggctgggcatgtgagcttgtgtcccgaggtctttgggaaagctgagatgg

SEQ ID NO: 557864 - DNA, 971 bp, Homo sapiens
tcgcgccgatataataaattagaagaagtcacacaaacaatatgtacacaatttcacatacgatctgctcatacaagtcttctcacagtcttttcaccccatttggttccgctacatctttatgttgcttgaaacaccttcactcgaaacgtcatcttaaccccgcccctggaatatctagttggcaccgcctacacccttaatgtctaacccggtcccctctacattgactctttaccgtgtccatacactccacgttccccgcttgtgtatgcccaattcccattcaccccgccttaacagtaatttttcagccgcgtttggcacgttcaaccctcttgcgggttctccaacgaagagaagttgtggtcccaagaaatgggaacccttgtggctttccccgccagaggccggacgcgctcttttgcgctgcccccggtgacggctttgtaccccccgtcccgagggtgcgtttcgctggtgtcccccgctcttcacgggtcaacccgtctctgtatggttgctccccgggaatgcaccctgctttgaagcttggtgctttccttgggaccgagcgtgtcaagaccctgggagggtcacatgtttttatttatgttcacgaacatggggaccaactgttcgatccttgaggtatacgcctgctccacagctttgggggggccgtcccatcccctatgggtccccctcatgaccactgaattttatcttgagagggagctctatgcaaatatggaatttctgtgcacttctatggagaacccgaatgcggccataagtttctttaaagggtcgccaccacagaaatttagggtatccatatgggtatccgatatatacatacagcggtgtcccttcagtattagatcttcctgggcgccccctagggaaaaaaattttcctttgggccccccaatttaaaaacctacccataaaaaccggcctcatgtcga

SEQ ID NO: 557865 - DNA, 247 bp, Homo sapiens
ggtcaaataataggcgttcaaagtataatggcatttcagataaatcaagattggccatggattgatcatgttaacatgagttcattatggggggtgtccttttacatatacctgacatacgccattaatttatttaaaaagcactcactccggatgtctccctattgttttacgaaacacaaggcagcttggcagcgaacttaaattggtattcaactaaactttttcattaaattccaagaagtcg

SEQ ID NO: 557866 - DNA, 126 bp, Homo sapiens
ggctgagggtcaagtacgcagagattatggacaggcagacgcttatagatgtggccagaacatctcttcgtactaaagttcatgctgacactgtgcagtatgtcttaaccagaggactgtagtgga

SEQ ID NO: 557867 - DNA, 966 bp, Homo sapiens
ggagacaccgggatagagaacgggacggcaccactgagaaaggagtctggttggaagcaaatgtttttgtctaatggacttgcatctcctcacgcttgatcaggacttaaaggacggaggccgccccacgcctcttccctttcgctccaaatgcgccttaactcgcgctcgcgagatcgacccagggtaataccctctggccccacaggatgtgaagactggttggcagtcctcgccagatgcgccgacacctcgctgtcgccaggggaaagaactaaagacgtcgtgtgattgggaggggtggctagacaggaagaaaagcatgtccgaggcccctggtctccatagagaatggtgcttcgtccatgaaaacgtatgagtttctgattctccgggagccgttcaatggtgaggtggatgggacagacttccgttccgcaaaggagaaatgagatcctccatgcaggatctaggagagtgactgtgctgtgccaatagatatgcccagggtcctgccctcaggactagatttcaatgggggcatagagggtccaaatcctcgttgctaacataccacttcttggttgtaactccttgaccttgccagccttggaggagggaccatgagaacagaaattaccttgatgaaaagctacttctgtttcctgctttcccgtctcgacgtattgacggtgactgtctttgacctcccagagggcgtgaactctttcaactcgtgctgctgacctagcttctcagtggacttgccctcctaagcagagaagggctatgaggttgtgtgctgctggggaaggctggcagagcgaattacaccctctgctgttagtgtttggggtacctcattgaataacagatcttagtgttcctttccctggggcttaccagttaagcacatggagccttccccagaaggtacttccctgtttagaggaaggattggcatgg

SEQ ID NO: 557868 - DNA, 396 bp, Homo sapiens
agtcaggttgaggaagtaaaaacaggtcatctattcacaaaactgaaatacttcattaccccgaactaaacatacaaacgtgcttacagtatttgcatgaaaattgtctcaagtttgagctatcaagcttcatttcggttttccgtcaatattctgtgtaaaaacaaaaaaaacccactaaacttgccatctaacaatttctccgaggactggagaagtctgggccgtcaaaagcttcagcacaagattcatggagtataagccgtgaaaaagagaaccctacaacaccgggaaatcggcctacgtccccatttaattccctttacacctcagtacgaaactcccccattatattagaaaataattcaagggttaccataagtaagtccagaaaaa

SEQ ID NO: 557869 - DNA, 798 bp, Homo sapiens
  misc_feature (11)..(11): n is a, c, g, or t
  misc_feature (13)..(13): n is a, c, g, or t
  misc_feature (17)..(17): n is a, c, g, or t
  misc_feature (264)..(264): n is a, c, g, or t
  misc_feature (294)..(294): n is a, c, g, or t
  misc_feature (530)..(530): n is a, c, g, or t
  misc_feature (681)..(681): n is a, c, g, or t
  misc_feature (688)..(688): n is a, c, g, or t
  misc_feature (690)..(690): n is a, c, g, or t
  misc_feature (697)..(697): n is a, c, g, or t
  misc_feature (701)..(701): n is a, c, g, or t
  misc_feature (703)..(703): n is a, c, g, or t
  misc_feature (715)..(715): n is a, c, g, or t
  misc_feature (720)..(720): n is a, c, g, or t
cgaggatccgngnaccntggagagactatggcgctcaacaagaatcactcggagggcggcggagtgatcgtcaataacaccgagagcatcctaatgtcctatgatcacgtggaactcacattcaatgacatgaagaacgtgccagaaggccttcaaagggaccaagaaaggcactgtctaccttaccccttaccgggtcatctttctgtccaagggcaaggatgccagtgcagtccttcatgatgccattttatctcatgaaangactgtgagatcaagcagcccgtatttggntgcaaactacatcaagggaacagtgaaggcggaagcgggaggtggctgggaaggctctgcttcctacaagttgactttcacggcaggggtgcgccattgagttcggacagcggatgctccaggtggcatctcaagcctccagaggtgaagtccccagtggagcctatggctactcttacatgcccagcggggcctatgtctatcccccgccagtcgccaatggaatgtacccctgncctcctggctacccctatccagcgcgccccacctgagttctatccaggagccccgcatgatggacggggccatgggatacgtgcaggcccgcaccacgacctaccctgggcccatggaaactccggtcagcggccccgatgtcccctccantcctgcntngcgaagncaangnccgcagaagcangccgncagcgcctattacaacccaggcaaatcctcacaacgtctacatgcccacagagccagccgccgcacctccctataccc

SEQ ID NO: 557870 - DNA, 387 bp, Homo sapiens
ctgataatgctgtctcatctctcaccctgcctccagtcacactggctttttatcagctcctcgaatctccaagctcccttctacaaggggccttgtatcaaatccaagtgtggaaaggcaattaagcatcataacaattcaatgacttaggattccaacggtattgctaaagggacctgctatataaaccaggaccggattctggatgcattataacaattattcttacattactggggtcacaagaaggtaaaggaaaatggggcagagggacgaaataagaacaaatacaagctaagatcctggtagaagccatgggctgtaagatacaggaacagaggacatgtatgctctcagctggctgaggactgaccacttctccttact

SEQ ID NO: 557871 - DNA, 420 bp, Homo sapiens
acaatgactgacgaataggctcatgatgtccagcttcaatgtacgattgtcaagtcagtctacatgctccacaatgtcatgcaatcagcatcaggtagcatcattgcagcaacacagaggtctaccgtcacgtccaacagtgtgtcagatcagtcagccgtgcagcaatctcagcgtcatctgggtaatcatccatatcagctctcagatgatcgactgtcgctcagagactgtggctcacgagctcgctaagtccagttcatatcaacaagctttacactattcgagctcgtatgctggttccccatcatgatccatacagcatggtcgcgtgtagaccatgaattatgcacagcgtctgggcactctgtctcatgctcatgatctttgctgtatcgcacgtccaggcgtctggatcac

SEQ ID NO: 557872 - DNA, 111 bp, Homo sapiens
tcgctttatcatgttacagctacccaactgggtagtgactaagggtggtgatgattccagccatcaccatcggcccaactgccttcagttgaaaaggtagactagtagact

SEQ ID NO: 557873 - DNA, 81 bp, Homo sapiens
aaatgttgaaccctccccaccaccactttttttttttaaaccagggatgtctgttgaaataaaacattcagtctgacaaaa

SEQ ID NO: 557874 - DNA, 195 bp, Homo sapiens
cggacctggaatcaaagcagcaggtgtagttatatcagataaagtagactttaagcaacaatagtaaaaaaaaaaccaaagaaagtcattacataataattaaaggatcaatccaacaagaggatattacaatcctaaatttacatgccccataactctgtgagctcccagtcttcatacaaccaattactactt

SEQ ID NO: 557875 - DNA, 148 bp, Homo sapiens
tatctgtgtgctccttagatctttatttcgtgatgcgttgcctactcttcttgaaaagcaagaaatttatgtaaaagtactgtatgactttatgtcctatatcaaagcagatgtatattcaagttattaaattttaaaatttttgtca

SEQ ID NO: 557876 - DNA, 349 bp, Homo sapiens
agatccctcctttcctgcctgcctttgtatgatttgttcctggtcaagcccatgtgtgttgagagcttctcagactatccacctttgggtcgctttgctgttcgtgatttgagacaccctgttgcggtgggtgtcatcaaagcagtggacaagaaggctgctggagctggcaaggtcaccaagtctgcccagaaagctcagaaggctaaatgaatattatccctaatacctgccaccccactcttaatcagtggtggaagaacggtctcagaactgtttgtttcaattggccatttaagtttagtagtaaaagactggttaatgataacaatgcatcgtaaaaccttca

SEQ ID NO: 557877 - DNA, 216 bp, Homo sapiens
acccaccgccaggttgtactgagcttgggaagggagccttgctaaaacaccacacttgtgaaatcagaaaaaaaaaaaagcaagtgatggttcttacagggggggacggcgttcctgctggtttaggtcagaaaaaaaacctgagagagattcctaaaacaatgagggctgtaaggggactggtgaaaaaaatccagtggaaatattttctcagga

SEQ ID NO: 557878 - DNA, 1093 bp, Homo sapiens
gcggaagaatgccaaaggttccacacaggagtgggcgagaagggcgggagcctggccccacacctcgtggcccgaccccgtggccccccacaatgccccatgaggtgtctgcggagctgaatgatgttgctcctggacaaaaaccatggagccccagtggctgggagacagctcgctggatcaaatttgaatgaggacgtggaggaggagactgagcgctgggggaagccccactgtggcctccctctccttccgcagtctcctggagctccgcagtgacacctgtgcccatggggctgtgctcttggatctgtgaccagcagacacctgcccggagtggcccaccaggtggtggagcagatggtacatctctgaccagatcaaggccgaggacagggccaaacgtgctgctgggctctgctgttgaaacaccagacatcccaagtgatgagaaggacttctccttaccccgcaacatctcagctggcatccactgggcatcccatgctggggccatcacccatggtcagtgtggcttgagagtgacccccaaggtcaccgagacactcttcattgggagggtgtaccatgagaacccggctgcgaggtgagagcgagaagctgtgagacttgcctgcctccagagcacaaccgagactggcattcaacccgtcctccaagtcccaataccagtcgcctgacaccttcgctggaagaaccgaatttccttgtaagaaactgccgcgcagcgcccacctgcatgcgacacatgtgcgtgcgcttgcgtgtgatgttcccttcttcccggactcccaaccattggaaccttatgctgccggaatccggcgagagcatgctgacaacaccgcgacgccaagcctggatcggaccggttgcccggatacccatgatgcggttgtcacgtctaccgtgcctagcatcggcccctacgtgttgctcgccaaataattgcgcccacaccacagaaacacggtacgcctacactctccatgccacactgtgcgcaacacacatatccacgcgacccccctcactggcgtcacaaaggcaagaacgcataacggcccctcac

SEQ ID NO: 557879 - DNA, 211 bp, Homo sapiens
accagagaccacctctcctgggcttctcagtgtctcgctggcgggctccggcctgacgctggattgacatagcccttggcagggatgtaaacacacctaaccattaccgcagtacagctgcctcacaacctttgggatttccagacatgactgacactgcctgcaagttgttccacaagtttgcaggagatgtttgctcagtagattcacc

SEQ ID NO: 557880 - DNA, 155 bp, Homo sapiens
cggcatctggaccttctgaagaaggtcctactattattttctgtctcatactaaggagtccaatttattgatgcacaagagtaagaacataattgctgagcatgaaattcgtacatatctcctgtgctgcccaggacccataaggtccaggtatg

SEQ ID NO: 557881 - DNA, 139 bp, Homo sapiens
tcgaatcgacggttctcggagagggggatgtgtcagtgtcataggataatagtggagagaaggtcagcagataaacacatgaacaaggtctctgcatcatagaccatgtaaagaattaagtgctgtgctttagataaca

SEQ ID NO: 557882 - DNA, 297 bp, Homo sapiens
tctggagcaagctggggacaagggggagccagcgaagccacgctgctgaacatgctcaacatctcccccttctccttggggcgggtcatccagcaggggttcgacaagggcagcatctacaaccctgaagggctggatatcacagaggaaactctgcattctcgcttccgggagggtgtccgcaaggtggccagggtctgtctgcagatgggctacccaacggtggcatcagtaccccattctatcatcaaggggtacaaacgagtcctggcctggtcggtggagacggattacacc

SEQ ID NO: 557883 - DNA, 270 bp, Homo sapiens
tactagacagtgtagtataacattacacacgtggttcctgtactaacatgtatcccattgagtctgctgcaatttcgaagaatacaaacaaacaaaaaaggcagagaacaatatgaaaacattcgatgcttttattagattatcatctacaatagctggaagacagtactttgtaaacagatagttgtcagattatgcaatgcacatgtagcttatgttttcatttttttctctgccttttttgtgttgtacgtattctcttttccagta

SEQ ID NO: 557884 - DNA, 251 bp, Homo sapiens
gacaattccggtttttccgatcagtgtgctcatgccaggttctccgtcacccgtgggaagatgctttggtagccctcggcgtaaacgatgtttcgggtagaggcgatacccacattgcgcttagcctgaacgccgcgttgcagtgcgacgcgtgtgtagtattcccagagatgctcctggccggccatgcactggatggcagcatatttcttgtcccagacttcggtgatatccagcaggacatcaaggca

SEQ ID NO: 557885 - DNA, 355 bp, Homo sapiens
tattacctttggctgatgatctattctgtaggaagtctgctggaactggggtatctctctgatgatgtgtgatatttaccagagaaaaaacccaacccaaatgccccccccaaaagcaaagaaagtcatagcctgtgttttttaaagggcatggttcaaaattctttcccttcaaatgtgggggcctttgcccttttggttcagttccaataaagaaaagatttgcttttagttttctggcgatgcttgggcattgatgaccattccgggatcctgggttccccccccccatccctcccacgtttatcagcagtttccccagtttaataattgggcatttataatgcccccccca

SEQ ID NO: 557886 - DNA, 105 bp, Homo sapiens
cgtggggagtacggaactgctgccacctctctggaataaggccggtcccagtgggaagatttaacgcaggtcaggtagtgtggagacatcttcagctggacttga

SEQ ID NO: 557887 - DNA, 220 bp, Homo sapiens
gggggggccccccccccctttttttttccccctttaaaaacccgggggggtttccccccccccgttttttttttggggcgggggggggggtctttttttcccccggggcccctttttcccctttgccctttttttgggcccctttttccccttttttttcccaaaaccggggggggggggccccgggtttcccggggttttttcccccccccccccccca

SEQ ID NO: 557888 - DNA, 190 bp, Homo sapiens
gatacacaccatttgttttttgtgagacaccacaagaagatgtgcatgagcttaccagcacacatgaggagagatgggtggcctccatgggtatacatggtgacaagagtcaacaagagcgtgacttggttttcaatgaattcaaacatgggcaaggttctattttgattgttacagatgtggcctccag

SEQ ID NO: 557889 - DNA, 409 bp, Homo sapiens
cgcagctctcactcaggctgattgtacttagatctccagttgtgccacgctgtctctctccgtgcctggtctatttccgagttccggggctgacagcgggttgtaccagtgtgatgagacgctcgatctcagtgggcagtagggacagcatcagcgtcctgcgcttcatgtactaaatgtgcagctgggaacccctgttggttttcttacacatgccttatttcttggacgattgtgcacatgcgcgccggacagcgggtatgtgtcgatccagccttggttgtcttgtttccgatagcctgatgttatctccaggttgctccgggtgtcctgattatctggcggaacaagctggctggcggtcaggtacttcttatttgatcaagctgtggcgggcggcgtaccgaac

SEQ ID NO: 557890 - DNA, 141 bp, Homo sapiens
tttataatcaaacttaatattttcaatacactacagattatatttttcaactatttaaacttagggacaaataacagaggtcgactaaaaatacgtgaatcttttttcaaaattatttcagggggaactcggtcagagggg

SEQ ID NO: 557891 - DNA, 701 bp, Homo sapiens
tgggattggaccttcagcactcttcccggattggaccccccctgaggatgagcctcaggctccctccggcttggccagactcagcctgtcacccccaatgccagccatggcctggtgattccccacacatccttcctgcatcccccgaccctcccccgaccagcttggctcttgcccctgcccggattcttgagcccagccctgcctgtggcccacccctgagtggcccctgcccagcttcggggaagggtcctgaccacagggcatcttggaggctctggctgccttctgccatttaatttgccctttttctttttctcttgcttttaaaggggtggtggccccccccgtttagagatgacccctgggaaccgtgaacgctagagaattgtttttacacacgagtttgtgacccaagtcagagtggatcactggctggctttggcacgccacgggaaatttgtcttagttggagcctgctctgtgctcccccctcccattgctctgtccctctgcctgggctatgggaaatggggaatgcagatggcccagctccccccctgggtattccaaaacggccagacccacacatgttcctccccgcggctcactcgatgcctgcaggcccccgtgtgtgcctccactgattctgacttcaggaaaagtaacaccgagtggccttggcctgttgtcttccccct

SEQ ID NO: 557892 - DNA, 151 bp, Homo sapiens
  misc_feature (12)..(12): n is a, c, g, or t
  misc_feature (25)..(25): n is a, c, g, or t
  misc_feature (110)..(110): n is a, c, g, or t
ctgcactttgcngatttggactctnccttgggccgaccactctgtctcattctccttcccacctacatccatccgtcctggtcacacaaaccactcactgggaaacccanccagctcatccaactgcaaagcctgccaaatcggcaaagtg

SEQ ID NO: 557893 - DNA, 382 bp, Homo sapiens
agatcggaatagcgaggtcaacaatttctctgaggaaaaactctaatgtgcaatatttccttcccaattttttccctttcctgttctggctatgttcactacctgtgctcaccccattccatctctgagagacacacgcatcattagtcttctatctgcatagtttcaacacccaggaaacacaatacgaataaatttaataaagaaataaagaagcaagcagtattcctttaaatcagctgaatttttttaaggataaaaactaaaacaacaattctcgttgtggcttgatccctgacctcgctccaatgggttaagggtcctgtgttgccacaagctgtgggtaggttgtagatgcaactcggatactgtgtagctgttg

SEQ ID NO: 557894 - DNA, 250 bp, Homo sapiens
  misc_feature (115)..(115): n is a, c, g, or t
  misc_feature (224)..(224): n is a, c, g, or t
agcggccgccttttttggggggcaggatcggtggctaacatctgcaatcccagctacttagaggctgaggcagaagcaatgctttaaccttggaggcggcaggttgcattgagcntgagatcatgctagtgcgctccagcctgggcaacagagcgagacttcatctcagaaaataaaaaataggggccaggcacagtggctcatgcctgtaatgccggcacttngggaggccggggcggccgctgggtac

SEQ ID NO: 557895 - DNA, 445 bp, Homo sapiens
gctcgaccaactcctgacaactttgctgttttaagtttcaggctgagaaggggaaggagtcctgcctgattcaatgtaagtaggtttgtgcctcccactgagatatgcatagatgataagataagatggtttcttctggaatccttttagaaaagatcagcggaaatccccagatagagcagtctgtcactgctgttcaaataaccatggtattgtcttccagtgttttcttttctggacttactttgggtttctatagggtattctatttgggcaatctcttcctgcatggtagtaaaacacttacacctacattcttgttagtatttttttaagatcagttcaaaccggatctaaaagaatgcatatagttgtataacaaaatcagtgatttatataatttaagcctaaatatttataaattttggctgggcatgatggctca

SEQ ID NO: 557896 - DNA, 382 bp, Homo sapiens
aggagaccaggctgagatggagacccagtgctgaggtggaaggatcacatgagactgaagtcaaggctgcagtgagccataatcgtgccactgcactccagtctaggacagagagaccctgccttcaaaaaaaaatggccaggtgcagtggctcacatctgtaatctggtactttgggacgccaaggcgggaggatcaactgaggttgggagttccagaccagcctgactaacatggagaaaccccctctctactaaaaatacaaaattagctggacgtggtagcacatgcctgtaatcccagatactcaggaggctgaggcaggagaattacttgatcctgggaggctgagactacaatgagctgatttcacgccactgca

SEQ ID NO: 557897 - DNA, 211 bp, Homo sapiens
gctatcaccttggttactttagttaatgtcttatgcacggttcaggcgggcgtagatactttggaagaaagaaaggaatataaatgactgtacatgacacaatggttataaagtaactagagcttaattgagtactcaagtcaacattactggtataggaactgggagcccagactaaataccaaaccctcactactgacacattatggag

SEQ ID NO: 557898 - DNA, 586 bp, Homo sapiens
ccctcccaaagtactgggattacaggcgtgaccagtgtgcctggtgagttttcttaaagtgagcttaatttctgaactcttagtgatctcatatatgtacataaatctgtgatcccatttcttattgcacccattcaggaacactttatataaatgagtggcttttatattccatattatcagtagtatcatgggtcccattacaggcctattaacatcatacattgtcattagtcttgtgaagaaaaaattatgtacactatatattgtgtacccatggagaatttctctctaaagcagggctaaaaatttgtgggaaaatgttgtgacaaagcataccacagtgactccagatttacctcaatgctaagaattatgtcagttaggacaacacggaacagtcatttggaccctcagcgtagaccaatagatggcttgagagttaatgtagcttaagactttaaaaagttagaatttattctggtaactaaaaattatttgaaaacattatgcctctggttaaatcatgtgctgattacaccatctttctcttacccttgtgtattgaacctattgtccataatca

SEQ ID NO: 557899 - DNA, 492 bp, Homo sapiens
tggcacgtgtgtccactagcctcattctattagaaacaaaggctatctgccaccaacatgtttaaacaaagtagcattcctcatatataaagagtgttagaaatcaataaaaataaagcaacatgtgcaaagaacgtgcatacacttgggacacacaaaagacataggtgggaaattgtaaaagacttgaaaaaagaatttcactgctgggcacggtggctcatgcttataatcccagcactttgggaagccaaggccggtggatcacctgaggtcaggagttcgagaccagcctggccaacatggcaaaatcctttacctactaaaaatacaaagataagccagacgtggtggtgctcgcctataaccccagctactcgggaggatgaggcacgagaatcacttgaacccaggaaactgaggttgcagcgagctaagatcacactactgcactctagccagcctgggtgacagagtaagactccgtctcag

SEQ ID NO: 557900 - DNA, 128 bp, Homo sapiens
tgtgttgcagtgtgtgcactccaccggagctgttgtgtcttcggtttcactgcttgcgcctattgctaccagacaggtgggctgctgttgctcttcatcgccatgggcatcttcactttctctgcggc

SEQ ID NO: 557901 - DNA, 834 bp, Homo sapiens
gccacagaactaataacccgtcgagagcaccgaagcttaaagcaatggaacgggcgtttacttgtggcccacggagacactcggacaacgagatccttgtactcatagagcctgaagctcctccaactcacttagtcagtaatgacgattagtgtcgatgctgcgtcgtgctcaggtcatacacggtagagcagaggatatcgtgactagatggccgtgacagagcagaggcgctggacgggacagatcagacactagatgtgtgaggagtgagcatggaggaatcgctaatagctagtcgatcctgtggcatcaatgaagcgggtagtgccaggatattgtgtacactgggctcattatcccatcgcacaactttccagtacccctagcatgtccgcaaacttctcagtgcctatggtgaggtcagatgcgttccttcaggctgaggactggtttgtgagatgcaaaaagaaggcagcagcagccgtgggagggcaaaaaagcagtaccacagcaaggactacacagagggatgggtggagttccgtgacaagcgcatagccaagagtgtggcggccagtctacacaacacgcctatgggtacccacaggtgcagtcgcctcccattatgacctatggaatctcaagtacttgcaccatttcacctggtcccaccacagcgagcaccttgcctttgagcgccaggtgtgcacacaggcagcacctgagagtggaggtcactcaggccaagtgtgagaccatcttctatcttcaaagtgtgcaatggggacaatgctttcttgctgttgatggggatcttgctcacccagatgg

SEQ ID NO: 557902 - DNA, 170 bp, Homo sapiens
gacagtgagagaggctgtttggatctaagtcaataatggctcttgcaaagaatttctgcaatgtcttgcatgtggttctagaactcccttaaaggcagactataccttgatcgggggaagccagcctatcttgggcctcctttaccgttgcctttcatccactgtgtcct

SEQ ID NO: 557903 - DNA, 487 bp, Homo sapiens
tgttgatgtgaagctgagtgcaggaagaggattgggaggttgctgcagtggctggggagtctatcagattctgctgggagttaagagggggtccaggaggacctcaaggtctccgccttcagtcttgaggacagatagccactgggccactgagggtggcggaacccggcaggcagtcagggaggggggtagcggcccagggttcggcaccaggcagctgcacttgtgtgtggagctgaggccaggagaagagctctgagggagcggtgcagacacagcagaggagcagtgaggggcccacatgggcgagggaaagaccaaagagactgagcacgggcgtcccacagccagaggagggtgcgtggccgccagctgtgcctggcgcttgctcagaggttgcaggcaggtggaccggcttgcggaatgcctgcaatgggcccagggcctcaaggaggggtacggggggcggcttccacatacaccaaga

SEQ ID NO: 557904 - DNA, 374 bp, Homo sapiens
tccgcttatatgcaggaggcaagtgaggctatattgttggcctttatgaagacaccaacctgtgtgctatccatgccagacgtgtaacaatatatgccaaacagacataccagctagcacgccgacatacgtggagaacgtgctataagaatccactaatgatgggaaacatttcattctacaaaaaaaaaaaaaaaaatttctctatcttccggataatgggtacgtcctgaacgttagatatttttattccatggggatcaaacggtacctaagatactttgatggcgagtggaaaaataggggacagaaactcggtatgggcagtttccccattaacatacgtgtgtgactcccacctctaacctgcggag

SEQ ID NO: 557905 - DNA, 93 bp, Homo sapiens
  misc_feature (48)..(48): n is a, c, g, or t
  misc_feature (85)..(85): n is a, c, g, or t
aaaatggtatacactcacgttaactattaagggtcatttcgcctctgnattgctgaatgacaagtctctgtggacagacatcccngtgaattt

SEQ ID NO: 557906 - DNA, 412 bp, Homo sapiens
ttactgtgttttaatccaaaatttgtccttaaccttccatacctggttttccagcccaaggcttcactcagtactcggtggagaagagcaaaccatctgcccacatctgacctggctgaccagggctttcctgcaggggagggaagattctagcaccattccacttgtggatgtctctgagtggaaaatgatcttctctgagctttagtgactaacctgagggcctccattagattgtagttgtggcccacttttcttcactggattcgcaggcaatgaatgtgaaagattcccacaaaacaatagaatggatgcaaactaatcgtattatttatctatttattcatttttcagacagagcctcgtgcctgttgcccaggctggactctgtttccaaataaccacacacgta

SEQ ID NO: 557907 - DNA, 1011 bp, Homo sapiens
gtgaacgcgccgcagatggggttcctggtgaagagtcccggttctctccttgaatccactcgccagcccaggcgccctctgacgacgcagcctgcgacacccgcccctctcctgtgcgaggaacttgctactaccagcacatgccctaccaatatccagcactgaccccggagcaaagaaggagctgtctgacatcgctcaccggatctgtggctaccctggccaagggcatcctgggctgcagattgagtccactgtggaccattgtcaaagcggctgcgagtcaacattgggaccgagaacaccgaggagaacctggcgcttctaccgtctagattgcttgtgactagctgtcgaccggcgtgaaccccctgcatatgggtggtgtcgatcctcttccatgacgacacatctaccaggaaggccgtgattgatgggctgtccgcttaccccctaagttgatcataagtcccaagggctgagtgttggtgagagcatcgacaggcagacgacaggtggcgtggtccccccctggctagggacaaatggggcgagaataaacccaaccaaagggtatggcatggtgctgtcttgaggcgcgtgtgcccagtttacaacgaaggcacggagactgagtaccgccagaagtggccgtaggttgtgctggaagattgggggaacaacagccgcgcctcaagtacctcgcccagttgacttgggacaaattgcccatttggttccgtgggggccgcttattgccaaggtattcctgggccagcgccaaatgtcgcgtttgttgcccacttcgggtggcgcacggagaatctccccgcgaagggcggcccgtgtttgacatccttcgcagtatctgcccggaacggagctggtgctgctaaaggggcgaattagacacgaattcacctggaacgcctttcgtaagcccacccggtcccccggcatgtggcacaacactttcaagagggatcatgagaaccacacactcgacaatgc

SEQ ID NO: 557908 - DNA, 430 bp, Homo sapiens
  misc_feature (304)..(304): n is a, c, g, or t
  misc_feature (371)..(371): n is a, c, g, or t
cacgaggccgacgacacccacgcgcaggacgcggtgatctatgcgctcgggctgatcggcaaccagtaccgattcggcggtcgcaacccggacagcggggtggactgcagtggcatggtgagctggatcttcgaacaggtggcgggcatacgcctgccgcacaacgcggcgcagatcgcccgcctggcgcgaccggtcgatcgcgcgtcgctgcagccgggcgatctggtgttcttcaacaccagcggcaagccgcattcacatatgggcatctacgccggcgagggacgcttcatccacgcancgagcacgcgcggcaagtatgtgcgcaccgatgcgctggacagcggctggttcgccgcgcgcatcancggactgcgcacgctgcgtcgcgacgtctgaaggaaatcctgatggggctcgcctgacg

SEQ ID NO: 557909 - DNA, 397 bp, Homo sapiens
agtagcagcggagcggtgaggcccacaggtgccagcggtgagaacggcacgtagatgcccagggcgatcacgatgcaggtcatcatcaacaccggccaggcggcgtgctctggaagaacgggatcttgcgggcgcgcagcatatgcaccaccagggttggcgagagcagcccttcgataaaccagccggactggaacagcgtctgcatttccacactgtgggccgagaacacgtaccacatcagcgcaaaggtggtgatgtcgaagatcgacgaggtcggcccgatccagatcatgaagcggccgatgtttttcgcatcccacttgcgtggcttggccaggtattccttgtccatcttgtcccaaggcagggccagtggggagctggtggaagggag

SEQ ID NO: 557910 - DNA, 780 bp, Homo sapiens
  misc_feature (10)..(10): n is a, c, g, or t
  misc_feature (14)..(14): n is a, c, g, or t
  misc_feature (26)..(26): n is a, c, g, or t
  misc_feature (38)..(38): n is a, c, g, or t
  misc_feature (58)..(58): n is a, c, g, or t
  misc_feature (64)..(64): n is a, c, g, or t
  misc_feature (69)..(69): n is a, c, g, or t
  misc_feature (71)..(71): n is a, c, g, or t
  misc_feature (86)..(86): n is a, c, g, or t
  misc_feature (90)..(90): n is a, c, g, or t
  misc_feature (92)..(92): n is a, c, g, or t
  misc_feature (103)..(105): n is a, c, g, or t
  misc_feature (109)..(109): n is a, c, g, or t
  misc_feature (123)..(123): n is a, c, g, or t
  misc_feature (127)..(127): n is a, c, g, or t
  misc_feature (130)..(131): n is a, c, g, or t
  misc_feature (159)..(159): n is a, c, g, or t
  misc_feature (205)..(205): n is a, c, g, or t
  misc_feature (295)..(295): n is a, c, g, or t
  misc_feature (319)..(319): n is a, c, g, or t
  misc_feature (353)..(353): n is a, c, g, or t
  misc_feature (441)..(441): n is a, c, g, or t
  misc_feature (478)..(478): n is a, c, g, or t
  misc_feature (495)..(495): n is a, c, g, or t
  misc_feature (528)..(528): n is a, c, g, or t
  misc_feature (552)..(552): n is a, c, g, or t
  misc_feature (584)..(584): n is a, c, g, or t
  misc_feature (630)..(630): n is a, c, g, or t
  misc_feature (642)..(642): n is a, c, g, or t
  misc_feature (650)..(650): n is a, c, g, or t
  misc_feature (661)..(661): n is a, c, g, or t
  misc_feature (665)..(665): n is a, c, g, or t
  misc_feature (679)..(679): n is a, c, g, or t
  misc_feature (747)..(747): n is a, c, g, or t
gagcgtcgcntttnccgatccgccgnccgtccagcacncgccgccagctcaccatggntgatgntatcncngcgctcgtcgtcganaacngntccggcatgtnnnaggncggcttcgcgggcnacgntgnnccccgggcacgtctttccctccatcgtngggcgccccaggcaccagggcgtgatggtgggcatgggttacgaangatttctattttcgagcgatcgagagcccatgagcaagatgaggcatcctcaccctgaagtagccccatcgagcacggcatcgttaccanctgggacgacatggagaaaatctnggcaccacaccttctacaatgagctgcgtgtggntcccgaggagcaccccgtgctgctgatcgaggcctcccctgaaccccaaggtcgagactgcgatgaagatagactcagatacatagtntggagacctctcaaacaccccgagcgagtgtagcgtngactatccatggctgtngctagtccctgctaccgctctctcggccgatanccactggtcatcggtgtatggganctccggctgacggtgggtcacccaacacctgntgccccactctatcgagggggatagtgcccctccccccaatgccantccctggcggtntgggaccntggactggggncggngaccctgaactganctaccctcaatgaaagaatccctcacccgagccgcgggcctacatgctttcacccacccatcgggccngagccggtgaaattccgttgccgctcaccattt

SEQ ID NO: 557911 - DNA, 164 bp, Homo sapiens
ccgcaccggcggcaccgtccacgtggtggtcaacaaccaggtcggcttcaccaccccgccctcggatgcgcggtcgatgacgtactccaccgacatggctaaggccatccaggccccggtgttccacgtcaacgcagatgacccggagtcggtggcacgtgtgg

SEQ ID NO: 557912 - DNA, 1890 bp, Homo sapiens
attttttttttttaactttggtattttaaggtagagacggcggtttcaccaggtgggccaggcgggtctccaattccggaccccaagggatccaccttataggccgtggccgccaacatttcgtgaaccgtggtctttttctcgtggtcagtggtatttcaaaggtccagcgcgtggaacactccaaatttacagggtccctttacaggttatttgggtcgcggtgggtctattcgagtctcttgtgggtccacagtgtgtgcgccggagtcccctgtgtgtgtgaaacggtggagagtgctgtggtgtgtgtgtgaggacaaacaggggggactgtgagaacacgctctacaaggtgacaggggggcccagcagacaatcacacaagagggaaaaagagaaacacagcaagacacgacgatggacaccaccacgccgcagaaaccacaccaataccacacataacaccgagggccaaccacaaatcacgacacaacatcacaataccagagaagtgtaatgcagcccgacgggagaaaacaaaacagacggagaaaaaaaaagagagaacacaacgagagaaaggacacacacaaagagaacaagagaaatataagacaacacaagaaagccagcacagccgacgaaagggaacaggaggacagcagcaggtaatacaaacggcaggccagcagcaccaatcaagcaacagaagaagcaccaaaacaagaagcccacaacagcacacgagaagacactaagcacagaaagagacgaaagagaaataagagacagaaccaacaaaacgactcaactaatcgctagacgacacaacacagcacacaagagcagccacaccaagacgaaacaacaaacgaagtaggggaagagagacgaccgagccaaacaatagacaaaaacaaacacaacggagaaacacgagaacgaagaccagcggcggaaaccacatgcactatacgagcaaacaaatactcaacacaagaagaagacaacaaaaaacgccccaccaaaaagactgacggagacacaaaaacgcgccaacaatagaacaaccacaacagacgcacacaagagcgaacgaaaacagggagggccaacagaacgcaccacactcaacggtgagagaacacgacaactagaaaaaagaaccggacaacaaacaccagcacaacacaaacacgaccagcaaaaagacagaaaaacgagaaccaacgaagaagcagagcagaacaaaaaccagacaacaaaacaaacaaacacagccaagagcaaacaaaagaaacacaagcacgaaatcgtggagaagcatatagagaacacaaacccttagcagcgccacgaagacgagacaagaaaaaaagcacaaaaacacaagccagactaaacacaagcagacaagagccagagacgagctgaactgccgagagataaaaaaaacaccagcaggggcaagaagctgagaaccgagagaaaaaaacattcacgggacgaagaacaacgaggcaaacaaaggcacgagagtaaacaagaacagcaaaagagaagaacaaaacaaaagagagaatagatatgtcacacagcacaaacaacgcagacacagtagacgagagacgtctataagatgaggagaacaggataaacagaagaaagctgtagcacagaagcaaagtagagaacagaaatagctataaaagttattacgatgataacatgcgaacagaacagaagaatggtacaataatgtcagtcaaatagctacagaaaagaacaaaaaagacaaaacaaagcaataaccaatatatactcgcagtgtgacagagacgataagagcgacgagcacgactacgaacaagcgcaacgttgagtaag

SEQ ID NO: 557913 - DNA, 112 bp, Homo sapiens
tatttcgagtgacgcgagacatccaagtgttgaatttcttatcccaaatgctgtatttgggcagaactatggtgtcatggcagaagcctcactttacaattgatcctgtcta

SEQ ID NO: 557914 - DNA, 466 bp, Homo sapiens
acagtgttgacgtccatcgtggctggcctgtccccggaagcggcccatgacacggtgcagcgcgtcgctgataacctggttgaatactttgccggccgccccgtgcttacaccggtggccttgccagcgcccgcaaaatgaccaatcaggcacgctgatcacccttcaacacgctaacctattaaaccgccccgaccttgtcgctgggcggctatgcgcattagattaggaaatagtccaaggcctttagaataagcagaagggataagcatggcgctgaacgaccaatcgacccagattcgcccaggcgaagaacttgatgccagcctgatcgatccctacctcaaagctcatatttcgggcctgagcggtaccgtcaaaatcagccaggatttagtgtagggcaccgatcactcggtctttgtcgagaacacttttgactgtatcaaacttaaaagttagcaaa

SEQ ID NO: 557915 - DNA, 930 bp, Homo sapiens
  misc_feature (192)..(192): n is a, c, g, or t
gttctgccatatactagccatatccacatctgtgtgtcagggcccatcctgttcggcagcttcatcatgccctgatgcctcatgggataggtggacgtgcctcaatcagtgagatagtggccactgtgtagggggcgctcggtgattaccgggaggacggagtcatgctttgctaacaatcactagcccctngggggatcggcgtggtgagtcatcgaagagatacatgcatcagctcgctttactcgggtgttgcatacaatatagactactcactgtcatcgcgtatacagttccgcagtaggcgatgcacctgagcgacagtgaatctagttatctgggtaactgggaggacgaaaaaaaaatagattctatccgacgaagtagtagcaacctcatccagtgtggtgattcaagttctctgatatggatcgactagctgggtagatatgcatagaaatcttgagagtctgtgaagtgcattcgctaatgtagtggagacgagtatcccgcaaaagccatgtgcttcactgtgttccacaggacatgctgggtgtatgacaactaacattgcactgtgtcacatctgaggtgcgactatgtaaaccgctctactagcatattttgagaattagggctgtggggacggaaatgctaagtagatgagcaattccattatccggtagagccactatatccgctacaagcccggtacgcgatcatctgccgagaatgactagggtatgggattgcctgacatatcttggctgcaaagctatgcatctgagtttgggtcccgagtacccccgtgtggttggcccttggcgccttcggaagacgagttgcaaccgcccagctgatatcggtccggaggcttgtattgccactgggacttggtttcctgcccccaaaggacttcggattgccaag

SEQ ID NO: 557916 - DNA, 661 bp, Homo sapiens
tgcctgtttctaaatacccatttcctttaacagtccttgtacccgtgcatctcctgttcttgaactttatacagggtccatagtctctcattcacaaatgttgaacccaaaatatcccaacccgaattttttttccttaccttaatgcaaaaggtaatttagcaacatatctgccttgaactgatgtaaagctattacaagtctcatttgatcccacttagatatattgtgctgaaaagtacaagtgtagtatctagtggtattaataatatatgtcccatattatctaaaatgtgaaatagcgtgaatccaacgcacagcgtgggttaacatacatatatactagcgctgcactctgaaaccttagtataacaaccccgagtaccaatagtgtccccagagggtctgcatgttggattctatataccatcctctaccaaaagaacacagggctctctggaggagaagtcgattccagggcagggacagggataatacaagagcctggtggtgctagaaagaaaggaagtgctcaacacaaaaagccagaatggagaatgtttatggggcacaagaatccaactgaaggattggccacaggtgtaagacctggagccacacaataaatggtgataatattgctcataacacaatactgact

SEQ ID NO: 557917 - DNA, 869 bp, Homo sapiens
gacagagccattgcagtgcgatgcgggcctgcccagtgtccctggtccccctgctgccagtatgaaggtcccaccaatgcctctttgctccaagccatgtggcgtaactcgtcatggttgggaacagccaaggtgagtgaattctcgtgtggctcacacccccatgagaaagccactggcctccggcctggtgcggcggatggctcacgctatgtcctgtcccaacacttttgggcgaggcccaggcctgggtggactcacagagtgtcacgcgatgttcacatgcaatccagtcctgcgccaccgaagtgcgttgacaatcctcccagcgcccattcgttaacctatcatatagcataagcataattagcaaaacacacaacttcaatgacaagacgcttgttgacggagtggcaaagcgcttgcttccagtctccaagggccctaggcatatggcgtgaagggtgcgttgcagccgtgactgtgtgcattacattaccagccgttggaaactcccaatggctgaggtgcgcgaagagagcgtgcagagtgggcttgcacgtcggcctatcagttcgttcggcgggacgcaaggattagccaagcttaccggaagcccagtatggtgctggcccgatgcaatgtcatatgggaggcaacctacgcgtatcgttacagagataaagacacacaagaaaaaagaagtgccgtacgcctaaggttgagaggaccgatacggagagcacacgcatcaacgagcatcgggatgtcgcacccctacacaatcaaacctgtacaggaacagaaaagcgacaaggtagataccacggcatgagaataacaacagcgagagggggaagtacacacga

SEQ ID NO: 557918 - DNA, 890 bp, Homo sapiens
aaaacaggaaatcgatgagttggaagcaattgtgagagctgggatgtctgcataatactgtccttacagtaagttgaacatcatctgacaaaatgtgggcctttgaccgatatgtggcactgcatcccaccttgccactaagcacttacaccagttaggatgtgacgtaagcttaggtgagcacaacatttccaggggagctcttcaacattaaggcagtatgagtatcatggcttgggtcctgtcggtttattatctttcggtccagggaatggattgaatggtgttccattgcctcttctcacattcttcatgtaattaatttcgtttgattgccctctgtggaaaggattaacaataagttatcacgtcatgacaaagtgtgtatgtgtggttccagatctgtgtacactttgagaaggataatggtggaacatttgacgtgggtttcccttgtccctttccatatttaaacctattttccaaattcatctgctcagctcacattttttcagtggtgcccttctcttatctgccatgtccatagccataatgccaccatcatagagatcaggcgggttaagaaaggatggtaggtagcacagcggacagtctttgatcctcatgtagaatatggggtatgaaatacacggggaaggaggattcgacccctctcacctacatggtctcgtaacagctgggtgcctaagtgtatgcattgaagcctaacaattcgttcaccttaagagggcatattcgaaattgggaacattcactacgcaggacctgctttgccagctaaccggacggggtaatcccccgggatcgtcgaagtcgctgccacccactgcaggcttaaaaacgacaaagccctagagattgtctcaccc

SEQ ID NO: 557919 - DNA, 957 bp, Homo sapiens
  misc_feature (25)..(25): n is a, c, g, or t
  misc_feature (28)..(28): n is a, c, g, or t
  misc_feature (282)..(282): n is a, c, g, or t
  misc_feature (447)..(447): n is a, c, g, or t
  misc_feature (520)..(520): n is a, c, g, or t
  misc_feature (526)..(526): n is a, c, g, or t
  misc_feature (548)..(548): n is a, c, g, or t
  misc_feature (819)..(819): n is a, c, g, or t
  misc_feature (921)..(921): n is a, c, g, or t
gggccggtgaggcgccggcggccangcngcggaaggcgcgggccgagcagagccgggcgttggagcccgcgcgcgcatggaggcgttgccggcagccccctgagggcagcggggagacaagacccggcgactcgcgcatcctcgagccgccacgcgctctcgccaccgggcggcgacgggccgcggagccggcgcggccatggcgacgggcggccagcagaaggagaacacgctgcttcacctcttcgccggcgggtgtggaggcacagttggtgctatttncacttgtccactagaagtcattaagacacggttgcagtcttcaagattagctctccggacagtctactatcctcaggttcatctggggaccattagtggagctggaatggtgagaccaacatccgtgacacctggactctttcaggttctgaagcggtgccagtntcccgggtgacacctttcttctaaggaacatgcagtgctttggacataaggaaactgaagacaggtcgatctnggaganagagggaccaaagtcacttttnagaggcttgggtccaaatttggttggagtgcaccatcaagggctgtatactttgcatgttactccaaagccaaagagcaatttaatggcattttcgtgcctaacagcaatattgtgcatattttctcagctggctctgcagcttttatcacaaattccttaatgaatcctatatggatggttaaaacccgaatgcagctagaacagaaagtgaggggctctaagcagatgaatacactccagtgtgctcgttacgtttaccagaccgaagncattcgtggcttctatagaggattaactgcctcgtatgctggaatttcgaaactataatctgctttgctatttatgaaagttaaagaagtatctgaaaaagncccattagctcttctgcaatgggactgagaaaattc

SEQ ID NO: 557920 - DNA, 879 bp, Homo sapiens
  misc_feature (25)..(25): n is a, c, g, or t
  misc_feature (28)..(28): n is a, c, g, or t
  misc_feature (282)..(282): n is a, c, g, or t
  misc_feature (442)..(442): n is a, c, g, or t
  misc_feature (448)..(448): n is a, c, g, or t
  misc_feature (470)..(470): n is a, c, g, or t
  misc_feature (741)..(741): n is a, c, g, or t
  misc_feature (843)..(843): n is a, c, g, or t
gggccggtgaggcgccggcggccangcngcggaaggcgcgggccgagcagagccgggcgttggagcccgcgcgcgcatggaggcgttgccggcagccccctgagggcagcggggagacaagacccggcgactcgcgcatcctcgagccgccacgcgctctcgccaccgggcggcgacgggccgcggagccggcgcggccatggcgacgggcggccagcagaaggagaacacgctgcttcacctcttcgccggcgggtgtggaggcacagttggtgctatttncacttgtccactagaagtcattaagacacggttgcagtcttcaagattagctctccggacagtctactatcctcaggttcatctggggaccattagtggagctggaatggtgagaccaacatccgtgacacctggactctttcaggttctgaaggatctnggaganagagggaccaaagtcacttttnagaggcttgggtccaaatttggttggagtgcaccatcaagggctgtatactttgcatgttactccaaagccaaagagcaatttaatggcattttcgtgcctaacagcaatattgtgcatattttctcagctggctctgcagcttttatcacaaattccttaatgaatcctatatggatggttaaaacccgaatgcagctagaacagaaagtgaggggctctaagcagatgaatacactccagtgtgctcgttacgtttaccagaccgaagncattcgtggcttctatagaggattaactgcctcgtatgctggaatttcgaaactataatctgctttgctatttatgaaagttaaagaagtatctgaaaaagncccattagctcttctgcaatgggactgagaaaattc

SEQ ID NO: 557921 - DNA, 372 bp, Homo sapiens
attttgatcacacaccacaaatactatgggtgatcgtggggttgtattacaaccccacgatcactgagctggtgaaggaggatgtcctttcatccttccgcttgctttctccttcccttttcctggaatattttggtggaatggtgaattagcacttattgtctattgcaactcccttctagagtgtcttcttatgtttcaaagactggaaagctaaaaacgattttccccagatttccttgcagctatgcttttgtatgcagtgaatgctcaacccctcaggtacacaagtgatgatttggaaggcagatgtaaagcaaaatggagaggtgttgcttctgttgttccttctgggtgatcgtggggttgtaa

SEQ ID NO: 557922 - DNA, 205 bp, Homo sapiens
aactcatgctccatctgttccctcccaccctcgaatgtgcagatggactcaggtggcctgtcctcatcacgcaatggaatgctgtagagtcacaccatcctccatgtctggtcaccctccccatgacactcccttctacggtgcctctgtgttatctcgcctctaataaaacactttggcacagtgggatcttgttacctgtgga

SEQ ID NO: 557923 - DNA, 904 bp, Homo sapiens
  misc_feature (763)..(763): n is a, c, g, or t
gaaacgagcagagtgacagtgctggagcttgccgtctggtgggcgcacccgttgtgtcgcgaaaggctttaggattagagagcttctcaggcggttgttgcggtaagtgtcacacccagtgggaaggaaccaccattaggtggcattgcgccccgcctgcggttggtcctcccccttggggggttgccagaatatttggtctagggcatgtcccaccaagggctttgttccggggggggcacaccagccccctcacctggggggaaccttctctgtctaagacagcggtggccgcaacgtagccccccggacccccttgcccagcccggtccccctgggaaagtatttttcttttccgggcgtctacaacacgcgcggtcacctccggaacctggagccacacgactggggtcccctccagtaacaaaggcgcccacagtctcccggtttttgcaagggagtgtagtttccgaccagccagtgtaccagcaagggggctcgctcagaaccacaagggcggtgtcaattcggggcttttcacacgcaagcaccgcgtcctcgctccgatgtcccccctccggggccaggaattcttctcagtcgtctcgctcccctgtccccacacgctgtttataaatgtgcccgtctttgacccttgattcatcagcgcacttacaagggccccgcagatgggcgcaaggtactctctctgatcgccggtgtcgtgatccagggtgcccgatggtccattcttcaagcggcngagcaatcgcttctctttgggcagtgtgctggcgccccatggggcccgttagttcctcgatccccgccaccccgaggggttctttttttttggggagacccctctccaccccaaaggaaccaaaaaacaaaccacaaaaca

SEQ ID NO: 557924 - DNA, 734 bp, Homo sapiens
ctgctaggtacgaggccgggtggtgtacatattatctactgctgtcgccttctctgccttatctcgaccttatctcgctctgctgctctgcagtgtgacgagtcctgaatcctcttcccacccagcccgcgcctttcttcttttgcctgcgctgttctatttctccttcggccgccgccgccactgctgcacacagctggtgtatggtgcctgcgcttttacccccaatgtctgttccctgcagcctatggcccagtgcctgccttgtggtatttcttgctcaatggtaaccacatccctctttaaaaattcctgcctgaaaaagagaagacgctttaccctgactctttgtgtgcctgttatctcactgtgctgaactttcttgaccaatgtatacaactacccatgagtgtgcctatgtgatgaatgttgcttgtactagatgatgcagttctgacttcaactgctgagccaccttgtggaacctagctgatgatcgtggggtggttccatctcccaacttgtccatttttgtttgcatattctaatgtgacccagacatacggcttggttggcccgtctcttgtctttcctggtttatgactttcggctttgtggaatacggctgagatgacatgtgatttatttgatgatgcaaactactccgatggcctgttggctgacatgaacaaaccttgtcaatgttattgatacctattgttatgaacataccc

SEQ ID NO: 557925 - DNA, 156 bp, Homo sapiens
aaacatgcacagcaagcaccacaccaagcaaagcacaacattcttctttttgtgcgttctccttacaatataacacagctctcacttcctcatgcatgcttcgtcatcaacatctcacattccatgatccctactcctgtatcatggcatgttctc

SEQ ID NO: 557926 - DNA, 288 bp, Homo sapiens
cctgatttgcctgggagtgatagtgaatgcctgtgagggaagctgaggctggaggatcacttgagcccaggaggtgggccgtgtttgcaccactgcactccagcttggatgacaaagtgagaccgtctctcaaaaaaaaaaaaaaactttaaagcccatatttaatatgcaatatgtgggatagtatatcctttgaaagcccttaaattttaaaaatttagatttcagatcaaagtcttgcaaaggggccagactaggtgcctcatgcctgaaaccccagcaatgcca

SEQ ID NO: 557927 - DNA, 240 bp, Homo sapiens
gtccaccttcattgacagcgacctctgtatcggcatctgcagagacggtgcctcggagtacaatcagtcatctctgtcagattccgtatgccccatgaaactgtgaaagtggagcggttaacgatgcaatcagcttgggtcacccctatgtgccatgctgacggcgaaatggcgactatcagggggtgtggtgccagagggaagggccctgctggtgtgtggacgcccagagcaaggaga

SEQ ID NO: 557928 - DNA, 81 bp, Homo sapiens
accgaggacacggccatttattactgttgtagacagtgggacgatttttggactggttacttggactactggggccaggga

SEQ ID NO: 557929 - DNA, 112 bp, Homo sapiens
accccccccacccagcggatgggaacgctccaaattttcggcccctaaaaagttaaaggttacaaatttaaaaaacctccaacacacacctggtggatggctagccctataa

SEQ ID NO: 557930 - DNA, 220 bp, Homo sapiens
tgaggatcctgcagtgcgaatatgtggatcttaaactagccaacatgaactcattctgattgaccagcacacaaaaggcttttcatcacagtccaaaatacccccacagacgattccggatgtgaagtagccagatgttgaggtcctgggctgccgtggttacacgtggtttgcgactgcgaggttggtcagatctactgcccaattctctaaatcgaca

SEQ ID NO: 557931 - DNA, 268 bp, Homo sapiens
  misc_feature (111)..(111): n is a, c, g, or t
  misc_feature (228)..(228): n is a, c, g, or t
  misc_feature (247)..(247): n is a, c, g, or t
cgggaagatggaggggtctttgggggcctttgggaacatggagtcctattctgttccgcctgggcctcggtggcggcttgcacgcccgagatgacggccgctgcctagganggcgcagggcgattgcgcgtgtcctgctcctcttaggcccgggaccgcgggatgggtgtcggcgtgaccaggcctgagctccctgtctctcctcagtgacatcgtctttaaaccctngcgtggcaatccctgacgnaccgccgtgatgcccagggaa

SEQ ID NO: 557932 - DNA, 107 bp, Homo sapiens
agaactaactttgacttgtaccctgggcaactctgctggcctcagtgtagctacaaggtgagagtgtccatccctgcacctgctcctccaatagccaccaatgcgcc

SEQ ID NO: 557933 - DNA, 140 bp, Homo sapiens
cataatagcatggacgtacctcggtttatgtactatctggcctgtagcgcctgtatgaagaaagtaattaagggagtgatggggtggcagtgcgagagcaacagtcgtagtagtaaatattggtggccagggcccgagag

SEQ ID NO: 557934 - DNA, 401 bp, Homo sapiens
agggcatccatcgtagcacttagaaaaatgatcacttcttttttggctttgtggtggcatgtgtgtgtgtgtatttgtatatacacacatatatatataaatacacagacacacatatatacaaacacacgcattcattttcgtccacagttcctggctcataactcccacagcccttgttacactcttttgttacaacattgggtgtgtcaggcctcaggagacaatcactctaacctcctgcccttccttttacctgcccaagacaggactctaatcttccctacctttctgatggtgggtcataaaactcattccagagacggtcccaccccacctttgtcatacaagcctcaaaaggccttccagcctgggcaacataatgagaccttgtctctacc

SEQ ID NO: 557935 - DNA, 257 bp, Homo sapiens
ctcatgttagccaaactcaaccgaataaactacagtgataaactctataaacttgctttggaagagtccaagaaggaaggctatgacttgcgtctggatgccattccaatccaagcagccaaggcttcaagagatattgctagtgattacaagtacaaggaaggctaccgcaaacagcttggccaccatattggggcccggaacattaaggatgacccgaagatgatgtggtccatccatgtggccaagatccagag

SEQ ID NO: 557936 - DNA, 125 bp, Homo sapiens
tgccatcatacaatcagtacaaggggattctaacttggtgaccaagaaagaagaaatttacccgttatacaatgtctcctcgttaagaaaacatggagaacattactcgtgaaataaaaaaggta

SEQ ID NO: 557937 - DNA, 104 bp, Homo sapiens
gggaactcggcaaatcttaccccgtctgtttaccaaaaacatcacctgtagcatcaccagttattagagggcaccgcctgcccaggtgacacatgttctaacgg

SEQ ID NO: 557938 - DNA, 1681 bp, Homo sapiens
  misc_feature (352)..(352): n is a, c, g, or t
gtgtgtcagtgctggtgtgtcggggtgtgtctgtgacgtcgtttgggagtgtgtggctctcttcgcaggtggtgctgatgatagtctcctggaatataatccacaccccgtggggttgccaagacaacaagcacacccattttttggggcggaccacccttttgggacccctctcgagagggagttctccaccacacagtgggttggtgctccacacgaaaatgacgcccacggcgcctctattgtttatacagctgcgtcgcgcgcctcctcgcgcgtaacattatgttacccgcgggggctccttataaagggggtatgccccgatggacgcaccttgtgggtgtggccngaaaaaatattcttccggcgcaccatgagtggccttctgggtgggttcccccgcccacattggggggccccatgccctgcggccgccccccgcgcgcccccgggtgggggtttacccccgcggtgttgttgtggttgtaaaggcgagccacatggtccctggtgtgggcgcccccccaaacggtggtgtgtcgctgttttttttgtgcccgcaagagggggttccccccctcggaattggtcccccaccacgagaatttgttcgccgcaccactttgtggtgggaacacactcctgggggtgccgcgtgtatattaagaggcgccaccacaacaagatggggggatgagtaaagattttttcccgccgctctttgtgtggggagccacaacacactacgaggttgttgtcagagaaatgtagtgaattaatataggtgtgacccccaacccttgtgtgccctctctgtataagccccccccgtggaggcgccttgttctcccgcaggaatgtgtggtgcgcccccacatataggagaccacacatgtgtgtagtataaaagagttttgtgtgtgcagcacacacaaagatgtggcgtcttccccacatattatctcccgcgcgaggtgttgctggggacagttactgcaacacacaccccgggttgtcttcacgacggggttctactactctctccgacttttctcacacacagcagagtagtgtgtgtgtgtctccctggtgtgtctgtgtggggcgctgatcacactggagggcgtctccacacacacactgtggccactattttctgagagagggtgtcccctcttgtggtgggatatagtctctctctcagggcgccacactgtgttgggacacacaaggggtgtatcacacacatttgggcgccacagtgtgatttcacattgtgccacttcccgcacccacacagctctgcgcagagacacacacaggagcgcacactgtggggttttgaaggacccctctgcccacaggggccacacagtttcacacagtgttttcctctggccgcccacaggaagagttccaccacttcttcacaaagaaatgtggggctttcaccccacagtgttcacaaggctgagtgagatttgaaaacacactcggtgggctgagaaaaccggcttcacttcccacgatggctctgttggggtgccacagtgacactccccccttggggcccttctggagacacaatggccgggccctgcacactcactgagagggctttcccaattttgctgccccccttttaaaactcccccataaattttacttcccgtcccca

SEQ ID NO: 557939 - DNA, 324 bp, Homo sapiens
gtgctctgtggttctgcgcgtgcagagagggagagaatgagagggcagtgaatgacagtgacatggatggaagagtgggaaggagctggcctggctcagccctaggctgtccctgcagccagggtgtccgggcgctggccagtcagagaaagggggccatggactgttgtggcaaatagggagacaaggagacagaccctgcagtcctactacagtctggagtggggtcctaagaagaagggtcccaactcaacccctgtcagagtccactgatggggtgggggctgacccctgccattcgattgtcatactcctgggaaaccc

SEQ ID NO: 557940 - DNA, 497 bp, Homo sapiens
  misc_feature (183)..(183): n is a, c, g, or t
  misc_feature (294)..(294): n is a, c, g, or t
  misc_feature (310)..(310): n is a, c, g, or t
  misc_feature (398)..(398): n is a, c, g, or t
  misc_feature (442)..(442): n is a, c, g, or t
  misc_feature (471)..(471): n is a, c, g, or t
  misc_feature (489)..(489): n is a, c, g, or t
cctagatcttgacatcactcactattatcactttcggtcttctctaaaacaacaacttgaatgctatggcaggaaagggctacaaatatacattggttaaccaagcagaatacacagatatttggctttacaacttgcaccttaaaataccagtatacgtagctaggttcatatagatgtcantagcaatattagggctatgtgcccaagctatgcatagacagtttacatttttcaagacctacatactagaaagggctatgtgtgatatgaactgggcaacatacattcctngtgaagcccatctcangttacaacgcaaagtgtgttaacgttccatattctggcaaaggaattttggactgggcaaaacttccacaatctggatgcaattgtcnttaagcaagtttttaacacaaagtggtttccgcagtctactctngccattctggccgagtaggtgatgctcanaagatcttgtggggtacncgagctcg

SEQ ID NO: 557941 - DNA, 293 bp, Homo sapiens
tagcgacggtggacgcatgttattttactcctacgaatatgattacaaagtgactttttgctcatgcttggattgagtgtgtacccggagactagggggaatcagtgaacaaatgccccctataatggcgaacactgctcctatagataaagacatacgttggcagtgtgcgcctacatactatgtatcatgtactacaatgtctcgggaggcacattcaatagtacacatgcccgttagacctcctacggtgacataggacgattttataccccagagctcataatatttgc

SEQ ID NO: 557942 - DNA, 164 bp, Homo sapiens
  misc_feature (27)..(27): n is a, c, g, or t
  misc_feature (43)..(44): n is a, c, g, or t
  misc_feature (51)..(51): n is a, c, g, or t
aaggatcccgtgcaagcggcttgtgtntgggtacgggtggatnngtggggngagaaggtggataggtgggaaaggatgctgtggggatgtggtgaggcgagatgtcggtgtggtaggcgcgcctctttacccctcccaccctcaactatacacaagccgcttca

SEQ ID NO: 557943 - DNA, 177 bp, Homo sapiens
aggcggatctggcccagcacctcaacgaggtgtcgcgtccggcgctggtgcagctgcgcgacggctggccgcgctcgagacctgggacgccgcggcgatcaacggcgcgatcaaggccgtcatcggcgagctgaagatcaagatgccgcagctggccatcccgctgcgtgtcctggt

SEQ ID NO: 557944 - DNA, 428 bp, Homo sapiens
tctagaggatcgctcgtaacgagccacccaatgctgaaataagcagcgcctgcctgagcagctgtgaactgtaccttgggaggtcacactttctctggaaagagccgcgacatgagcttgctggaggagaacgtccacgcagttcttgcaagcaggtggacgccggtgacccagccgtggaagcctgtgagaaccggcggaaggtgctctaccagcgtgcacccaggaatattcaccggcatgtgatcctctctgagatcaaggaagccgtcggcgctcgttacggaacagcgcctcctaacactcctccgtaacgaggccagccatcatttaaagaaagcgtaacagctcactggtcaagcgatcctgcgcggaaaatgtaacggggctcaagccgttcgccgaaggtatatggggcgccgttagga

SEQ ID NO: 557945 - DNA, 143 bp, Homo sapiens
gcatgcttccagagcagcaggtgaacacagggcagagggagctggaacccgagggccaggaagctgcattccagaacacccctaatgagggtgtgagaagtgccttctccttccccaggatggactcttctcggctcaggctc

SEQ ID NO: 557946 - DNA, 250 bp, Homo sapiens
  misc_feature (68)..(68): n is a, c, g, or t
  misc_feature (106)..(106): n is a, c, g, or t
  misc_feature (165)..(165): n is a, c, g, or t
  misc_feature (243)..(243): n is a, c, g, or t
ttagtcgaccaagacacacacatgcagacacacagacatgcacacagccgcacacacacagatgtgtncacacacagatgcgtgcacacacagacccgtgcacggncacacaggcgcgcacagacacagacacgtgcacagacacacacagcacatgcacacatncagacacaccagacgtgcacacagacacacagctcgcgcacacagacacacacagatgcacacaggcatggggacagntccacat

SEQ ID NO: 557947 - DNA, 984 bp, Homo sapiens
ggaccagcctggccaacatggtgaatccccatctctactaaaaatataaaaattagccagacatggtggtgggtacctgtaatcccggctgcttgggaggctgaggcaggagaatcgcttgaacatgggaggcggaggttgcagtgagctgagatcgtaccactgcactccagcctgggcgatagagccagactgagtctcaaaaaaaaaaaaaaatttaccttttttgggtaaggttgtacttcttaaataagggctcatggtcactaccaactttgcctgcttggtaatagagtcctattcacttttgctcccaaccccacttacggagaatgactgatgactagttgtatacacagtggttgtgcccttgagaaggctctgttgccagcagtggtgatcgactcacgggccttcccccttgtctggctgatgtgatggctccttggtccttccttctgaaggaggtaaaagggggcacacgggccacctgtggaaagtaggcagaaaagcctcccttgggttgcagatttctctgagcaacaagaacttgggcctcatagttaaccttactccaaaagcttccgctgttgacaatacttacactaatttttaatattacattaacaacgatttaaacttgtgcaacaacacactaaccaaacacaaacaagacctctcaaagcgacattcaaattgtcacgaggtaggctgagacaaaacgagaggttaactggacaattgtggccaaatgttggcccatcataagagtagtttaaccgcgtagaaaccccaaaggagtatatccgagtgtgtacacccaaacacgggtggtgtcataatcattggggcaaggggagtacaccaccatattattatagtagagaagatgcacgaataattagcaattgctccaagaataaagagcacgaagggtgttaatacagccagtgggttttgaggacagcagcaagaagagaacga

SEQ ID NO: 557948 - DNA, 456 bp, Homo sapiens
ttctttgtcccgggtaaacaccaacgctgagtgctaggagaatcgctcggacttgggatgtgcggcggtgtgcagtgcacgccagcgatcatgccattgcatacaagcctgggtgacagagtgagactatatctcaaaaaaaaaaaaaaaaaaattaaaagacaataccaaagtcatcctatccactaaccttgatatacctatccggcttactattgaaacacattacaaccatttccccagggggattgcaaagtccttaagttgattgtatcttctccaccttagatgtctaataacttaatactgcaatttaaggttacctatcattaataattctccatcttgtattagcaaccgaatttccggctaagtatacgggattagtcacctcagccagtaaagaaactccccattttacctgtaggattcagaggctggaaagacccagggtgc

SEQ ID NO: 557949 - DNA, 336 bp, Homo sapiens
atagtaattaggattaagaatgcgttgagatactgattctgtattataatcgtgattaaaaagttaatggtagatttatgggataattatactgaatgttcatatgaatgtaaactctgccaaaattgatgtgtgtttaattgagtttttttactttaagtgataagaccaagttgaatcactgaggaaggtcattctaaattttgggtggataattagttgggtttttaattatgatttggaaaatgaatgatttccctgacctattctctattcctgaactacatctctgatggtgaggactccaattctgagcataaggacttaggtcgacgc

SEQ ID NO: 557950 - DNA, 837 bp, Homo sapiens
  misc_feature (624)..(624): n is a, c, g, or t
gggaagacagtgtattccaaacgcagagctgttggagaacctggtcagccagatggccctttcgagcaggaattctcaggccaagtgctcaagtgagcaggccctgaaacagttcagtgcccttctgaaaacctggctcagcagttaaccctcctgagggcaagaacaggatgaggagatagtgaatgtggcacaaaggacagggagatacgtggatgttgtgaaaaggcggagcttagaacagaggatctcaaggtctcagctgaatgaattgtggtcgattttccagagacctgagtacctacaggggaaaagtttctggtgtgataaagagtataatgtgtcttgtgtgggcagcatcccagggggttgcagattaaggaacagattttacagcaaagatttcgaaaggccttcgagggattccagcagtggtgtgtttaatgcaaaaatcatacccgcaagtgtttgggatatacctcaaaatataagtgaagttcaactagtcttcagaaaatacgaggagttcgttgtcagacaagtgaaacctggaccagcacaggttaaacatgatggtgtctaagggaatttctgagtaccctgtgacaaagagaagcgaaaggnatccagggcaaagttaacgctgcaaagaagattgggaaaatttcattcaattctcaccaaaaaaaaaaaaaaaaaatttggggggtggccggaaggttttaaacattcgtgggggcgggcaggtatgatgcatgtgcaagggcagagaaacggctcgagtggggttcacaaaaaggggggggttgaaacagggtggcttgttaagcaagtacg

SEQ ID NO: 557951 - DNA, 116 bp, Homo sapiens
caccagagtgttctctagtgatgtgaacccacctcggaagttccgagctggacacagcccctggacagtgatccagacagctggccgtccccctagactcctgttggctggcgaca

SEQ ID NO: 557952 - DNA, 281 bp, Homo sapiens
taaaaatccctttttttttttcaaaaaatgtgggggggggggagtaacttgataaacttttccacccgctccctttgggttcattttgcctttggggggggggggggcttacaaaacctggggggcttgcctttgccttggcaccccaaatgcttaaatgcgggtccctcctggttgtttaaagctggggggactaggccccctccccgaaagcccccattttgggttgggggggcctgcccttccccttaatttaaaaactgtttttggggtttaacctg

SEQ ID NO: 557953 - DNA, 1234 bp, Homo sapiens
cccccccccccccacccaatctattaataacgtgatggtatatgtggatgattagtgggtccacacgacttgtaattgttcctatattgttatgtgtgtctaccagtgacaccatgtagtttgccctcaaaattggtgcgtggtcttgttgcctcccccgtgttgttttaacacgacttctctcggggggaacaatagtttgtcttaccactctgtcccgcccctccttttatagcaacacccgaccctgttcgatatgcacaaatacgggtttcaaattaaagcacctcgggatataaaaggggccccaatggagccactctccggaaaggttcacatttgcgggaaaagacaggcgcccaaaaagaggccccccgtggacccccgtgtcttaaggccccatggggagcatcgtataaagaaaagactcccctatgtaaccgcgctctccagatgagtagaaaatgtatccccgcatagctccccataaattcaagctcaactcttgggggacctgggggctttttgaagatagatgggacccccctcaggggtgaaactgataggccgtgggaggttaatatgggggttttttcgagcttggagatattcccccctcgggaatatttctttgttttaaatagttggtgttcacagactctggatatttttctcgataaagaccccactagtgatattgtaaggttttaactcggatatttatatttttaagggagagtgggtaaatgtcttcccctcttttgagattaaagttggtttcacacctaatggtggctatatatcacgtaaggtaattcttcacgtgtcacggttcccgctaagctgaaatgccacttgttaatataataaattaattaatttgtaaatcaccacttgtaagcttgaaatttgggcttgtacccgcactcttttgtaattctggaacatactggttaacttagaactttgggaggtcccaatttggtttcacgtcacagtaagtctactttgtagtttaagtagagcttcatcaactatggtctattttgggtttgtagttttaaatttagagattgtgttaaaattgagtgttttgcacatttgagacttcacatttgaacacattagttgagagtaaaattatttaatttttgaattttggaatttgaacatttactgtaatttgtaatataactgctgtgaaatacttgaataaagatgaccagaaaaacca

SEQ ID NO: 557954 - DNA, 924 bp, Homo sapiens
gtgacgctgctgcaccacggtgctggaggaagcggaaaatgagccaccccgaactcctgcagctgccccgggacctggaacagccctcgcaagcagcagggatcaacctggagatcatccgctcagagtgccagctccaacctgaagaagcttctgtgatgacctgagctggaagggtgtcttgcctcctgtggcctgaggtccaggagcagtacaccgagcgcctccagtgccagcatctcaggcctattcctgggcactggacgagcatgttttgaggccatcgagcagaagcaactgggagctggccgacctacctgtgtgagtgacgcccagcagcatgtccctgtgagtgacactgttcagcaccatgaatgtgctttccatggtgaccattttcctccagctgccctgaaggagaacaaggaccggaattgagcattgctggcagaaaggcatgagaggaaggaaagcagcaagctggctggacggattgacggcgctgaaccggacaaccgaggggaacaagagaccgggacagccctgcacacgacaacggggcccggcgaaagcaactgacgagaaggtgatgttgacaaaacccactgcccatagctgacctgacacacaaggaacaggactactacaaagcatagaggagtaaagacaagccgccggagagcacagagagaggacaaccagaaaggggggcagcaaagggcaggcaccaatgggaatcccccccaggagccggacgacgcatgtaggcaaacaaggtaaccactgcaggaagaccccgcggcaaacaacccgatgaccagcccatgagcccgcctagacgacaacagcagaaagaccgggtaagacatgaacaccggacacgcagccaacaccacagacaacacagcagcagccaccaacgca

SEQ ID NO: 557955 - DNA, 378 bp, Homo sapiens
ggcaaacggaaagactacatctcccaggccgccacgctttccagctggagtcctagggcgctgactgctccccagtttccgtagggaagcgctgggctaccgcggctattgtgcgtcgcgccctcgccctcctcttcccgctgcagtgtctatggagcgaggctacgtttcattgccgccctggcttaacccttccggcgcctaaaaggacggccggccggccggctcccttgcaccaggaagaagtcttagcagccagcgggccctggtcaggaaactctaagaaccatgggtcatcccccgctggagttcagcgactgctacctggacagccccgatttccgcgagaggctcaagtgttatgagcaggaactggag

SEQ ID NO: 557956 - DNA, 144 bp, Homo sapiens
ttcacactcactgccttctacatcctactacctctcatcactacctactacgtcctactacgctctcatcactgccttctacgtccttctacttctcatcactgccttctacgtccctctacgtctcatcactgccttctacgt

SEQ ID NO: 557957 - DNA, 574 bp, Homo sapiens
  misc_feature (207)..(207): n is a, c, g, or t
  misc_feature (394)..(394): n is a, c, g, or t
  misc_feature (468)..(468): n is a, c, g, or t
ggggcgaactgaggcgagtgaagtggactctgagggctaccgctaccgccactgctgcggcaggggcgtggagggcagagggccgcggaggccgcagttgcaaacatggctcagagcagagacagcagaaacccattcaccaagcccagcaagcttaacaacccctttcaagacccagctataatccagcaccaacccagccaacantataccacacttaacatctacaacccttttaagacccaaaaaccaccaccagcctataagcctccagcccctaccccattacctccaccctcagctccctccttacagccctcaagaaaactcagccccacagaacctaagaactataactcatacagcactcgaacctcagctacagcaaccacancgtaagctactaaagaaacaaaaaaaactcaaccagaaaacagaaaagtgtaaccgaaaagagcgagagctcancatactaccctaaaaacacagctactcgacaaacaattagccccctctaccttcttttttccaaatcaaccctacttttgcagaacatctcgcataagatcccccg

SEQ ID NO: 557958 - DNA, 554 bp, Homo sapiens
gacatgaagaacttaaacagtaattgtgaatacctgatgtctattattctgtcttcttcatatcagagactctacaaggtgtggcacacagtccatcatagtcatagtcatagctttctcctggagtataaatatgatacgttgcatctaggtttaaattatttgcacctactggggctattcctaaaacctattcatcagccatatatatgctaataaacagaagtggataaaaaatttttaagagaattcctatataaaatatgtttaccaattacatctagataagaatcagcttgtaaaccatattctcttttatgtagcacagaaattcgtacctgtaggaaaagtgcattaaaatatcttgtcttcataaagcacagattcgtgaacagtaacagggcagtggttcttgatacatgttagctaggactgtttgttttctttgttagtttgtatgcgagagtctcactctgtcacccaggctggggtgaatggaacaatctggctcactgaaactccgcctcctgggtacaagcgatcctctgctcagc

SEQ ID NO: 557959 - DNA, 456 bp, Homo sapiens
  misc_feature (175)..(175): n is a, c, g, or t
  misc_feature (182)..(182): n is a, c, g, or t
cctaaagatactacctagattctgaatagaaaccattggtcatctattgtctctaagggcagccacttataagacttttgtctccgcaatcttaacctgaacattccctttctatcaatcccaggtctttagacaaactcaaccagttgtcaaccagaaaatgtttgaattaacntatagcntggaagccccacctcacccttcccccccccgcgcccccccgccccgccaccctgccaccctgcccctggttttgagttgttctgcctttcaggaccaaaccaatgcatttcttaaatgcatttgattgatgtctcatgcctgtctaaaatgtataaaaccaagctgtaccctgaccaccttgggcacatgttcttgggacctcctgagggctgtgtcatgggccatggtcactcatatttggctcaaaataaatctcttcaaataaaaaaaaaa

SEQ ID NO: 557960 - DNA, 133 bp, Homo sapiens
gtagtgtaatcatatctcactactagccgagctcctgggctctagcaatcctcccacctcagcctcttgagtagctggaaatccaggtgcacactaccatgtccagctaatgttttttggttttggtttttgt

SEQ ID NO: 557961 - DNA, 867 bp, Homo sapiens
cggaagcctggctcgttggccatgttcggggacgcatgttcattaagttcatataaacatacttttcatcttgtctgtggtttgaagactgcgttcattctgcctctagtaccagcggttactctgtctgtgatcaatgtgatgtcacaggagacgtccttagagtaatcgaggacgaaatgagtccaggggcgtggaagatatgacttctatattggtctgggattggctatgagctccagcatgtgcattggaggaagcttttcatcttggcaaaaagacaagagggcctccttcgacttgccaggaacaggctctactgatagcgagtggtgagctggtgagtgtggccagatttgcggctgcgtagtgcgttggcaccgagccactctgagtgactccagctaggagctctcagcgtgctaggtaagtgccattctttcttcatacttactctaatgaaagacttaatcttcagtgggaaaattggggtgtcgctaagatatctaggatctacagttcatggtcattcatgctccacaggaagaggagattgagacttagatgatatgtctcagaagctactgtgatcaggtctagagggtctttgcaaccccttgtgggtccttgtggcccttagacataaaatcttccgggggggtccttggaatggacagacacacatttctgtgttcttacaatctgctcgtaatcggccgataaaagactctgtgtgagggctgagaatgtatcagagtgtgcaggaactggctgggatcccggctgaatagaggaccaacgtcgtacacaaatataccaaagctgatttacctctgggcaattttcccacactattgacttagagaa

SEQ ID NO: 557962 - DNA, 183 bp, Homo sapiens
  misc_feature (17)..(17): n is a, c, g, or t
  misc_feature (25)..(25): n is a, c, g, or t
ttggtgcatcggtcctntgaggaancgtgtctggaaaggggttcatgcctctaaggggcttacggagatgctgaggtactgcctcgcctcatgggtgtgtcaggtttctacacctgtgtgcttttctagaaaaagctgctaatggctgcaacactaatcatgaacacgtttttgccagtttca

SEQ ID NO: 557963 - DNA, 830 bp, Homo sapiens
gagttcaaaaggttatgggagggcctctggcgtcctggatggagtgtgcgttcctttctgtggttgccggactgaatccacgcctggtgtactccaagcatggactgcagacgaggtgtagagccgtccgcttgaggccacgagtgggtagcttggagaccaggagtacgcggtgcccggatttattagtgactgtacgcgttggctgggtcatcatcggacagcgcttgccagacgctgtacgagccgcctggtcaatccttgcatctggccggcccgtgcgcggcggcctaagagctcgaaccctttcacacgcgcgcaaggagggaggagcggcgggggagaaacaagacgaccctcaacttacgtggccgcctgtcgccggtgggcatgctgggggcgtcctaccgctgccggaacccctttatcggctctattgccagaaatacctggacttggacggactcaggcagttggcaggtcatgcctcagacaaggattgacacaaacatggtgccctgtaaaaagatcgaatcacttaaaattagctttaatgcagatgtgcatgcaaagtctccagtggaactataagaccctcaggcaaaagcagaaatactatgtgggggccagcgagcagactggcactggcgtttaccaagctaagaatcttactgacaaagcagaacttggacttcgtacaacgcatattgtcccatttgaaagctggaacagtcatttcaataaaataacggcgcctctgttagaaggacaaggcttaatcccagcagaatacatatccaggtagctaaatgacctaattggtgaaatca

SEQ ID NO: 557964 - DNA, 160 bp, Homo sapiens
agtgctccagcatataacgagtattatggagtgtcagcacgtgtgctcactgtgtcgacggaactatgtacaggggaggcatgcaccgcatggtgaatacacgttgaccaggctccatctaaactgatatttggaggtcagcacggtgctcactgtatcg

SEQ ID NO: 557965 - DNA, 919 bp, Homo sapiens
  misc_feature (45)..(45): n is a, c, g, or t
  misc_feature (78)..(78): n is a, c, g, or t
  misc_feature (83)..(83): n is a, c, g, or t
  misc_feature (88)..(88): n is a, c, g, or t
  misc_feature (97)..(98): n is a, c, g, or t
  misc_feature (120)..(120): n is a, c, g, or t
  misc_feature (122)..(122): n is a, c, g, or t
  misc_feature (125)..(125): n is a, c, g, or t
  misc_feature (131)..(131): n is a, c, g, or t
  misc_feature (134)..(134): n is a, c, g, or t
  misc_feature (139)..(140): n is a, c, g, or t
  misc_feature (143)..(144): n is a, c, g, or t
  misc_feature (146)..(146): n is a, c, g, or t
  misc_feature (153)..(153): n is a, c, g, or t
  misc_feature (192)..(193): n is a, c, g, or t
  misc_feature (210)..(210): n is a, c, g, or t
  misc_feature (213)..(214): n is a, c, g, or t
  misc_feature (230)..(230): n is a, c, g, or t
  misc_feature (237)..(237): n is a, c, g, or t
  misc_feature (270)..(270): n is a, c, g, or t
  misc_feature (272)..(272): n is a, c, g, or t
  misc_feature (276)..(276): n is a, c, g, or t
  misc_feature (304)..(304): n is a, c, g, or t
  misc_feature (306)..(306): n is a, c, g, or t
  misc_feature (312)..(312): n is a, c, g, or t
  misc_feature (314)..(314): n is a, c, g, or t
  misc_feature (318)..(318): n is a, c, g, or t
  misc_feature (363)..(363): n is a, c, g, or t
  misc_feature (372)..(372): n is a, c, g, or t
  misc_feature (378)..(378): n is a, c, g, or t
  misc_feature (383)..(383): n is a, c, g, or t
  misc_feature (386)..(386): n is a, c, g, or t
  misc_feature (390)..(390): n is a, c, g, or t
  misc_feature (395)..(395): n is a, c, g, or t
  misc_feature (418)..(418): n is a, c, g, or t
  misc_feature (420)..(420): n is a, c, g, or t
  misc_feature (438)..(438): n is a, c, g, or t
  misc_feature (448)..(448): n is a, c, g, or t
  misc_feature (456)..(456): n is a, c, g, or t
  misc_feature (467)..(467): n is a, c, g, or t
  misc_feature (470)..(470): n is a, c, g, or t
  misc_feature (482)..(482): n is a, c, g, or t
  misc_feature (527)..(527): n is a, c, g, or t
  misc_feature (549)..(549): n is a, c, g, or t
  misc_feature (551)..(551): n is a, c, g, or t
  misc_feature (558)..(558): n is a, c, g, or t
  misc_feature (588)..(588): n is a, c, g, or t
  misc_feature (593)..(594): n is a, c, g, or t
  misc_feature (787)..(787): n is a, c, g, or t
  misc_feature (839)..(839): n is a, c, g, or t
  misc_feature (894)..(894): n is a, c, g, or t
ggggatagaggagggaagatggggggggaaggggggcgggggagnaacagtgggaggagatgatggaggttgacaggngggtngagtntgaagaatnnggggatgaagaagggaagaaananagnagtggnatngtggnnganntnagtgaanagagcctgaaggatggggaggagcggggggaggaggacnnagaagaagaacatgagntgnntgtggacatggaaacnatcaacntggacagagatgcagaggatgttgatttgaatnantatnggatagggaagattgaaggatttgagantntctgcntncgcnaaaatttaattaaatgcattgagaatctggaggagctacagagtnttcgagagntggatntttanganaacnagatnaagaagattgagaatctggaggngntaacagagctggagattntagatatttnttttaatntggtgagaaanatngaaggggttganaagttgacacgactgaaaaaactcttcttggtcaacaaaaaaatnagtaaaattgagaacttaagcnanttacatnaactacagatgctagagctgggatgtaacnggatnnggggaatggaaaatatcgacaccttaaccaacctggagagtttgtttttggggaaaaacaaaattactaaacttcagaacctggatgcgctcaccaacctgacagtcctcagtatgcagagcaaccggctgaccaagatcgagggtctgcagaacctggtgaacctgcgggagtgtaccttagccacaatggnatcgaggtcatcgagggcctgggagaacaataacaaactcacgatgttgganattgcatcaaatagaatcaaaaagattgaaaatatcagccatctaacagagctgnaagagttctgggtggacggacatgt

SEQ ID NO: 557966 - DNA, 311 bp, Homo sapiens
ttttttgtccttggggggcccccgggggggggggggggggggggggtgtaaagggtcttataatcttttccccattttttcccaatgccaaaaggccggcttttctattttaaaactgggttgggggtccaatcctaaatccttttagccggttgaaggccaacctttgcctagaaataaaaaaaaaactggtttggggccatgggggaaatttgcccatttaggttattttcccggttttgccaaccttggtttttttttcctttggacctggttccaaaatttttatttaaaatttggccccccaaaga

SEQ ID NO: 557967 - DNA, 232 bp, Homo sapiens
gctcccacagtgctggtgattccaggcgtgagccaccgcacctggcctgtatgtatacaatattagagcttcagtcacacgcgactccttaacaaagaaagtcctgatgtcagaatacacgtatatactaccacaattaaaatgttcaggatgcacatgtgtgtatatatcaaatactattccctgtatatactaacctgtctttaaccatacagatcgctgtacttgatca

SEQ ID NO: 557968 - DNA, 737 bp, Homo sapiens
gacgacaggtaccaccatggagtcagctggggtggtctgcccctacagagccatcgatgtccctgtacatgtgaagcactgtactcgaacatgggtgaatgcagcagctgatgccccagtgatggcctggcactggctgtgagtgatgttccatgctcacgtgacacatatgtgcctatcatgtgacaaactgtgtacgaatgcaacttgtgtattacatctagcaatgttgtgatgtgcattgatgtgccgaaatgcaatgtgaagcaacgtatgctgatggcttgctagttgccatgtgtcaaacacacacatatgcatcattgacattgccctgtgtgttgagaccccaatgtgacaacgccaatgcaccagtgatactcacgcattgtgcacattgtgaaaccattaccaagctgaacagatcgggaacaaatgccacatgtgtgacatttgcttatgcgtataactatgcgaaagtggccattgagacattccaatcacactaagtgtggaaccattggcggttacacacgttacgtggcacgttcggattaagacggtttgggattgcgggctgaacaacagtgccccccccaatttatatgggccgcgtaaactgctggggaacaattatacacgcttttgaccgccacctacgaagtcgaatttcggggcgcaagtaggcacgttggtggacaaccgcccacagttgggagcaaacggtgcggccgttg

SEQ ID NO: 557969 - DNA, 271 bp, Homo sapiens
taccaccgccgacatgatccgcctcgcggttgaagctggcttatagcaatatcgcccagccgggatccgctatggcccattgaccgtatcgcgtcatcttgctggcatttctaagaaaataccggacgtctcggcgcggtcgcgcgacaccttgtccagccaaaaggtgttggtcgcgggcggcacttccctccgtctgagcggcgccggggcgtctcaactgaaataaaccagcctgggcgcctgcccacgccgccgcgctgctccccgc

SEQ ID NO: 557970 - DNA, 122 bp, Homo sapiens
cactctagaggatctgaggcaggacactgtgggaggcaggacactgctgtgtattactgtgcgagaaatgggaaggatagcagcaccggtgggggctttgactcctggggccagtgaaccct

SEQ ID NO: 557971 - DNA, 884 bp, Homo sapiens
  misc_feature (153)..(153): n is a, c, g, or t
ggaagctcagagagctgaaatagcaatcgtgcccatctgtcataggacattcctgagaagaacatacaatgaaagtcttcgctcaagaggaaagagaccagtcggagtcctgagatctatcttcacactgtggtgcagagaagtattagcaanactgagttttcccagtagttatgaacggttggaattgttgcagcttcagagtaacattggcaaatgctactagagaattaaaagagatagcaggaagatctattggagaagtagtaatgcatcgttctgaaaagaacaattgtagagcaagcaggtgtgcaggcaggaggttccagtggaggttatcaaagaatctcttggtgaagaggttaggaagatatgttgacggaggaaggatgaaaacatccattgtgggtgggtccggaggcgcccttaaagattttttcaagaacagcttcatgtactccttctgtagaacgatgagcgagccgattgccgaagaagcgacggaaacaaggggcatggcttgagtgacgcctccattctatgcctgggataaggcaggatgatgttctacatgttctactgacttcttccctaagagaaccagctccctgtagttcttcccggcatcataaaggcagcggctcacgtattatatgaaagggaagtggaagtgtctgttagatggatcccgtgttccgataagtgatagcagcgagttcgtgaaatcagcctaatgtgttggtactccgttcacgattgagaagcagcaagcatcgctgttccccaaggaaacccaagtcctcgctggtgattcccacatcgtattctggaagacatttccattccattcatgtttgccaaagatttgacaattctgcaattgg

SEQ ID NO: 557972 - DNA, 394 bp, Homo sapiens
gaggataatcagattcataagagagaaagaaggacacctaataaaggagtaacggaaggagtgtcaatggggagtgtggcattcgtgaccaatatagttgctggagagtagcagacagtcactgcctacaatacagacagaatcttcctgctacactttctgatgctatctcttcctgatcttatgacccagtgttagttgatgattgagtgatgacaagcaatggctccttattttcacaggactaagtccgggccttcgtatcactagctgttgccatttaaaacctggtttaagcaaccctgtccctgtcattggccctgaacttcctctctgtgcccgtgtgtcctctgcctgggagccctctcctcccatagtcactttctctctgcca

SEQ ID NO: 557973 - DNA, 379 bp, Homo sapiens
  misc_feature (69)..(69): n is a, c, g, or t
cggccgaggcgaatcgcccccaggaagcggctcaaggacaagatgtcgaacacacactgcgctgcaggnaatgagtctccaagtcgaggatgcgcacgccatccacggtaacgagcagatgctccgacttgcagtcaccgacgctgatgcattgcaggtcgaacggcggcaaacggcagcgcgacgacaggcagggatcgagaaactcaggggtactgcggtgccccatgacccgctggatattcgcaagggccgtggcatgcatcgccgcgtaggccgcgatcacttcaggcaggtcggccggaccgggcaaacgcccttgaagagactccagcacgagtacctggtgccgcgcatcctgacagcgcatgcctgcgat

SEQ ID NO: 557974 - DNA, 627 bp, Homo sapiens
  misc_feature (627)..(627): n is a, c, g, or t
cggacgcgtgggatcagattgttgaggtgggtgtgatagtcttcagtgtgcagtgcgttcattcactaacgctccctgtccagtgccccatgtttgctcagctgcctccatgtgcactcagtgcagctgctggtgcaacagtcgtgtgcaaatcctggtacactagtgtatcagcacaccaatgtacattttcatgttcaatatgtaacattcacgtttcagcacacaccatcatcgtcacccatcttgcattgcgctaggtcaccggcaggcgcctagctggcgttcaaccattctgcccacacaataggtaattttcagcacatcacaggcacacatttctcaccactgtcttcacacaccgcttcagttggtcccttatcagttgccattattgtcccgcagtggcgcaccatggggcaccttgccaccagggccttcacaagtcaacgacgcttttggcgtttctcaattttctccacgtctcactggtccaccttcctgtaggggcatttaattagggtcagccgttgtatttcacgtcccccttccgggcacacaaccccaatttcgggtttcttcagaccacacagaaccgcggcccacagcatcgttcagtgtcattgn

SEQ ID NO: 557975 - DNA, 103 bp, Homo sapiens
cttccgtaaggaccctaacaagctggttatgtgaagttttcaagtacaatcgaaggcctgcagagaccaatttgaggcacacctgtaaacggataatggacat

SEQ ID NO: 557976 - DNA, 337 bp, Homo sapiens
ttttttttttgacaatgtctctctgtgtcatccagactggagggcaatggtatgatcacagctcactgcagcctcaagagctcactgcatcccttctgggctcaaggaattttcctgtcttagcctcctgggtagctaggactacaagcaggagccatcacatctggctaaatttaaaaaacactttttttgtagagatggggtcttgctatgctgaccaagctagtcttgaactcctggccttaagtgaccttcccactttggcctcccaaagtgctgggattacaggtgcaatctactgtgcctggccccaaattcccagtctttaatctatatt

SEQ ID NO: 557977 - DNA, 176 bp, Homo sapiens
cccccccgggggggggggggggtttttttggcgggttcccccccctttggttaacccccttgggggcgggaagggggggtccctttggggggtttttccgggccccccctggggttttgggggggggcgggaaattttttttggcccttttttcccccggggccccccccccccca

SEQ ID NO: 557978 - DNA, 107 bp, Homo sapiens
tagctggttaccatcagtgctgaatggggctaggatgtagggttttaaattacagtagggtaagctgaaggatcagcagcgtacagtggctcacacctatgtatccc

SEQ ID NO: 557979 - DNA, 534 bp, Homo sapiens
  misc_feature (97)..(98): n is a, c, g, or t
  misc_feature (134)..(134): n is a, c, g, or t
  misc_feature (231)..(231): n is a, c, g, or t
  misc_feature (288)..(290): n is a, c, g, or t
  misc_feature (295)..(295): n is a, c, g, or t
  misc_feature (298)..(298): n is a, c, g, or t
  misc_feature (307)..(307): n is a, c, g, or t
tcacaccgtacactaaaacacactcaacgatccaccatacagctcacacctgtgacactaaaacacactcaacgatccaccatacagctcacactgnnacactaaaacacactcaacgatccaccatacagatnacacctgtgacactaaaacactcaacaatccactgtacagatcacacctgtaacactaaaacacactcaacaatccactgtacagatcacacgtgtnacacaaacacacaacgatccactacacagcttgcacctgtgacactaaaacactcannnatccnctntacagctcncacctgtgacactaaaacacattgaacaattcacatacagaccacacctgtgacactaaaacacactcaacgatccaccatacagctcacacctgtgacactaaaacacactcaacgatccaccatacagctcacacctgtgacactaaaacacactcaacgatccagcatacagatcacacctgtgacactaaaacactcaacaatccactgtacagatcacacct

SEQ ID NO: 557980 - DNA, 464 bp, Homo sapiens
  misc_feature (55)..(55): n is a, c, g, or t
  misc_feature (449)..(449): n is a, c, g, or t
catttctaaaccactgtttattgaggagtccatctctttcacactgatttgaaangcttacctttattgtatattaaatttcttaatacttaagtatttaatacttaagaacaccgtggaatactatgcagccataataaaggatgagttcatgtcctttgtagggacatggatgaacctggaaaccatcattctcagcaaactatcgcaaggacagaaaaccaaagaccgcatgttcttactcacaggtgggaattggaacaatgagaatgcttggacacaggaaagggaacatcacacactggggcctgtcgatggggttgggggacgggggagggatagcattaggagatatacctaatgtaaatgacgagttaatgggtgcagcaaaccaacatggcacatgtatacatatgtaacaaaatctgacgttgtgcacatgtaccccnagaacttaaaatatt

SEQ ID NO: 557981 - DNA, 752 bp, Homo sapiens
gaccctgggcttgtgctctttatggaagggtgtattgtcagtcgacttaagttgggagctcacaccgtgattgcccgggattagctccagggttaggaatgtgttccttctttagatgtccggctcatatttctgggttggatgaaaactccagcctgttcctgactcacctccatcttcggtgtcttcagtattatctgagaagagttgggatatcgtgggaaggggcatgggagctcggcagcacttccgccttgccaggaaggcagtttcgcctctgcaggaaagagcagagcccgtgggaagccctgggtgagggtggcgcagccggcccagcacgcatggtattgccagccacggggggcctgcgtgtagtctctgctcccgtgcatttcaccttctttgatgactttccttctctgtgtttcccccatctgtttgccagaggggtgggactggcagacgagaacagcccgtaggactgcttctatcctcgtccctctccacggtgtgactcaggcgtgagtggtgactaacgggagcctggccacctcgcagctgttcagccccgcgtcaacctcttgaactggaactgctggctcacaggagggttttcgacaatctgcgagctgaatctcatggcaatagctggattccgtctgcctatacgcagaaacacccgggctccatctgccaggtgcttgccactggtcctggcagcaactggcggatgatttacgtgaccttccata

SEQ ID NO: 557982 - DNA, 275 bp, Homo sapiens
ctttggaaaggggcccttattgaacattttaaaaggggggggggggttttcaaggatttcctgtttttttcagggtcctaaagaaacaccacccatttttagattgggtttgttttgggcccttcccccgggccccaagggagccaaaaaacccggccggccctctgtttgttttttcctaattttgcaggggggggggggtagtttagtttcctttttgaaaaaatattttcatttttgggggcctttttgtaaaaaaaggggacatttttata

SEQ ID NO: 557983 - DNA, 534 bp, Homo sapiens
tttcataccctttccttcagcccccccagcagttttattatccccaccagtaatatgtttgttcaccagttcagttgattcagatcagagggaaagaaatcccacccctccaataagtgtattaaactttccgctctggttaatgtaaggtactctcctggactgaatccagtgtataatttctgtttccagttaaaagctgtgccccagttccccatttgattacccatgtgagatttgctgctgttccagtataacccttaggtataataggatttgaaattgcattccagttcataaaaattgaaaatgagaaattaaccctgcaagtgaaccatttgaaacgattatcctttttacataagacagggttgggccatcagatacttccaaagatggtttaagtagggatactagagaaaattaagttttctttctcttgggtttattgattgggtttaattcccattaggctatttggcataatcaaggccctgtaatttttataattttaaaataaattccttaagacca

SEQ ID NO: 557984 - DNA, 237 bp, Homo sapiens
ggtgaagtgataaagctgacctgaaaagctcatcgataatccagaagtactactatagtacaagtattcatggtagaaatatttcctacagcattgctccactaattctgcattctttctttactttacttgcttaagttctgaccactttctgaacataatatgtatgaatgatggtatttaaaatgaattccaatccagataatatggctttcttttactaactaataacttgat

SEQ ID NO: 557985 - DNA, 553 bp, Homo sapiens
acgacagggcgactcctgcaacagagaattcttccgagcattcgaagctgtaaacttaacttcttatcaccatttttaagggcaaataatttctatagaaagtaagttcaaattaaacttttagctctcgccacaatttttcccaggaaatgacctccttctaaattatatactcatgcacttgaaagtgaaaacacagcttggaaagtcagagtaaagaaagaatgacaagatcaggaaattgggaagttgctttagcacttttttctttgtaaagagagaatattatcaagtgtctagagcatataatagcttcaaagcatagttgagaaaagatcactatggagctgaaggtagagaactgggtagtgtgaccacttgatccagtcagtgcttaggataaaatgaactgtcatgatctagaaagctgtttttgttgtaaatcccaagcccctcactatgctcaatattctctccttgaagcattaagtaaaactaatcaaggaaaatggaaggcttggcattttaggtgatgagaattcactagctggat

SEQ ID NO: 557986 - DNA, 212 bp, Homo sapiens
catacctggaaactcttacacctcctacttttacctgtccatctcttactacttttaccgctatgatttgtcttacatgaacttttccacatactttctttaccactctcagttagagtctaggcgaacatttctaacaaatctcgatgaatctgctagaactcaaccatggctggcctaatcttccttcacgatatcatcgaaaccaaact

SEQ ID NO: 557987 - DNA, 115 bp, Homo sapiens
tatgcagtatgtactctatttaaggcatctgtggtagtcatcccatgcagtgcaatgtccattcattttgacagtaataactgccacatgtgggaagtaggatacagtagggaga

SEQ ID NO: 557988 - DNA, 687 bp, Homo sapiens
  misc_feature (41)..(41): n is a, c, g, or t
  misc_feature (86)..(87): n is a, c, g, or t
  misc_feature (99)..(100): n is a, c, g, or t
  misc_feature (112)..(113): n is a, c, g, or t
  misc_feature (172)..(172): n is a, c, g, or t
  misc_feature (235)..(235): n is a, c, g, or t
  misc_feature (281)..(282): n is a, c, g, or t
  misc_feature (289)..(289): n is a, c, g, or t
  misc_feature (303)..(303): n is a, c, g, or t
  misc_feature (332)..(332): n is a, c, g, or t
gaagggctgggtctggggccacagaccacaaggctcagctncctaccctgctccctggggtgctgctgtcttggagagcacagctnnggtgagacggcnnggcaggccgagnntgagaaaccaggaggatagaggagaaaagggcttgggcccagcccagaagatgctggancccaggtgggagacccaacagtgggtgcagtttctcagtagggctggagcaatggtgggggtngcccggcagcctggctcctcacatcccaggggttggcttctgattnngggcttnggctccaggcactngcttctcttctctgtgtccttagcatttnagagaagaaggccaggggccttgttcatggatcccgtggacccaaggtcagatgtccaggctttatcctcctgaggatgaggatgtctgatccatgcccgaatatctgaccctggctcggactgaccggggcaaggcagtccaagagagttcagtgaggaccagctaggctctcccaggtgcaatgtgggtgcagggccctcatgtcccctaccctgcctgtgatggagtgttctgaggggctttggcatttgctggaagcacagggagttccaaatgagagggagcttctgtggcttgagagcctctggggccttggctgccagagcacgaggcagcagggaccttggagagcc

SEQ ID NO: 557989 - DNA, 197 bp, Homo sapiens
cattgaactgttgaggagtggtgcgtcggtctcacaacgatgcatgatgggcgtatcggctccagcagattgcagctgctgtggaaaacaaggtcacagatctatatggaacccagtgagccacgtgcctgctagttgcttcatgcctggcctgtggcagccctgtgaagctcgagacggagaggccacctatctta

SEQ ID NO: 557990 - DNA, 106 bp, Homo sapiens
tgctgctggtcgatctagaggaccccacgatggcctcagctcttctcctactcctttcttccctatccattcttctacgtcaactattacgttaccgagccacagt

SEQ ID NO: 557991 - DNA, 114 bp, Homo sapiens
ggcgggttttttctttcaggtggagaccttccgcaaacagtcttcgccagaactaactgggcaggccaagaagcaaccgagcctttaccccccctatgtatttatttggaccgg

SEQ ID NO: 557992 - DNA, 1385 bp, Homo sapiens
gcatcaaatggagtgatgatcgccgtgtgcagtcggtgggtggcccgtgtgggcccatgagtggcctctgggattgggaagcgtggtggcttccgtcggaggtttcggcagtggcatccgaggccgtggtctgcggccggtggactggcggccggggccgagagtcgccgagacgctcgccggcaggcgatgcctgagagattacaggacgttgcgatagcctgtctaacatagtatggcgtcgctattgtgtcaagggagcatcgcaaagatcaaattcccatggcagtgagatctcatctatctctccctgaccatagtatacatggaattcaaggaatagtcattggatgtgacgtttcacttgcgtgggcactactcctccacaggactgcacgcggttcacgaacgatttcattgccccggttgccagcatacgctagtacctccttgtgcctcgcgtcccaggggaacaacccacgggtttcaacgtggccgaatatgtgctccgacgtaacttcagccccttaaaccgtaagcgaaagtgtgacccagccgatcggagattcatagcgacgttgcttgtaaatcgcttgcattcccgacagggcaccgggttgggcccaactcagtcagccaatttcgcccgttggtggagccacatcaattcccctttggagctccacaaggtttcgttctcgcaattctggtaccccccggtttggcctgcacatcggactatggcacttaacctttgggaggggtgcacaaccacagacagaattccgcggggccaacagtgttgccgccacaacacagcctgtagagtcccccccgtatttgggcacacaacagtggtttgaacacacggaggcaccaggtacatagcccggtggcattcactacggtacgccgttgggcatgaactcaggcccactttccagtatccccctttgatcacaacacgcataatgagggtgacgacaccttatggtgccagcatttccgggtacctatcacccgggacaactccctttgtttgcgcccttaaaatgcacacacggcgcttggccttaccatttggacttggggacatttgggggtaacttccggacactttgaaaccgttggctcgtaacaacaccccatttccaggagacacgcacggggtggggcctttgcctacgtttgctccaaagccgccctttggggggctacaatacacttatccgctccagacagtgtgcggccgaccccctattttcgaagttgcgctcatgatgtttcctctaatggaaagcccttatcgaggcgtgttaaccacgtggaagaccccccctcaggaacccccatcacttgtgtcgacagcggggaaggcacctacg

SEQ ID NO: 557993 - DNA, 106 bp, Homo sapiens
ggtcggagaccagttttcccagcaccatgtgtttgaaaggtttgtaccattcctcattggaattggttttgggcacctttgttcaaaaattattttgagcatacga

SEQ ID NO: 557994 - DNA, 984 bp, Homo sapiens
gcgggaccatggcaggctgtagagcccgggggccctggcgtgggcgccgctggtggtcccggtcgctgactggtggcccggtggtctaggcctgtctgtgcggcgggccggggctggagccttctcgctcagctgtctgcattcactgacgacggcggaggctcctctcgttccgagaccgaccagagggcaaagtgttggagacatgttgtgtgtgttttgagtgtgccaaatagtatgaatggaaaatatgataccgggcagcttttccttcatagcatttttcggctaccgaggtgtcgtcctgtttccctggcaggccagactgctatgaccgctgatgtgtgcgttctgcagtctccacgaaaaaagcacggaagtaacccgtgtctggccatggctccaaggaggtgaaaggctaaaaactcacacttactatcaggatgctgtacttgatgctcgtgactgcccacgagtatatcgtcatgagatctcagaacagaagctgtgaccttcttggctaaccatgatgtacagtcgggccctctatgccatcccaggcttggactatgtcagccatgaagacatcctcccctacacctccactgatcaggttcccatccaacatgaactctttgaaagatttcttctgttatgaccagagcaaaaagcaacctcctttttgttggctcgggagaaacggctaaggggcctggcaagagaaagaatcacccccctgtggttggaggctctcccgatgtttcatcgcggaaagcaacttgagaaacattacgtgttcacttgtcatccccctttctaacatgggcatgagggaaggcccagaaattcccacgtgtactgggtgggcgcacatggattccgttggaaaacttgaagtgatgttggacactccggacggctggggagattcgtctctggcctttgaacttagccgggtttggcgggcctctgtccgaggcgtcc

SEQ ID NO: 557995 - DNA, 399 bp, Homo sapiens
  misc_feature (194)..(194): n is a, c, g, or t
  misc_feature (330)..(330): n is a, c, g, or t
  misc_feature (335)..(335): n is a, c, g, or t
  misc_feature (337)..(338): n is a, c, g, or t
  misc_feature (344)..(345): n is a, c, g, or t
  misc_feature (347)..(349): n is a, c, g, or t
  misc_feature (352)..(352): n is a, c, g, or t
acctggcaaggtggaaatcaggaggcagaggttgcagtgagcccaaattgtgccactgcactccagcctgggcaacagagcgagactccatctccaaaaaaaaaaattgagaggagtgttatcctagattttccaggtgagctctaaatccagtaacaagtgtctgtacaagaatgaggcaaagaaagataacncagataggaggaagcaatgccaccatgacgacacagactggaatgacaccgttaacagctgaggatgccaagaaccaccagaaactggacgaggcaaaaacagattctcctctagagcctctagagagagtatagncctgntnncccctnnannntcntctgacctccagcactgtgaaagaataaacttctgttgtttaagcca

SEQ ID NO: 557996 - DNA, 1421 bp, Homo sapiens
ggactgttcggacggaacagatccggggactctctttcgcgcctccgaccgggcctccgagtttgctctccgtgtgtaaactccgggaccatctgctcggggcagtctaccatggcttgctgggacctgcgcagccacccgtttccgtggttcagtctcctgtctagccaacgcgcaaacagtgatgctccctggaagtgtcgctgcaggaagttagtttcttattcgtaccgtgtggaagcgcagtaacgtcatacgcaggcctggctcaagtattgatacctgacaggggcgcgtccataacagccataaccgtctcgtcatggagacattcttaatggctctgtaccgggctgagtgaactggtggcatcgtggaacaggcggtgcagccgagtgtatccttccggcgcaagcgtgggaccggagggtagacacgcgtcggaggcggtaacgagtcgttcatcgcgtgaaatcattgctaaatacccccaggcggtggtgacgggaccccgcgacggcatactgttcgcaaggaagcaattcaaaaggaaaggcgcaagctggcatacgcatggcagctcgtgcggttagaagaactcccaccacggacggtcccaggtgacagacgacttggcgcattgggggcgctacggaagcagaagagaagctaggaaacccgatgggccccggtattatgtgggcggatcgtatccaatttgcccaccctcgtgggtattcataggcccttcgggcgactaggggcaacccactcgcgattctttcatgggtagcgacaatgtacacatgggggtatgcaacattccaacactatcacgttaaggaatcggtaaggggagaagggctagcagcatggcgcttttgattctcgacattgcaaaacaaataggcgcagataggatccacaaaaaccgcgtagggaacatctataatacgcaattccctgaaaacaagggggccgttgggcacactgcgccccccccgggaaaggtggccctcgggggaacccactggggcggacggacagctgaaatccgtcccctgtaccgagaacataagggggccttcaaagcattccgttcccaaaggtgccactcggcaaccgtaacacagcgaaggccgcccttttgtgcgcaccggcccacagtgacggaactcttggcatgtgggagacggggggacaccccccgttttgtgtcgcagcacagcggccaacgactaacagagggggccttatccgtgggcgccataagagggtacgattccgtcgcctctttacccaatgacctcatagtatagggggagcagagactgtgttcatattgtaactgttagatgcccttaaaatcacaatggaccccttgtggaaccagaaaagtggtgcacagcttgataaggctg

SEQ ID NO: 557997 - DNA, 893 bp, Homo sapiens
ggcgctgtcatggcgggtgtgctgaagaagaccacgtggccttgatgggatgggctgtgtgcaatactcctcacgaagcaggctaagcaatattgtacacaaagcattcttgcatgttcttgaggaaatccctaacaaatgcagccatcatcagcacacagtatacagaaccagattcacaaatgagaagctggctcatggttaaagcggaacccagatgttcaaacacaaattagcacagcaccaacttcaaggcggtcaattcagcacagaggtgattcttcaggctgcaacatgaactaaatctggcaagcaacacaatgcagggcaatggaccaactcatgggagccattagtggcaagagcctcctgccgcatcagtggaaatggcctaatataattcattaagtgactttggctgtgtccatgggaaactgatgtacttaccatattctgttcatattaagagcgtgttcttattactgacattcgcgtacatcacacgacacgtgatactagcaacaatctgtaggagactgtcaacataggtgatcatggtaactcaggggccactggtgaccctcaaacccaaggatacacatacaaagtactcaacagaacgtcgatatcaccagatgagactcactcgtgcacccgagcaggcccaggggacacgaaacgaaaacaaccactaaaagagacaaacaagcaacaaacgcacaaagccaaatggcagcagacccactgggccacaagagtaagacgcacacaaacgccaggcaagagaaaccaagaacacactcaaaaaacacgaccacactgaggacaggagaggacaagacaaggaaacaagccaacaccccaaatcaagaagacacaggagaaacgacaca

SEQ ID NO: 557998 - DNA, 415 bp, Homo sapiens
tgctcgtggtcgtctctgcacgatccccttcatttggcaatctagttcaggtggcctcgcatggtggatgtggcttctcatcgcatttagacgctgaggtccgacctcgtgttcactacctgtagtgctgctgtttgggcggctgatcaaggtggatcacttatggcttcgccgtggtgttctcattgagtcccagatcatgccactgcactccagtcccgggttacaaagtgtgactctatcgttgaatcacaattgctatcgattatttatcgtaagctttttagacccattacttagctatgcctctaacgtccatgtcagttgtggaatagcatatcgaatatgacttacaaacttgggttatgatcttcttgagttctgtggatcatgtgactgtgcattcctatgttta

SEQ ID NO: 557999 - DNA, 398 bp, Homo sapiens
agagtctgagggggaatcaggttctggaaggcaagccagaactccagagctgagctggtcacagtcactcctcccccaccacccctgcccctccagaggctgcagttttctcgcctgtcacttggaacattagagctcctgaagcctgtctgtcttaagacgttgggaaagcctcgtgttgaaagccgggggagcttaaatgatccaggtggtagctagggaccgtccatcagtggtccttccctccaccgccacgccagctcctgggtcgttttcatttatctggcagagccaaggacccttaagaatcatattttagctgaaggatgctcactgatgcggccgagggctttgggatactgcacagtgctactgtgtcctgtgaaggctggtgcact

SEQ ID NO: 558000 - DNA, 405 bp, Homo sapiens
  misc_feature (49)..(49): n is a, c, g, or t
  misc_feature (113)..(114): n is a, c, g, or t
  misc_feature (121)..(122): n is a, c, g, or t
  misc_feature (126)..(126): n is a, c, g, or t
  misc_feature (136)..(136): n is a, c, g, or t
  misc_feature (180)..(180): n is a, c, g, or t
  misc_feature (182)..(182): n is a, c, g, or t
  misc_feature (204)..(204): n is a, c, g, or t
  misc_feature (217)..(217): n is a, c, g, or t
  misc_feature (221)..(221): n is a, c, g, or t
  misc_feature (227)..(227): n is a, c, g, or t
  misc_feature (244)..(244): n is a, c, g, or t
  misc_feature (280)..(282): n is a, c, g, or t
  misc_feature (303)..(303): n is a, c, g, or t
  misc_feature (314)..(314): n is a, c, g, or t
  misc_feature (316)..(316): n is a, c, g, or t
  misc_feature (326)..(326): n is a, c, g, or t
  misc_feature (331)..(331): n is a, c, g, or t
  misc_feature (334)..(334): n is a, c, g, or t
  misc_feature (372)..(372): n is a, c, g, or t
ccttgggaggcctcccaaaatgtgtccagattcccacaggcagaaaganagggactgaaaaactgaagtgaagtgaccgtgcctgcccagcctgggactgagagcctgaagannagctttnnaaantctgtcccanaaaccccttggccctcagcaaatcccctcctcctggcctgaaananactccaggcttcttgcagaaangtcttctgtgganaacnaaaaanaatgaatccaccctgantgtcccgggacaaaactgctgagcagggtgcaggannnaaaaacaccggatctttcgangcacatcagtnanagaacaaaanacaanaanaccagccaggaaattgaaccactgcagccccaaggatntaaatgcagtgcttcagctctagcttggacacc

SEQ ID NO: 558001 - DNA, 749 bp, Homo sapiens
  misc_feature (242)..(242): n is a, c, g, or t
cgcagaatgaattcggcatagtcctaacacagcttctcggcaacatctctatgtgataaaaatacaaagattattgccaggtttcactgcaaacagggcacctttcacagccagcaggcatcgaatatggcaccaaactcgtggaggaaccactccaggaacaggaggcaacacatctgggctgacctgtcttaatactgtgaaggaggccaaagaacagacaggagcacggtactgtcatntatgtgcctccgctttggttgctgtgccatcaatgaagctatgagaagaacatccctgggtgtgtgtgtatcactgacggatccgaccagcaggacatggtacgagtcagcacaaatgctgcgcaggaaagacacgctatgggcgccaatgccgtgagtcatcaaccctggagatgtaacatggaatcatgcctggcataattcacaaaaaagggaggatgcattgtggtcagatctgcaccctgactaatgagcagttcccccaaacaacgcagttggatcgcgcagcctgtgggggtggcatggaggtgacctttcatgcacccgatttatggctgcccgaatcattggaagatctggcccaaagcctatatggtgggactgcggtatgccacacaaggccgatttgagccaattcggcaaccaggggtcccagggtaagccccgaaagggcgcggcacagggagggaaaaactccaagggggtttcccggcccacggtgggcaa

SEQ ID NO: 558002 - DNA, 962 bp, Homo sapiens
aatgaccccaatacgcaaaactaacccgcctaataaaattaatattaagtcacgtcattgcatcgaatctcccgcaaacccattccaaaatctccgaatgatgaaagttcggctctctccttggcgcctgcgtgatcctccaaatgcaccataggatgattccagagcacatgcacatacatcgccagaggcgcgtcaacctgccttttgatcaatcgccaagatcatctcgagatgtgaaatatggctgaatcatccgtgtaccttccaccggctgatggcgccgtcaatattcgtaactcgtgcgcgtcttcctacacatacgggcgatggtgctatatctaacggatgcattgcgtctaatgcagaatacctgaaagcatcgggcactttatcctcctgctagcaggtataggcaaaagcgcccaataggactatgtgcctcccgggaaggtgcaaatatcattgctgaggggcgcacagcctaattacaagactttactataccgccactcccataacatagtggacaggaacatagtttccaatggaaatctagacggaggctatgtgcacgtaagaacagtcaccgacgccctcacaacgacttctttggagctctttcattgtccacttcgttgccccctgcatgtattgggaaggccctagcaggaggtaccacctgctaatatcttgcaacgaaaaacgtggatcaagatgaagcccccataagagaattcgacgtgcgccgatttcccgattaaaaatccacgctttccaagcctgtaagtgacaccaagtccagaatgaacgccctgcggattaacttcttcttacccttgtcttcctttattgacattaatcactattcttcagcagacctccctattggcgacccaagacaacttataaccctaggccaaagcctttagaaacccttcccacattaaaggccgaatgaa

SEQ ID NO: 558003 - DNA, 749 bp, Homo sapiens
  misc_feature (29)..(29): n is a, c, g, or t
  misc_feature (62)..(62): n is a, c, g, or t
  misc_feature (71)..(71): n is a, c, g, or t
  misc_feature (78)..(78): n is a, c, g, or t
  misc_feature (83)..(84): n is a, c, g, or t
  misc_feature (109)..(109): n is a, c, g, or t
  misc_feature (125)..(125): n is a, c, g, or t
  misc_feature (127)..(127): n is a, c, g, or t
  misc_feature (199)..(199): n is a, c, g, or t
  misc_feature (230)..(230): n is a, c, g, or t
  misc_feature (234)..(234): n is a, c, g, or t
  misc_feature (245)..(246): n is a, c, g, or t
  misc_feature (250)..(250): n is a, c, g, or t
  misc_feature (258)..(259): n is a, c, g, or t
  misc_feature (267)..(269): n is a, c, g, or t
  misc_feature (274)..(274): n is a, c, g, or t
  misc_feature (282)..(282): n is a, c, g, or t
  misc_feature (302)..(302): n is a, c, g, or t
  misc_feature (306)..(306): n is a, c, g, or t
  misc_feature (313)..(314): n is a, c, g, or t
  misc_feature (317)..(318): n is a, c, g, or t
  misc_feature (333)..(333): n is a, c, g, or t
  misc_feature (337)..(337): n is a, c, g, or t
  misc_feature (340)..(340): n is a, c, g, or t
  misc_feature (363)..(363): n is a, c, g, or t
  misc_feature (373)..(373): n is a, c, g, or t
  misc_feature (380)..(380): n is a, c, g, or t
  misc_feature (385)..(386): n is a, c, g, or t
  misc_feature (388)..(388): n is a, c, g, or t
  misc_feature (403)..(403): n is a, c, g, or t
  misc_feature (460)..(460): n is a, c, g, or t
  misc_feature (463)..(463): n is a, c, g, or t
  misc_feature (472)..(472): n is a, c, g, or t
  misc_feature (484)..(484): n is a, c, g, or t
  misc_feature (506)..(506): n is a, c, g, or t
  misc_feature (511)..(511): n is a, c, g, or t
  misc_feature (520)..(520): n is a, c, g, or t
  misc_feature (671)..(671): n is a, c, g, or t
  misc_feature (677)..(677): n is a, c, g, or t
  misc_feature (701)..(701): n is a, c, g, or t
gcgaaactcctgacacccttaaaacaganaacattgttattcacataataatgtggggctcngtctctgcngacaggngctgnnttcgggcattatctgtgccgtcganaatagccccattcacncnattcataaatgctgctgctaaaggaagggaaaagcggctctcccagagagggatccacctggaacacgagtnacctccaaagagctgcgaatgtttgagaatntgcnaagaggaaaannactnaatggganntggataannnaggcncgggagtnatagcaggatgtggtacttnaggnaaatggnnaanntgttgataacgagcntccngtnatagctcagggaggcaaacagcnacgggtaagnagagganaagtnnanggcatagacgctgtnctcgtgctcctcgtaggtggcgatcacgttgtcctgcaggggctccttgctcttctnttnagaacggtngtcctcctggtnactgatgtcatcgtcgtctacnaagtngccgaaggntccgacgagatggacaccatgttggaaaggatgactctgctgtcactgctgcccgtgaggaccagctggtcatgagagtggttgtagcggacgttccacacccagtgggagttctcctccagggtcttcacgggttcggtgacatttcggntgtccnagaacttcaccttacagtcgtctncgcagctggccaagtagtactgcttattgggattaaagtcaaggtccc

SEQ ID NO: 558004 - DNA, 390 bp, Homo sapiens
  misc_feature (10)..(10): n is a, c, g, or t
  misc_feature (40)..(40): n is a, c, g, or t
  misc_feature (43)..(43): n is a, c, g, or t
  misc_feature (124)..(124): n is a, c, g, or t
  misc_feature (139)..(139): n is a, c, g, or t
  misc_feature (251)..(251): n is a, c, g, or t
  misc_feature (299)..(299): n is a, c, g, or t
  misc_feature (310)..(310): n is a, c, g, or t
  misc_feature (350)..(350): n is a, c, g, or t
  misc_feature (364)..(364): n is a, c, g, or t
tccgcgacantaggacgcgtgagaccggccgcccgcaggnctnctggccgggacccgctggccgggagacgcgaacctgccggaccaccgcgcggggacgacggcggccatgagctcgcggaantgagcgtgccgaaanaggtagaatctcttgaacccaggaggtgaagcttgcagtgagccgagatcacaccactgcactccagcctgggcaacagagggagactccgtctcaaaaaaaaaaaaaaganttgggccgggtgcagtggctaaatgcctgtaatcccagcactttgggnaggccgaggtnggtggattcatgaggtcaagtagtttaaaggaccagcctnggccaagatggttnaaaccctggcattttattaaaaaaaa

SEQ ID NO: 558005 - DNA, 126 bp, Homo sapiens
cgctaactggtcgcaagtcaggcggctttgatgtatattttttaggctctcacaggtgatgcttaccctctgcagcacagggttgaaacactcatacatcaccatatggctaaggaatatatccac

SEQ ID NO: 558006 - DNA, 175 bp, Homo sapiens
  misc_feature (11)..(11): n is a, c, g, or t
  misc_feature (54)..(54): n is a, c, g, or t
  misc_feature (138)..(138): n is a, c, g, or t
  misc_feature (154)..(154): n is a, c, g, or t
ttacatgggtncgcttttcagaaaaagaaacagatttctggagggattcagaancatggctggaagaggtagtaaggccattgggagggcatgctctcctcagccaccccaccctgtgtggtctccattctgaaattncattcagatgaccggnctaggcagggacaaaattctt

SEQ ID NO: 558007 - DNA, 213 bp, Homo sapiens
ataattctgcttttcattaatttccctacttctaatctattacgtgtcttattagatctacgatcaatactatgtctttaagattctctgtattgtgcatgtggctgagtttatttttgctgctgtgtagaaattcaatttctacaccctcactcatgtattcaatcaattgaaacctatcgggaaaagaattcgcatccaagcctgcatgct

SEQ ID NO: 558008 - DNA, 636 bp, Homo sapiens
gaaaataggctagtcgaggctcggtgttaatcggccgaggggagacatccctgtctccagagtctttcagaatccagcaggctgcatgaagacctgccccctgatgacttggaggtggacaagtggacctgcgacagatggggactgtggtgccatctttgcttcatcaggacctggacagccttgggaatcagtgatgctcctgttacaggcatggtttctggtcagaattgctgtgaggaaaagaggaatccctcctccagcacgctgccaggcggtggtgttcagaacccttcatgcagacaggaatttgctggatactccatctcagacacagacagctccgatgccctcatgaattatgtattcgacagaaaagtgtccccaaggaagtgccaccaggtactaagtccatctccaggttggtcctgggaggcatggcccgatggatccttacacacacatcttcacagaatacacactcatggctcaagatgtaatgatccctttggagatctgattaagcccagcagacttgccgacatctcaatagtgatatgaccggaaatggattcaagaaattatgctccacattcatcccaagaccgggagcccctgggacacccagagggtaca

SEQ ID NO: 558009 - DNA, 210 bp, Homo sapiens
ccaccttcgcccaaaatgctgggattacaggccatcccaagtaacttttttaaaaaagtcgataatcacaatacaataaatagtctaaaggctgtgcgctctctagggtgaatcacgctatgctgaacatgttccctgatcggctgaagcagaggtacaaaatcttgccttttcaggcctattacctagctttctcatgaagtgtctcta

SEQ ID NO: 558010 - DNA, 905 bp, Homo sapiens
ggcagcggatgcagcgctctcgtcttctgcggttctcggagccctctccttttcgtttccggaaatcatggcctccggtgctggctgtctcgtgatggtgtcgagtctagaggatgttcgaagcggacatgagaggtgcagtagagtcttcagacgcacggaaggcaggtgacagaagcgtcaagcaaggcaggtgcttacttctgtccatgagtgagggacagagaagaactatcatcctggtaggaagggcaaggaacgatcctggatgggccgagtatgggtccagagctggtcgtacggagtcccgtacggcgcacctttgtcaagcatgcatgccagtagtaagcgacgtgccgtctattgcccgtactatggatgcaacactcttatcgcagactccaatggaggagccagagacacgcgaggactctgggtagttctatccttcggtgggactccgcgcggtagtccttgcgcactcgcctgtaagtgagcaacaattgcattctgatgacgcattgcctccatatgggaacgtcctagtcagacgcaatgcatatgctagaccagcgggactcgaaagccactggaacttggcgaacgcagaagctgactaacgagcgaggctcaacgggacctgctgcgagccactggctagcagacagcctcgggtgggccagtgcgctgctcagatcgtcgctctggcagggccaagcctttctgatggagccgcctttctggtccccactggcttgggagctatcatgggagaacccaggaccgtaggccttgggagggatcgcaaggggtgaacacccttactgccagaagcggaaggggctgggggggatcccaagcaggggcgagggcaatcccgttcactccaagttgacataatagac

SEQ ID NO: 558011 - DNA, 339 bp, Homo sapiens
aagtgtatagtcctcttcaacaatctgaaagattcaacgtatggataagcagcttttcaacaatatcataggaatactttgatttagaaatttaccttttctattgtattggcatccactccttgtagttgcaaccagtctataagctctctgtcggttcccagtccatcagggggtggagggttctctgtaccacctataatgattccaattttgttttattgtatagtaatgtataaccataaaatgctttaaaagtaacaacgtggatgtaatgatgtatcgcaacagaaatgtcatgtgctgtgaaaaggaaacgaattaaacttgtttgattca

SEQ ID NO: 558012 - DNA, 102 bp, Homo sapiens
gtgcctcgccgagtgtctagcctcgccactgaatcgttagcgctccttccttcttcctagcttccttcaccgaaatcgcactggcgaggcaggacgggtacc

SEQ ID NO: 558013 - DNA, 324 bp, Homo sapiens
  misc_feature (69)..(69): n is a, c, g, or t
aacttgtccagatgaaacaaacgggcaagattaccgagtccagaccaactccagtcccaacagccactnccacagtaccttcgtctctacaggccacagatggaccatcttatgccaggactgtgatcccaccagtatcaacttctggtcatcccaatgcagttggcacattcactgaaattcccggcagcaatattcgaagagtcattgccacgagattaactgaatctaaaagtactgtacctcatgcatatgctactgctgactgtgaccttggagctgttttaaaagttaggcaagatctggtcaaagatgtcattaaag

SEQ ID NO: 558014 - DNA, 871 bp, Homo sapiens
  misc_feature (300)..(300): n is a, c, g, or t
  misc_feature (330)..(330): n is a, c, g, or t
  misc_feature (421)..(421): n is a, c, g, or t
  misc_feature (435)..(436): n is a, c, g, or t
  misc_feature (439)..(439): n is a, c, g, or t
  misc_feature (446)..(446): n is a, c, g, or t
  misc_feature (453)..(453): n is a, c, g, or t
gggggtcgactgacggtaacggggcagagaggctgttcgcagagctgcggaagatgaatgccagaggacttggatctgagctaaaggacagtattccagttactgaactttcagcaagtggaccttttgaaagtcatgatcttcttcggaaaggtttttcttgtgtgaaaaatgaacttttgcctagtcatccccttgaattatcagaaaaaaatttccagctcaaccaagataaaatgaatttttccacactgagaaacattcagggtctatttgctccgctaaaattaccagatgganttcaaggcagtgcagcaggttcagcgtctnccatttctttcaagctcaaatctttcactggatgttttgagggtaatgatgagactttggattgaggatatctaatgatccatcacaaagngagtcatgggaganncanacttganggtggantataaactggttactgtaatagtgtgctgttcaggaaccgaggcgcactgttatagtcacttgtacgtaatttgagtacacaagatttcaaagtactgaaaactgagaatttctagctcaagtagtatcagtgatcaatttaaaatttggaggggtctaagggttacagccatgtgagcattaaaaagcataaagggagattatgtaaaggctcgttaaagtgtattatttacacacccagttagaccttgggtctttaacacaacagatgggagggcacaatgaaactttgtctccacagatggactctaacaggggttacaaatgtacaacgcggttgcaaagggatatcgtgggacaattagataaggaattaagaaattaataagacatttgaggtctatacaagtcatagtac

SEQ ID NO: 558015 - DNA, 365 bp, Homo sapiens
ctcaagtggtgactcaccagaagtcaccttgccagctagacagataatcggcaggacatgtagttataaagtagttacagcccaatccacacaagttaccaactgtttctcttctctagaaggaagcaagaagttaagaaatcccttgacttagcgcctggtgtgtcaggtgggcagtgcagagacagggctgttagagcagtgtcaaaaggcaccctggtgggccagcacgggtgggacatcgtaaataatcatagttggcttctaaatcctggtagcaagatgcacttctgattggtaatcttaggtaaattatagatcaatgaaaaaggccagtaatcatacactaagaacagagtataagg

SEQ ID NO: 558016 - DNA, 305 bp, Homo sapiens
ggggggggggcccccccccccccttgaaaggtggggtttgggggggcccaaaaaccccccgggcccgggggttaaacccccccccccggggtgggggaaagtgaaaccccccccccgggttttttttctttcccccatggggggaaaaaatttcgaccctttttaaaatttaacccccctttgtggggggcccccttgggggggggcccccccccatggggggtttttttttaaaggggggccccctttttaacccccccctttggggccccctttaaaaaaccgggttttgggtcctgttcgga

SEQ ID NO: 558017 - DNA, 946 bp, Homo sapiens
gtccgcttacccagaagcttgtgttgaatcttaaaacaactgttgtcatccgcgctaggagtatttgaaggtccgatgaatgacttatgtataccttacctaggtctcgggatgcagatatatctggaatagtgtaatgctaaagggtgtcagtcgcagcatgtctttgatcaagtggtattgttaaaaacagttcggaaaggacctgcgttacaagcatgctagtgcatgtagaaggtgagagtacgcttaagtgtaatagtaccatctattagtgatagagcaggagtattgaaaatttgaggtgcatattctacgtacactttgaaactacatgcgtgtctgcaatatgtgtgtcaacgttatgactggaacattatggcgagtgtcgtgagataaagatgtatatggtagataggatacgtcctgtgagatagatatgttgattatccgtagaatgcatataaatggttgatgattaccgtcaatgatcagtggctgtatagagtccatgtgtttaggattggtctgacattggaactcgtgaactcgccgttcatcgatgaaagttcgcgaagggagatatcgacgaaaagttgtgctatcagtgagtcccttgatagaaatttgtttagtagcaagtgtgtcttaattaacacttcacactaaattgtcagaccaagaaaacttcttgtggaagaatacgggtttgggtcaaatggttcgtttgaaaaaggtgagttaagaaaatcatggcttttgaaccggtttaaagtatggattgaataagccattgcgtagtgtggttgttaggccaatatattgaatgtgaagtactacaagtggcacctttcagtaatcttggggaaggcacatgggttggttggactaagaatcatttgtatgaaaaatcatactttgtgtttttgcttaagggggaaggttt

SEQ ID NO: 558018 - DNA, 265 bp, Homo sapiens
  misc_feature (7)..(8): n is a, c, g, or t
  misc_feature (32)..(32): n is a, c, g, or t
  misc_feature (39)..(39): n is a, c, g, or t
  misc_feature (43)..(43): n is a, c, g, or t
  misc_feature (55)..(55): n is a, c, g, or t
  misc_feature (86)..(86): n is a, c, g, or t
  misc_feature (93)..(93): n is a, c, g, or t
  misc_feature (95)..(95): n is a, c, g, or t
  misc_feature (123)..(123): n is a, c, g, or t
  misc_feature (145)..(145): n is a, c, g, or t
  misc_feature (147)..(147): n is a, c, g, or t
  misc_feature (157)..(157): n is a, c, g, or t
  misc_feature (159)..(159): n is a, c, g, or t
  misc_feature (201)..(201): n is a, c, g, or t
agagatnntgcccagagctttcagcgtgtcantcgaaancctnctcatggacacnccctccagattatgaggctggcatggaactnttcagcncntgatcaagacatgatgggaggcaggggntcagctgaagaagctggtgganancctcccccanangcccagagaaagcatcattaagctcatggaaaaaatagcccnaagctcactgtgtaattagcatttagaagctgaagatccccaactgctccagcctctccgctgc

SEQ ID NO: 558019 - DNA, 318 bp, Homo sapiens
  misc_feature (265)..(265): n is a, c, g, or t
cgaataggaacagctccggtctacagctcccagcgtgacgacgcagaagacgggtgatttctgcatttccatctgaggtaccgggttcatctcactagggagtgccagacagtgggcgcaggtttgatctcagttactcccttacttgaagaaggcttcgatgattcctcatggagaaatcccagatacttctgcacatgattcagaggtcccttacaactggcttcagcctgccttccaagacactgtctctgcctctcccttnctttcaccgtgcttcagcgagatgctgtgtttttttgcaaatggacggtttgg

SEQ ID NO: 558020 - DNA, 102 bp, Homo sapiens
gttatcctaaaatacactaaagctagatttagaaaatatacctgggcacagtggttcacgcctgtaatcccagccctttggaaggccaaggcgggtggatca

SEQ ID NO: 558021 - DNA, 884 bp, Homo sapiens
  misc_feature (884)..(884): n is a, c, g, or t
aacactggtacataataggtgcataacacatcttagagttgtttaataatagataagaaccaagaggaaacacagaatataagaaaagatgggggaaaggaaggagaaaataggaaatgaataggattaggaacgtatgggcgatttatattaactacgaaaatggtgtaaacggcctgaattatcactgtagctagtatcatacgggggaaaagtgtgatggaaaataggtcttgaagaatcttaattcttaaaactttagtaagctttatgtatatttttctaggatttctctgaacatagcatgaggagggtttagattcatttttctgaaaaacgatgtataaaaactacctaatttctttttttcgagtgcccacacttgccgttgtgctgtatacatgattttaccttaatcctctatagggtaggtgctaatgtctccattttatcgatgaggacagggctcagagaaatgcagaaacttggctaatataacacagctgtgacagagctcgaatttgagcacgtctgatactgaagcccatactctgtaggggaggctctatgtgctgcctcattaaagaacttctggtagaatggtcagcgcttaaggagccctagggatgattgtgtcctataaaagaggtgggtttggaactttggagagtgctatgcctccccccaataatttccttagtagccctcttcataagacaaaggtttgggccttggctcaatttagaaccctcccggtgccgcaggccccaaagggggggcctcacttacaacgacggcgttccgtggaactcataaaccccgcttgggcgcggacccgccttagattgggatatacaccacaacgcgagccgcgcaagaaaatn

SEQ ID NO: 558022 - DNA, 383 bp, Homo sapiens
  misc_feature (378)..(378): n is a, c, g, or t
tgttagaaaccccgggcccacacagcaggagatgaagtggaaagccaagtgaaaccttccatgggtatttacagcaattcccccgtcgcctcgcattacccacctgagctgtgtctcctgtgagatcagcagcagcattagattctcaaggagcacaaacccttttggaactgtgtgtgagggatcctaagttgcgcatttcttatgagaatctaatacctgatgatctgttgttgtctcccaccacccccagatgggaccatctagttgcaggaaaacaagctcaggctcccactgattctacattatagtgagttgtgtaattatttcattatatataacaatgtaataataatagaaataaagtacataataaanttatg

SEQ ID NO: 558023 - DNA, 1650 bp, Homo sapiens
  misc_feature (217)..(217): n is a, c, g, or t
gtgacgcgtgttccgccgcctcaacgtgaccctctcagtcaagccagtactagtgtctagcaccacgagacagctctactcgattcactcgccgttagtctgccacgtgtgccattgggggcgcatcagaatgccacgacacgcgcagaatatcctcctcgacgaatgacctcgggtctatgatgcgttgtcgcctgattgaatgtagggcatgtgnctcgcaaagtggttcttgagtataagttgaggcgtagaagtagaagcaaggctgggtacccttcaccagctgcgcagctcctcgaggacgcgcgcatgtgcaaggcctttggcgtagtggcctgtcgtcgctagcgctatctacgcgtcaacacacccttggccacatttttggcttgtcagtacccaattggttccacttcagtagtgggcctccaagttagtctttcaagcttatctaagcggacagcatcccgagtccagagacttgtgctatacattaatgacactcaaaaccgatgctgaggtcaaaaactggacgacgtgcaaaggccttgcctggcggaacttggcgccctgggggacccatatatgggagcttccgtatagaggtccattgcttcgtgtgtaggtgccaccctataggggtgtgagctcctttgtagcgcgcacgatccaaaggtcgaagatacggctctacagttgtgttgcactttgcggatttagactcgcctagaaaaatccaattttgcgcttttcgtgggtcgatttgataggcaaaagaaccgatttgccgtgcaaccatttccacaagtaggactcctgacctcttgccattttttcggcgagaagccaaggcggctcagctaagtttcaataaccagttaaatctcccaatgtggtccatctcgtgtgatggccataacacttctgtttgcggacttcaccggtaacgggggtccaactgttgaagacaccctgttgccgtttatcccgaatcctgaacgccgtcctaaggctagacaccacagcgattagagccaccgttcccccttatttcccacgtcagcatggtggaattcattctcccacaatatacaaaccatggtgaaatttaactcctcccgcggaaacatatacctatatgtcggcccacctaggaaacgtctgttttgataccaatcacctctttcgaaacctgctgggtggaactttaggacgactctattctgcatgtagcaccgggcggagccacccagctggtggcatctaatatgtggcctatctggcgaaaatctacccggagatctgagcgccctttatcagaaacctttgccgctagtattttcgcgaccgcacttcgggggcggcaccaacctttcatcccacctagcgcacgttttgtcgtccactataatgtattctaagccacacccagtatcggtgtgggctcaaacagaccagggtatagtctttgatcacacttgtgtggtaccgatttacacgcattggtcacacattggcaggacacacctctacgctattagctctgcaacacttcgttcgtcacacacaagatgggccaatctggtgtccccgtatagtctcctccacagcggcactgtgtgcctaccctgcctggcacttgtatgg

SEQ ID NO: 558024 - DNA, 121 bp, Homo sapiens
gacactggcaacaatgtgttcatccaggaaaatgaataagaaaatattggacattaaccacactttgaaccaaactggacttaactgatatatacatgaacattacctctattgcagtgaa

SEQ ID NO: 558025 - DNA, 160 bp, Homo sapiens
tctaccttcgactcacatcagataggcagactggagagctacacaagccttcctgaatttaggtgcccaatacaattgctggtttgtgtagagacagcccttccctttttacatgacgagaatatttctccccatgcgcactatgtagcagcgctcagag

SEQ ID NO: 558026 - DNA, 881 bp, Homo sapiens
gaattcatctataacgagtgtagtgttcaaaaggacaagataatcgaactaacttgttctgctgcgcaaatctaaaatttaaaattaatcttgcttcattgtcacatgtaactatattctcagacattttcactggaacgatttatgaacagaaactattggtctgaaagttagagattttacaaaatgctgcacacaaaatattttcctagcatcagtagataccctggcatatgtttctgctagcctatatatttaggaaattcaaagcatacaaactttggcaacatcttggctgtctagacacagtgtccttgtcaacccctctcaggtacctttatcttgggatgcttcattcatgaagccaagtacaagtgcttaaggtttgtatttcattaaattagcctattacttgatcccctgttcacagatgcctttctgacgtgtttcatcagatcactggcctttatgaaatcagcctggtattattcgctttacctggcaacagttacgtcattcaggcatctaacgagaacgtacccttattcagtgcctccttgggtaaactcacaccacattctaactcaacagtgtcaccacgattatttaacaaacatcagtataactccacttactgttttttccacaaaccatcatgtcaacgtggggcagggaactggaagttcttttttccttggaatttcaccctttgacaccaagtggaccacataaatttggcccaagctgaagcgatattgcacaaaagcggcgtgaaagcagtacagaaagcaagagaagaataacggaggctgctgcaaaagaccacaaatcctgcccgataagatgataagagagcaccatcgctatgacaagaaaacatg

SEQ ID NO: 558027 - DNA, 413 bp, Homo sapiens
ccctgctatgtcaccggctgggtccgcctctggaccatcggccccattgctgataagctctagcaggcctgtagcccgtggtggatcacgccacgtgctctaggattgtctggtggggcttcaggttgtagaaaaccatggtgtgcgctgtgggcgatggcgtcatcttagcctgcaatggggactccggtggcccactgaactgccagtttgagaacgtttcttgggagttgtttggcatcttcatctttggttcctggcggggttgcaacacctgctagaagccggtagtcttcatccgtgtttccgcctacatctactggattaacgagtaaatgcagctgtgattgtttgtgtggagcggcggcagtgtgtccctgtaacagcaataaacttccttctcttctgaaaaa

SEQ ID NO: 558028 - DNA, 175 bp, Homo sapiens
gggtatcacagagtctcgcgtagtcaaagccactggtcttctgttgatgtcattaaggaatcacaagacaaaggccagtagagagggttaggccgtgtatgtatcgcacaaactgactgaactatactaatgaatcagtaacttttttgttcaggtagacaatcgatgattgggg

SEQ ID NO: 558029 - DNA, 230 bp, Homo sapiens
  misc_feature (106)..(107): n is a, c, g, or t
  misc_feature (230)..(230): n is a, c, g, or t
acccacttcaccttaccaccagacaaccttagccaaaccatttaccaatagagtatagcgatagagattgagaccttgcgcaatagatatagtaccccatggggcnngtgagagattttatccccgcgctaatatatgcctggggctaaccccctatatccctctgcataatgagttaactagagatagctctgcaaggagagccataagctatgacccccccagaccan

SEQ ID NO: 558030 - DNA, 203 bp, Homo sapiens
cggccgatccagttttattcttttgggatctgtgatgtcatcatgacaggccttgcagtaaaaaaatgcccttttaacttcgggggcgtggcttgcgatgaaaaatcctaaagtaccttcttggatcttaagatggtttccaggattaattaatatacggctctctcggttggcagacttgtactcaatggctatcattaaga

SEQ ID NO: 558031 - DNA, 436 bp, Homo sapiens
tcgatttggctcagagaaatggaggtcaagtgactggctgaaatatctatagaatcatgattagactccatttatatcctagatcccacatagttgcttcctttctgtgtaattagatataatagtgtaatcaatcacccctatatggagaagcttgctggacagagataatgcatattaatggtagactttgctttagtatctgatctccctcactttttgtgtttctaagttctcaaagaagtcagatggacacattaaagaccaaaggctggggggaagagcaaaatcacggagtcaaaacaactcagtttgtaccaaaacaatgtgagttcccagatttagccttgtcttaatatattgaccttagtacatgctacagtgttcatatgaggtagaaaattgacattcaagtgtagatggtgtaccaaaatac

SEQ ID NO: 558032 - DNA, 135 bp, Homo sapiens
agtgtcttcaagatcatgttaggtctgtttctgcggtgcaatgcatctatagatgctgctgaattactctgcagccattacgataatttgaaagcacgacatacttgtcccttgaaaagcattacattataaact

SEQ ID NO: 558033 - DNA, 1173 bp, Homo sapiens
cccacgcgtccgctttcttttttttttataagacacatctatttatttataatcaacccactgtgtataaaggaatactatcaaaaggcaagtataagtctataagtgctaccaacacttatgtgggtccacttgtgtatatcacacttgtgataccacacttctgtatcggaatacagagaaaagaagaacacatcccaacagtgcataaatacaccatatttaaccacctctcaaaaacattggtatagatctcaggcaggtaaccaagctgccggatattaccactctatcgtggtgacaagtgttacaggaggcagcaatgtgtaagcgcaaggcttaaataagacaaggaggtaaccaaagtacacactaaccaggaattagggaaatggagccaggaatatacactactgcatggcctgaaaggtttcaaaatcctacaaatatatacctgactatcccggaagtggacatcagcgaaccatagacgcataacttacacgtgaaggctaaccaaaaaacatacctataaactaacgcaccacaataacacctcaaggtggcaaactccaacagcaaagtgcgcagaactagggcaagataccccaccaaaaagggggtgacacaaatagaagggcaaaacaacaacaagggggaaaaccccaaataaaggatatcccgtgaccaacaattcaaatgatcccaaaaggcagcaaaaatagatcaggacgaagacaccacacaggccgtaatcgacacgaaacgaaaaaacacacaaacaaaagaatcatccagacaaagacaccacgaaagagagggaccaaaactataccaacccatgtgccaaagcacaaacacgcatggagacaaaagtacaaaagggcaaaagataaggggacaacggcgccacacacaaaaccaaatgaaagggaccccagaacaccctgaaaaaaacaacaacaagatggcgaaaatccacaaaaacgaacatacaaggagaaaaaccacagctgacacaaagcaagcagaaggggaggcaacaaaacggcaacaatagaggaagcaaaaggaccacacgaggcaccacacgaaaacagaacaagagcacgaccaagacaaacaaaacacaaaccaacaagacaaaacaagaggccgcacacaaaagacacg

SEQ ID NO: 558034 - DNA, 877 bp, Homo sapiens
acatagcatgggactaaccgctataccttctgcataatgaattaactagaaataacttgcgaaggagagccaaagctaagacccccgaaaccagacgagtctaacctaatgaacagctaaaagagcacacccgtctatgtagcaaaatagtgggaagatatataggtagaggcgacaaaactaccgagcctggtgatagctggttgtccaagatagaatcttagttcaactttataatttgcccaacagaagccctctaaatccccttgtaaatctaactgttagtccaaaggaggaacagctctttggacagcgtaggaaaaaagcttgtagagagagttaaaagatttaacgacccagtagtaaggcctaaagagcagacaccaattaggaaagcgttcaatgctcaacaccacatagctaaaaaatcccaaatatataactgaactgcctcagcacccaataggagcaatctatcaccctatagaagaactaactgttagtataagtaacatgaaaacattctcctccgcataagcctgcgtcagattaaaacgactgaagctgacaattaacagccaatatctacaatcaacaacaagtcattattaccctcacgtgtcaacccaacacaggcatgctcataagggaaggttacccaaagtacagggaactcggcaaatcgttaccccgctgtttgcaaaagatcactctagcataacagttttagagggaccgcctgccgcgacgcgtggtaaccggcggggcccaaccgggcaagggcctaatcctggccttcaaaggaccggttaatggcccaggggcgggcctattacccggaaagcgcgcaaagggggaacaaaaaaccgggcatagc

SEQ ID NO: 558035 - DNA, 301 bp, Homo sapiens
ggaacatggtattgcaggtgcacatgtatgtacatgtgcaggtgtctgtgtatgtcatgtatgtggcagtgtgccatgtatatacgtgtgcaggtgtgtatgtgtgtgcatgcatgtatgtggcactgtgccatgtgtatacgtgtaggtgtgtatgtgtgcatgcatgtatgtgacagtgtgccatgtacatacgtgtgcaggtgtgcaggtatatgtgtgcatgcatttacgtggcactgtgcacatgtacatatgcaggtgtgtgtgcatgtatgtacatgtgaaggtgtgaatgtgt

SEQ ID NO: 558036 - DNA, 122 bp, Homo sapiens
tgtggttatttcaaacttgtttaagggaagagaggagaatattggctgcagccaacatgcctgtcctaggtgcctctagcataaatccttacacaagttcttcagttttcacgaaagacaga

SEQ ID NO: 558037 - DNA, 601 bp, Homo sapiens
tcatgtacacatgtggtacgtgccaatgcatcctcgtgccgaccgcgacacccgggagcgggggctcgcgggccgtcgcactcatttacccggagacagggagaggctcttctgcgtgtagtggttgtacagagcctcatgcatcacggagcatgagaagacgtgcccctgctgccacctgctcttgtccacggtgagcttgctgtagaggaagaaggagccgtcggagttccagcacgggaggcgtggtcttgtagttgtcctccggctgcccattgctctcccactccacggcgatatcgctgggatagaagcctttgaccaggcaggtcaggctgacctggtccttggtcagctcatcccgggatgggggcagggtgcacacctgttgttctcggggctgccctttggctttggagatggttttctcgatgggggctgggagggctctgttggagaccttgcacttgtactccttgccattcagccagtcctggtgcaggacggtgaggacgctgaccacacggtacgtgctgttgtactgttcctcccgcgggtttgtcttgggattattcacctccacgcggagcacgtgcgggca

SEQ ID NO: 558038 - DNA, 365 bp, Homo sapiens
tactggtatcgaaagtattctgtccccgttccccagagcaaggttggctcagagccctcctaggttaggtcaggttggtcccaggttaaggcaggggagcttaagtaccactcctccctgcagtgtggaatgcttagactgggatgttgctagagggacaatgggtgggtgctgtgcatctccacacagcactagccggtggccatggtccgtacgtgattctttacacatcctgaacatacctgttgctggggctgttccatataggagaagggtgtggggccctggcatccctcacatttcctaggaagggccagcgagacgttccacaggggcaagggggctggggtcatcatccctcactt

SEQ ID NO: 558039 - DNA, 342 bp, Homo sapiens
catggcgggtcttctactcattcagacttaacgctacgcacacgaaggcttctccaacatctgacacttatccacataatgctgtaagagaacatgaatgaccccacagcatgatcagatgtctcatgtggtgtatgccctcggggtcgtccgcagtcacgtcgggacattccggatcggccgagaaagtgttgtgggaagaaagttagatttcacgccgatgaatatgcatagtgaaatggatttaggcgtaggtttggtctagggtgtcagcctgagcataggggcactcagtgaatgaagcctcctcatgatggcaaatacagctcctattgatcagga

SEQ ID NO: 558040 - DNA, 513 bp, Homo sapiens
acttttcacactgttgttctttttgttttagacatttgcccccatttattgcataaactttgacccttgggagttttacaggaaaaggacaaaccatatggtccggtttttatataaaggaaaatttcccttggggattttttggcacacaattggttttgactttggggaataaaagccgacgcaaacgtagctgcccaggggtggtcctgtaaaacgcctgaatcaatagggtgtgaaagcttattgcaaatggttaattaaattgggtgatgactgaaagggtataaatccttcattccagctccaggagcggagccccttttacaactgggtttccagcttgacagggcacaaatttcaccgtgccagttttcccagctgtcatactattttgcattttaagggcttcaaacacacaaattttttggccttttgctacctggaatggccaaaataggcggatctttacagacagactcccggttccctggggttaaaaagggaaggggt

SEQ ID NO: 558041 - DNA, 261 bp, Homo sapiens
caatggagagagaaggtgcagcatgacacacacaggtattcccacactctcccaggcacactcagctggagaacacacactaccctagtcacactgaagaaggcagcagcagtgaaaggagagaaagcccagggtcatgtttctctcgagtgagatctgcacagactctcaggcagaccctcagggaatgggacttatgcttgggctgagcttacttggtactccatatgcccctttgctaatgccagataaccctaaaat

SEQ ID NO: 558042 - DNA, 234 bp, Homo sapiens
  misc_feature (39)..(39): n is a, c, g, or t
  misc_feature (124)..(124): n is a, c, g, or t
acaggatcttaccacggtaatttgccagttaagaagatnagtgtcatcaagtatcgtatgccaagtcttaagctgcaatccttaaattaaatgatttgagccgggtgcggtggctcatgcctgnaatcccagcactttgggaggccaaggcaggtggatcacctgaggtcgggggttcgagaccagcctaaccaacatggtaaaaccccatctctaccaaaaaaagaaaataca

SEQ ID NO: 558043 - DNA, 302 bp, Homo sapiens
  misc_feature (6)..(6): n is a, c, g, or t
  misc_feature (33)..(33): n is a, c, g, or t
  misc_feature (118)..(118): n is a, c, g, or t
  misc_feature (136)..(136): n is a, c, g, or t
  misc_feature (251)..(251): n is a, c, g, or t
cgaggnatggaaaagaggatgggtaggataagntcaaactgcctttaatggcctaacaaaattcaccctttattccctttttatttttagttgacatgtaaaaattgtacatatttantggctacagagtgatatnttgatacaagtataaagtgtgtaatgatcaaatcagagtaattagcacatcaatcacctcaaatagttatcacttatttgtactgggaacactcgaaatccttttctagctttgnaaaaatatacaataaattattgttaactgtattcaccacatagcactatag

SEQ ID NO: 558044 - DNA, 835 bp, Homo sapiens
tactgcagtcatgggctcaggacaggaacacagtttcagtgaaggcaggatagcgaacgtccagtaaaagagctcaatgaatgacagccactctttcctgtgctttgtattgtgacagtatcgtgtggtgaaatctggatagttcagggacagttggaatactaggtagctatagttgagtatggatgtttaaggggctttttacagagtcgtggtatatactgtgctatgagagtttagaaagactcggaagtacgataagattatcagtgaaacagaatagtattgcctcaacagagagcattttgaagtttacactattggacaggaagttagggtcatgggttactttagacaattcagtgttaagggggtttccaggaatatgactgtcaacaatgcccattaatttgtttttgttcactcaagttgtctgtactctgtgtggaagaccagcgatttgggctgtgatatggcggtatttatcgtagaatgggatttccagtttatggaaagttacatatagggcctttggacctaagtttgtttaatttgtaaccaaaagagattttcaagttacctcaacaggtgactgagtgtcaggactgtgcacgattggtcataggctcaccaatatattcatctaatctttcagaaaattaacatttaggttattattaaaaatggtatccatgtggggcagctttagggtttcctagatagctgacacgtccactgtttatagtccacaatggtacacgtgtcggaaacggaaagggtggctgaatttcctcagattgccgtttacgatacagaatttcctggtccgcaaaaa

SEQ ID NO: 558045 - DNA, 497 bp, Homo sapiens
  misc_feature (167)..(167): n is a, c, g, or t
catgccacgcaggtttgtgaggtgaaggaaaaaaatgttccccgttctggtaaaaaacgggagaagggcccccaatttttgaagtctggggaggccccccttttttaaaaggttccgggccaccccatgggggtgaaagcttttccaaccacccccccttggggcgnttcgtgtttgttaaaaaacccccccgttccggggggggttatcaaacccggggccaaaaaggggggtgggggtggcaaggtcccccagtttcccccaaaagctcaaaggggtaaaagaaaattttccccaaacccccccccccccctttttatcaggggggggagaagggtttcaaaaccgtttgtttccattggccctttaagttttgggggaaaaggcggggttatgaaacccaggccttggtaacccctccaaaggaaagggaaaattttttgggccccccttgggttttttttttggggggggccgttttaaggtattagttttta

SEQ ID NO: 558046 - DNA, 666 bp, Homo sapiens
tgcttctccatgtgtataatcgctggacgatgagattcctgatatcttatcaatcttgacagttgcctgggttagaagggatctgtcgagcgatgcctagctgatagctgtcagaagccttaaacatggctgggcgtggaggctcacacctgtaatccgaacactttgaagaggctgaggcaggaggattgcttgaggccaggagttcaagaccagcctggacaatatagcacgaccccatctctgtggggaaaaaaaaattagctggtttggtggcatgtgcctgtattcacagctacttaggagcctgaggcaggagaatcgctgcttgagtcttaaaaaaaaatgctgggcatggtggctcaacacctgtaatctcagcactttgggaggttgaggtgggaagatcagttgacccccaggagttgagactagcctgggccatgtagttagacctcatttctgttaaaaataacaacgacaacaacaacaagccttaaatacttacagtcaggccaactgatttagcatttacctaaaggagatttatccccaatgaaagttggaccttcctgaggatgtccaatggagttatcatagtattataaccatgaacaaggcatcagctgggtacgagctcgaatcgtatctgctaaggtacccaca

SEQ ID NO: 558047 - DNA, 838 bp, Homo sapiens
aatcagcaccatcatcaccaccatcaccatcatcatcactgtcatcaccaccatcaccatcatcaccaccatcaccatcatcaccaccaccattaccaccatcatcatcaccatcatcaccaccatcaccaccatcatcaccatcatcatcaccaccatcatcaccatcatcaccagcatcaccatcatcaccaccaccattaccaccatcatcatcaccatcatcaccagcatcaccaccatcatcaccatcatcatcaccaccatcacaatcatcaacaccatcatcagcacaacagtaccatcaccaccgtcatcatcatctatcccacagagggtcactagaatgctgtcatggcgctgaacacctggaatggtagatggtgagaaactttcaccactttggtctaagacgaacactgtgcacaacagatgcagacatccaaagaagagcacccataaaagcacaggtgacccctagccagacaaaaacgatagaacgaacaaacacactaccaatcacgggaacaaaaactgaatgcatgacccgagggcaaagagaaacggctgatgcacgcaaacattactagacgcaaatatcaacaccctactgaaaacatcaccatacatgaacgtcccagcgaaaaactcaattgaagacgatcagagactataccatgggcaaaaacaaaagatcggatccccaaggagacattgcagcgacgacaaaccttctctccagaaaacccaggaatggcttggaccatcatctggacagaccccaggacccactgacagacaagccacggcggtaacacgccgtgcagaggacaaccct

SEQ ID NO: 558048 - DNA, 348 bp, Homo sapiens
ttggactctattaacaatttaccttctggaaaacatttcccccttgcctcaagttggaagctttttgtgttatcaattaactttgtagattcccaaaattatattggctgagtcgcttgtatctttcctatgaaaaccttcctaccaaaggcattggccttcatgggtgttacaaaccacttcttgaactcacgtacatgggtctcagaggctgcaagtcaaaggtttgcactcacatacaaatcaaaccagagggggcctaaaagtcctctttcccagaaggccccaagagcatgcttttttgctagagaaaacccagaggaccccatttttggcaagtttatagaa

SEQ ID NO: 558049 - DNA, 80 bp, Homo sapiens
gcggccgcctactactactactgctcgaattcaagcttctaacgatgtacggggacatgtttacaaataaactgtggtat

SEQ ID NO: 558050 - DNA, 335 bp, Homo sapiens
gcgctcgggttaagcagcagctttagcatctctaaagaagtatggcgtggggacgttgtggacccagaggggttttatggcacatttgatgttcatttaggatttggaagaccgcctggcaaaatttatgaagacatgaagaagccattatatactcatatggatttgccacctatagccagtgctattcctgcttactctagaagaggggacattgttattggagatagagctgcctgtgttgctattcagaaaggattacaggcttcccgtagtgacattaagttatttaagcataatgacatggttaacccgagcgctaccagggtaccgag

SEQ ID NO: 558051 - DNA, 160 bp, Homo sapiens
gattcttttttttctttttttgggatataaaaaactggtttctaatcctagccatatagctaatctactttgtgacattgggccagttcttttccctctgagagctttctctgcacaaatggagaggttctcccctggtatcagaaaacctggattcaag

SEQ ID NO: 558052 - DNA, 867 bp, Homo sapiens
  misc_feature (624)..(624): n is a, c, g, or t
  misc_feature (732)..(732): n is a, c, g, or t
  misc_feature (859)..(860): n is a, c, g, or t
tattccttgagtaattgtgtgttcttgtaaaatgcaaaatcaatttacatgcaatcaggtatggacacaagaaatgcttgtgctctcgatttcaggactcacagataccataacagtcacgggactgtagttcactcagtattttttgttaataatgtggctttgctataaaataacttggtgtttcctttgctttggtactacaagattttaaatgttgcagcaaatgaaagaatgaaaacacatttgaaagctggtgtcaaaaatcatcagctgtacttataaaagttgttgtgcagcttctgaaatgtagtttattgctgtaaatatgtacaatttatgttagttcgtttattctgaaaacacaaataaaacttttttttaaattacaaatgcctacatataaaaagcttactttgtactacgttttaaaacatgcaagatttcaggcatatctttttataatccttaaaaatgtttagaattttgaatctatcatttgagaacttttattacaaaatttaatacaaagctacatccctttatttggaagaaattcatttcaggattactcaacaatcaaaaaaaaaaaaaaaagataccagcacatttccaggagcttgngtctgtaccactttgatttttttaaatattatttaagatgacaacatgccttacaaacacttaaacatatggggtgtttatactagaaaaggagaaatgaacagaggncttgttttcaaaaataatgcctaaaactggctaattggcatccctttgtgagggcgattatgtcaaacttttttgaaaaattgccctgtaaatattgaaattaaagttgggctatttggcagaactnnccgggtg

SEQ ID NO: 558053 - DNA, 247 bp, Homo sapiens
  misc_feature (1)..(1): n is a, c, g, or t
nagcattgcctacttattttacttctataaagctagtataacgttagtaagatgtaacgcggtggatcacgtttacctgactgtgctgcccctttcacatcaaagaactactgacaacgaaggccgcgcctgccttacccatctgtctatctatctggctggcagggcaaggcaagaacttgcctgtcggtgccggcagccgtggggtggcagacagtggggtgggacgacatttgacatctacgac

SEQ ID NO: 558054 - DNA, 191 bp, Homo sapiens
aggcatggggcaggaccagaggggacaggccctggattctcactacatgtgagatcttgaatcacttacttagtactgtttgtttagttagtatcatctggtaaaatagttaacaagcaacaaaaaactctgtatctgtttctagcatgtgctgcatagactctattaatcacatctcaaattcaccctag

SEQ ID NO: 558055 - DNA, 122 bp, Homo sapiens
agagcatcccgatggcgtcatctcacaacgttcaggttgtacagaaccagccacggtcagagcgttgcggtccacgccggcagccaggttgcgctggtcgtacgacacagccacgcccgggg

SEQ ID NO: 558056 - DNA, 964 bp, Homo sapiens
acaagcccgggccgcggccccgccttccccgccgcctcccggcgctccgtgcccgccccacgaggccggcggctgctgctacctggggcctgttgcttgcttgtgcctgtgatgcgactgtgccagccattgtcccctgcctgctcctgtcagcctgcgccctggcctgctgctgctgcacctggaaggcgcattgtgcgtcttgctgggctccgtggcctgggtgggcaggatggcctccacagagcctgcatggctgcgcatggtggagcctccgttgatgcctgcgctgccgccctccgatggcttgcatcctgctggaatgccctggctcccctgatgctgctccgggccctggccctggtgccccggacctgagtgcgtccccatgaatgtgctgccctgggcttggcccagtgctggcctgtggctagagggagaccccggactgggctgccctgagctctgccccagctccgaggcgcggtcgccggagccgcctgccaaccgccttcaagacttcgacacgctggtcaccgtgggaaagcaactagaagccatttgtgtcaaggtaacgtctggagaaacaaaatggtcaggaatgaccaacgtccctactggccacagtccagccccaatctgcaagacagagccagccgcccgggggaattccctgcctggtgggactccaagtcaccaagcccagctggtcaggggtacagcccctcgtgagaactgagccacagtcatgtttcctacattaggctcctgctcaggggtatgtaccagagaacactggcatgcctctaggttggtccctgaaaaagagacgtccaggacccaagggtccaattggggccaggaacattgttgacccattcgtcggctccaagttcgcgaatggaccattgtccatcagtcacgcacgctaataattccaatggatacaacatttgggacttag

SEQ ID NO: 558057 - DNA, 977 bp, Homo sapiens
  misc_feature (977)..(977): n is a, c, g, or t
ccgccaccacgcctggctaatttttgtatttttagtaaagacggggtttcaccatgttggacaggatggtcttgatctcctgacctcgtgatctgccctcctcggcctcccgaagtgctgggattacaggcgtgagccaccacgcccagccctttctctttttttttttttatactcaccacttatactaacaagggctcttttcatttatcttaggggggggggttgacattgtacacaagtttctctacttggatgaagtttagttcatcacgtggttcctttcatggatcatgccttggggcgtcgtatcttaagaacttttggaagtcttctggtcccattcttacatgtaggtactgtgatccacttggggtccatctcggggcatggtgtaagggcaagagtctaaattcatctttctcatggaccgatttccattggtccaaggcaccattgtgttgtacagtatctttcccccatggaatcgcttggataccttggtctcaatcaatggggcctcaaatatacgggtccatctctaaactcttagtatcggttccatggatctgtgcctgtccaggatggggtgtaatggagacccggctttaaagtatgggaagtcataacatccggtatgtacaccctcccacttggtattccacaaatcttcgactttccagaaatggattccccgattcactatatagacacagattgcagaacacagaaagccctccgcggtcacacattcttgtgcacctcacacgtgacactgccctcgacaatggagtaccctggacacagagggggcacactactgcgacgacgtataacgcaatagtccgaggaacatccccaggcaacggatctgcgcagaccagacgcgtccatctacgagagatatacgtactaatcacttgcgtacgccagcagtcatgctacagtgtactatagcacactcgaccaagcactgn

SEQ ID NO: 558058 - DNA, 148 bp, Homo sapiens
tcttcagtgactctaaggatcccccaggagtgcccagtgcccgatcgagtgcccgctgaatccgacgtctccggcccggccgcgggggtgatcactgccgccctgcgccgggcgatccggagccagaccggtgccgcccgcgcctacg

SEQ ID NO: 558059 - DNA, 618 bp, Homo sapiens
tgaggctcagagtggtccagtcatttgtccaaagtcacacagcttgtatgtcacagactctttttcagtggtcttttgactgtaacccctcactctgaaactacatatccaccacttcccaagtaacccagcccccacaaaattggtgatgatgattattttcatcatatccacattccaaaggggactatcttccccaagtgcattcagagatgtggctagcgatgggagcatttctaagtagaacagaacttggaatcaatattcatgttccaaagccacaatcctgggaaaaaaatgtagcaaagaatagggcacacacacaaagaaagctaaaccaaatttcagcaggagattttatagctctctcctgggtggcttgctcttacccaggcgtttaatcgaatgtggacatcaaggcagcttgcagcacgactgggaaactcacatggggctgccatggctgcaccaactctgggaaacctcattaatttctgaacgagaaatgatttcctttcttggccacagtctgagatgatggtgtgtggggggatggattttaaaggactaggtttttgcatgagctgtggtacttccctgcccaagacttttccctga

SEQ ID NO: 558060 - DNA, 94 bp, Homo sapiens
cggatctctccgctcccttgtgagtgagcaagcgggacagttctgcggaaagtttccggccccaatcccccagccctgcgcccggactgaagcg

SEQ ID NO: 558061 - DNA, 379 bp, Homo sapiens
  misc_feature (8)..(8): n is a, c, g, or t
  misc_feature (23)..(23): n is a, c, g, or t
  misc_feature (47)..(47): n is a, c, g, or t
  misc_feature (85)..(85): n is a, c, g, or t
  misc_feature (152)..(152): n is a, c, g, or t
  misc_feature (159)..(159): n is a, c, g, or t
  misc_feature (167)..(168): n is a, c, g, or t
  misc_feature (183)..(183): n is a, c, g, or t
  misc_feature (195)..(195): n is a, c, g, or t
  misc_feature (197)..(197): n is a, c, g, or t
  misc_feature (279)..(279): n is a, c, g, or t
aaaggggnactaattgaaaaggntttccacaccctgggggagaacangcatacctacaattaagagagtgaacatatcccatcancccctcaaagtgtcacaatgctcctcctgatgactcctccccagaaaaccacccaatcggctttcantttgcantttgtagnnttatgtgaatggaancatatagtatgncntttttttttgtctggcttctttcactttgcataattattttgagattcatatgtctccatcttgatgctcgtatgaattcantcttttaaatgttgaatattcccttgtatggatataccacaattcatttacccatttacttgttgatgacatttgggttgttttagttttgggatattac

SEQ ID NO: 558062 - DNA, 191 bp, Homo sapiens
tctagcaggatccccgtacagctatactagttggcagctactgccctttatttcataatgtgtggatttgacagtaggaacttcaacacgagtcgcatggatgtgtatctatcacattatccagcaggaacttctgttcaatccatgtgccattgtacccaggccgttccgtctgggaaattccaagctca

SEQ ID NO: 558063 - DNA, 589 bp, Homo sapiens
atttcaaaaaaatttataactttcttttgatcatcatgtacagaggtgttttttttctttaggcttctcatgcatatgaatattttaagcacgaatggactactaaatatctgagtttttttttttttttttttaaagactcctaacagaacatagcgtaacaatttgggtcttccagggttttacctcatttcaattatgttgttgttttccccggacagacctatttttcagtgtcttattttctttaaagagcgtgcttcattgtggccgggcgccagggcctcacgttctgtaattcccagcacttgtgggaggccgaggcggggtgggtatacttgaggctcaggagtttcgagaccagccgtggcaaactgtggggaaaccccatttttaactaaaaattacaaaaaaatttagccggggtgtgggtgtcacgcgccgtgttaatcccagctactgtggggggcctcaggcaggaaaattgcctgaacccaggaggcggaggttgcagtgagctgaaattgggccacttggacttccaccctgggcgacagagtgagactcggtctcaaaaaaacaaaaaaag

SEQ ID NO: 558064 - DNA, 418 bp, Homo sapiens
  misc_feature (235)..(235): n is a, c, g, or t
atcaatcatccctgctaggcttagtatgtagtggattagttacgtgatggactaccacaatctgaagcggctactgtagaaagatccaccccttacgagtgcggcgttcgatgctgatactgcccccacgcccgcgtggctgcgccttctgcatgcgcagtagagatgtctccaccgtaagcgtagtcgtatctagccctatgctatgatgtatgtatggattcctacgtaaagnttggtcctccttcttagcccctaccatgagccctacgaaaaacactaacctgccagtacttagttatgtcatgctctcctatattaagtcatcatcctacgcccctcagagtctggtactattgagtgactagccaggaaggatttatcacctggaatgcgacatacaaagaagacaaagaaa

SEQ ID NO: 558065 - DNA, 400 bp, Homo sapiens
ttgcagattatagcactgtaaagcttcataacattcacatttgactctattattatccatggtttgttcagctctgtattgttctttctcattcctgccttctttttcagtttccgtagtctattctttccctcatttttttcatttctctgatatttttagtttctgctatctaactgagctctgtagagttcaacgtatttctgcttttcagtttcgtgctacagtgataattgtttcattaaatttttataattcatgacaaaatatttggcctaaattttcacctgctctatagggatatttttactggtgttttgttggcccattctttttctgttccttttcttgatttcgtttcctcttatatttctagacagctcctgtgttggttctattt

SEQ ID NO: 558066 - DNA, 132 bp, Homo sapiens
  misc_feature (38)..(38): n is a, c, g, or t
acggagaggaggccaaagagatgtgggcccagggctgntgttggcaccgaaactgccaaaggtcatttgtatattattattgattgattagccaagaccgtgtatgagatggaagtcaacagaagagggcat

SEQ ID NO: 558067 - DNA, 126 bp, Homo sapiens
ctcgtggtcgttctcgagcgtcacgcggaaagtggcgttcggcagcagttcgctgacggtgccgggaaactcgagcagttcttccttagccatgcggcctctcacgcccgtctgaaatgcgttcaa

SEQ ID NO: 558068 - DNA, 768 bp, Homo sapiens
cacggtggctcacgcctgtaatcccaaaacttggagagacaggtgggcagatcacttgaggtcaggagtttgagaccagaccagccaacatagtgaaatcccatctctactaaaaatacaaaaaattagccaggtgtggtggtgaaacacctgtagtcccagtgcctggggaggctgaggcagggggatcgcttgaacctgggaggtagaggttgctgtgagctgagactgtgccactgcactccagcctgggcaatggagtgacactccatctcaaaaaaaaaaaaaaaattgtgtcggggatgctatggggggagggacccttgggactcttgggtggggccagggtgcccacgttggatagggcaggaagcttggcttcacctcttgggcacagagcagttggccctcttgtgagcttgtggggtgaaggccacctcaaagcttccttgggtcctttgctccagatggggagagtggctggctgaagggggtcctctgcttactcggggtgcctaatctctggtcccttcagtttctgtgtgcgggtccctgaatttatacgtggagttatcttctaccaaaacgggatttgtcacgacacggcttggtcacacgacacacaaaagaaaaaaattgtgggcgccggcccgaaagtttaaccactcggggcccgccgatgaaggaacgcacggcgcagagaccgcagagcgggcccaaaaacgcggagcgtgaaccaggggtgggtcaggcagagccaccgcggct

SEQ ID NO: 558069 - DNA, 225 bp, Homo sapiens
taaataaggtttataggaaggtctgttagatatttgatgacctgtatgctaggccaaaggctatggatttgcaatgtaggccagaagttagcaatcttttctggcaaaggactcaactacaaatatttgaggctactgcctatgttgcagctattcaactctgctgttggcacacagaaagcaggcatagacaagtcacataatggggtatcgggtaccgagctc

SEQ ID NO: 558070 - DNA, 212 bp, Homo sapiens
tgattatgtagagactaccaggctccagataaacgatattaggagtgcagctcgttgctcacgtgcggacggaacttgtacagggaggcatgcaccgcagtgttgaatacacgtcgacctggctccatgtaaacgatatttggaggtgagcacggttcttacgtagccgcggaacttgttcagagaggcatgcaccgcagtggttaatacac

SEQ ID NO: 558071 - DNA, 345 bp, Homo sapiens
tcgattcgtgccaaaatactaaagatatagattgtgtactacagcggcttaggggccagcaaagttaaagcatcaggtacctatactaaagttctggccaaagaaggctaactatgtatacttctgattcaactttggtgaatagctagagtccattttcatatactgaagatacaaccggtttaaggacacatactagtaaagttgaagggagaaaatcaagtcgtgctgaataataccactcacaacgtaattcacacataacaatgcactgtaggttgagaattcttggtgttatatatagacagttgcttgagtttcaacccagacataatccacctacta

SEQ ID NO: 558072 - DNA, 849 bp, Homo sapiens
  misc_feature (418)..(418): n is a, c, g, or t
  misc_feature (452)..(452): n is a, c, g, or t
  misc_feature (636)..(636): n is a, c, g, or t
  misc_feature (764)..(764): n is a, c, g, or t
tgggttgagcaacaggttactttattgatggtacatgacaaggttgcggctccctaggcccctcccctcttacaaggggtctacttggaaactgtgaggaggggaaatccagtgtggggggggactgagtgtggcaggaactccccagcagtgagggtctctctcttcctcttggtgtgctcgtgcgtggggctgtgggtggttccaggggttcatatacttccttggggaggccatggtgtggtgggccagtgaggctccaccaccgcgtgtttgcgtgtagccaaatttcgttggctcaataccagggaaagtgagtcgtctggacaagaggtggctcgtgtgagggacaagtgccagctcccaggcgtctcagaaggtggtggagagatggtggagggtgctcgctgtgtgaganagctcaagagagaaaccacgtgtgggtgcctcangtgtgatacgcccgaggatgtgcccttggagggggtggcccttccgcgaacgcctgtgctttcaccccaaccttttccgtgtgatgtgttccacctccaatttttgggggacaggagttattctacaagaaagcggcgacaggttacaagggtgcacacccaatgtgagacacactcgtgtgtnggcgcagtgtgggggacgaccaccgtgagaaaaggggggcccattgcgccacagtgtgagaacgtccttttccgcccgggtgtacaacgtctcaccaggggggaattgaagacccctgggggcgcccnaacaaggcctctttgggggcaaatgccgcggccaatgttaaaaaggggcaagggggattagactgtgtcctctggggggaaaacg

SEQ ID NO: 558073 - DNA, 512 bp, Homo sapiens
  misc_feature (9)..(9): n is a, c, g, or t
  misc_feature (61)..(61): n is a, c, g, or t
  misc_feature (76)..(76): n is a, c, g, or t
  misc_feature (85)..(85): n is a, c, g, or t
  misc_feature (97)..(99): n is a, c, g, or t
  misc_feature (104)..(104): n is a, c, g, or t
  misc_feature (115)..(115): n is a, c, g, or t
  misc_feature (125)..(125): n is a, c, g, or t
  misc_feature (137)..(137): n is a, c, g, or t
  misc_feature (142)..(142): n is a, c, g, or t
  misc_feature (147)..(147): n is a, c, g, or t
  misc_feature (156)..(156): n is a, c, g, or t
  misc_feature (160)..(160): n is a, c, g, or t
  misc_feature (187)..(187): n is a, c, g, or t
  misc_feature (221)..(221): n is a, c, g, or t
  misc_feature (245)..(245): n is a, c, g, or t
  misc_feature (253)..(253): n is a, c, g, or t
  misc_feature (273)..(273): n is a, c, g, or t
  misc_feature (278)..(281): n is a, c, g, or t
  misc_feature (283)..(283): n is a, c, g, or t
  misc_feature (285)..(285): n is a, c, g, or t
  misc_feature (289)..(289): n is a, c, g, or t
  misc_feature (305)..(305): n is a, c, g, or t
  misc_feature (307)..(307): n is a, c, g, or t
  misc_feature (317)..(317): n is a, c, g, or t
  misc_feature (322)..(322): n is a, c, g, or t
  misc_feature (343)..(343): n is a, c, g, or t
  misc_feature (346)..(346): n is a, c, g, or t
  misc_feature (354)..(354): n is a, c, g, or t
  misc_feature (358)..(361): n is a, c, g, or t
  misc_feature (367)..(367): n is a, c, g, or t
  misc_feature (391)..(391): n is a, c, g, or t
  misc_feature (396)..(396): n is a, c, g, or t
  misc_feature (408)..(408): n is a, c, g, or t
  misc_feature (414)..(414): n is a, c, g, or t
  misc_feature (430)..(430): n is a, c, g, or t
  misc_feature (445)..(445): n is a, c, g, or t
  misc_feature (464)..(464): n is a, c, g, or t
  misc_feature (467)..(468): n is a, c, g, or t
  misc_feature (491)..(491): n is a, c, g, or t
  misc_feature (502)..(502): n is a, c, g, or t
  misc_feature (510)..(510): n is a, c, g, or t
attgtaggngggctttcttcttggcctgcacctccaggatgccttccatgtagtcctcgtnggtgaactccgtagnacccctgcncagtgcgatcannnccgcntccacacacanagccttgcantgggccccattnaagtnatctntgcagcggnccanctcctcgtagttcacgtcaggactganattcatcttttgggagtggatctgcatgattttngtccggggctcctcattgggcatngggaactntattttggggtcaagggggnccgannnntngngggnggggtccaggatgtcnancctgtttgtnggtgnaattaccttaacttgggtgtnggnctggaagnatcnnnntggttnagaagctccagcattgttctctgnacctnccggtccccagntttctnactgtcaaagtttttnttttcgatggtattnaatttattaatgaagatgntanntggcgcttttttcttggtaaggntaaaggtatcntggattantt

SEQ ID NO: 558074 - DNA, 890 bp, Homo sapiens
ggctgccttctagtttttatgtctcagaccatgaccaccgtgtgcgcaccccgatgcctgagccctgcagcttctggtgctcttcggcagccagacatggcactggctcatggactgtgtcgtgagagactggtgtcgcgaggcccgtgcgcctggctggcttgtgctgccggtgtgcactgccctgtgactcctaccctggtggtgaatctgattacctgaggcccctggtgatatttctgtttgtgcaaactacagtgccactggagacccctcctgacaaccctgaatcgacacttctggaggtttatattccggcaagaaacctgccctccatctgccctctgtcagattggacttttgccgtccttgggcctcggcggactcctcatacgccaagttcaaccttcggtggccaagaagctgcaaccgacggctaactgcaagccttgggggcagcgccctcctgcccgttgtgcctgggccgatgaccagcatgagctggggcccgacgcttactgtggaccccctggctgccaacaccttgtgggacacgggttctctgaggctgcctgtaccacgtcgccatccgtggccatcaactgacatccacctccacggagataccccattgcccttcaagatgttccaccttgcgtgctcccttcccatagacgtggccaccccacgcacaggggcttctgcagggcgcaaccggggtaagctcaaccccgcgctctcaagggaaggccccacggaccggagttcgacaggccctttcctaagcacccagtgctgctgcaaccagatgagtcaccgggacccttacccacttcccgggacgctttgtgctgattggcagtttggcgatcttggagctctggtcatta

SEQ ID NO: 558075 - DNA, 718 bp, Homo sapiens
  misc_feature (323)..(323): n is a, c, g, or t
  misc_feature (329)..(329): n is a, c, g, or t
  misc_feature (335)..(335): n is a, c, g, or t
  misc_feature (385)..(385): n is a, c, g, or t
  misc_feature (405)..(405): n is a, c, g, or t
  misc_feature (443)..(443): n is a, c, g, or t
  misc_feature (467)..(467): n is a, c, g, or t
  misc_feature (470)..(470): n is a, c, g, or t
  misc_feature (473)..(473): n is a, c, g, or t
  misc_feature (495)..(495): n is a, c, g, or t
  misc_feature (500)..(500): n is a, c, g, or t
  misc_feature (504)..(505): n is a, c, g, or t
  misc_feature (512)..(512): n is a, c, g, or t
  misc_feature (516)..(516): n is a, c, g, or t
  misc_feature (522)..(522): n is a, c, g, or t
  misc_feature (525)..(525): n is a, c, g, or t
  misc_feature (531)..(531): n is a, c, g, or t
  misc_feature (550)..(550): n is a, c, g, or t
  misc_feature (558)..(558): n is a, c, g, or t
  misc_feature (564)..(564): n is a, c, g, or t
  misc_feature (570)..(570): n is a, c, g, or t
tgagggtctaactctgttgcccaggctagagtgcagcgagatgatcacagctcacggtaaaaccaaactccagggctcaagccatccttctgcctcagcctgccaagtagctgggactactagctcagactaccatgcccagctgtcgttcattctttccatctaactgtccctctctctgagacctgggtctgcctctcccttgtttttgaggcttccccagcagaccttcctgttccccttctgggcatttgcccccgatcgtacccctaatctttgcctttttttctcaatttccacctataaacatgttcaaatctctntactcncaatgnttcctcagtcctttcaagttaccacttttcctcttcatgtacttcaaagnctacaacggctactttaggntgcagcttcaccacttccactccatacaaggttctgtncccaaagctgacctttgttttttntgnttngttttgctttttgagacggagncttgntctnncacccangctngagcgnaanctccgnctcccgggttacgccattntcctgttnagcctnccaagnagtgggactacatgcgcccgccaccactttttttatttttagtagagacggggtttcaccgtgttagccaggatggtctcgatctcctgacctcattgtccgcccgcttcagcctcccaaagtgctgggattacaggcgagaaccacc

SEQ ID NO: 558076 - DNA, 1194 bp, Homo sapiens
cccacgcgtccggagcgacgtctcaaaaaaaaaaaaaacaaaaaacaaaaaactattcccagaaatttcaagaattgaattctttagtattaatttcacaacacttaacaaagagaaaaataaaacggtgatcatctcatttccgtgattaaaaacttgattttaaaattaccccaactaggaattgaagtgtctcaacctttacattattttacagtggtgaaacaattaacaagttattctacaacaaaacagaaacaagttcaagaaagtggctcactattcgtgctactatttaacatgtgtttaagaaagaacccaatttacgtgcaataactaaaggctattataattaaaattttatactgaaattacattattaagattctacattaaagtggagaaagggattactattgttccgtgtttgtggaaaccatttcgtttaccttattaaagaaagatagtttctcgaaagtaataattaaatttcaataaatctcaagatatcttacaggggcattttataactaaaatctaaagttcaatctcaagagcaatattaattaaccaccaatacaattttcaacaaagggtaatcagaacatttttaccctatcaggtatcaaacttactttaggaaaccatagttgttatacgagtatactgccttgaaaggcaaagagatcatggaacagaatagtcttaaaaaataacccaagcttcatcatattttaactcttagttcagtgacataacagtgcacattttcatactagcttgggggaaacgcgtgggccattctccagacaccacatgtgttgtgtcagagacaaatgtcgctcacttcgtgaaaaaaacatcactcaacacctggtcccgtcctctacaccgaaataaacgttctccaaagaccccgaagagtaacgcgcagcggggcaagggggcaagagcccgtgaacgagaaaaagtctgacaccagatcagaagaggggagggatagaaccaaagatttgtatgaccaaatgctcgtaacagccatgtagaaacatccacacctatcaagacataagtgggaataaaaaagctaataatagaggataaaataaagagcgactatatgaccgacactactgtttatgtatttttttttttctctgtttattgttatttgttttatatcgtgagggggga

SEQ ID NO: 558077 - DNA, 87 bp, Homo sapiens
agtaatcttaagccatctagatgtcccaattgaaacaaactggggagttgcctgctattgtaaaataaaatatactaaattgaaaaa

SEQ ID NO: 558078 - DNA, 301 bp, Homo sapiens
tctagaggatctctttatcgccaacacgtgtgaagcatgtatgagctccctactttgtgggctgtcttggctggatatgataactggtctgtgtgacccttggacaggccatggctgagctgctgctgaggaggggcaggcccacccatgtcaccggtcagtgcctttttggaactgtccttccctcaaagaggccttagagcgagcagagcagctctgctataagtgtgtgtgtgtttgtgtagtggttctattattttttataacggtatccaaaaatagccctgcaaaatttcagagt

SEQ ID NO: 558079 - DNA, 932 bp, Homo sapiens
gagtccgagtggtagagagcgagctgagtgagttgtgtggtcgggtctcgaaaaccggtagcgcttgtggatggtgaaccaagtgattgagagcagcttgctgatttcaaagaagcttcttcatatatttgacaaaggatggtgatggacttaagtaacattgaatatggaatgggcgaccctgtgatgaagatctcttgtggacacgattcccaaagaggcagagttacagggacatgatcaatggaggtagatgctgatgttgattggaagcaagttgagcttccctgatttgctgacaattgatgggtaaagaaaaaatgagtacgagactgacctggtgatgaaagagatttgagaagcattccggtgtgtgtgataacggatggcaatggcatatattaaggtgctgcagaggtttcggcattgtgatgacaaaaccgtgggtgaggaagggttatgtgagtgaattagaggttgatgagacttgctctgggaagcagatattggtggggatggtcaagtaaactatgaaagaggtctgtgagatgatgaccgcaactagggagaaccttgtggcgaatgtgtagacttctgtggacaaaattgtttgattggcctttgctctggtggactggaactgtagagaggttgtcactggctcgaaggaaagttgcttgtttgcaattagaaatcatctgccaggttttccgctatctggcgaatgtcctaaactggtttgaaagaatgatccgttacattgccgttggttacggagaagtttagcccttggcgacaaagagtgagggccaaggggaaccgtggtgccttagaaattcgaaggaaagggtgaggggggaatcggtgaggagcattttgtgtgagggcgagccccatgcggcgccattttttgtcctgtgcttcttctctta

SEQ ID NO: 558080 - DNA, 377 bp, Homo sapiens
atgttccctttgcatggtaaagggatgtggcagatatgattaagctaaggatcttgagatggagagtttatccaggattatccaggtgtgcccagtataatcacaggggtccttataaggacaggcaggaaggccagagtcagaggaagagatgtgatggcagcagcagagtctggagtgatgcagggaaggggccacgagccaaggaacatgggcagcttccagaagctggcaatggtcggtaacagattgtctcctaaaagtctccacaaagaatgtggtcctgtcaacaccttggttttagccccttaatactcatttcagacttctgactcaacaaatgtaagacaataaacttgcgttgttttaagtcaaaa

SEQ ID NO: 558081 - DNA, 522 bp, Homo sapiens
ggtaagaatggagtagggaggcagaatgaaggaaaatgcaagcagcatgataatacgtgtagtacatttagcataaaagtagaaggcacaggagagatagcaaaggccaggatatatcgtttggttttcttcacacataggtgcaaaaaacactgccattcacaagtcaaggaacccagggccagctggaaatgtggagcacacactgctgtggagcacacatgctgtggagatagcagtgtgtctgcggttcgtgtagtagtggaagacttacggtatgtagcgcaagttgaaaatggattgagactgcatggtggcatcaatgacgaaattgcctgtagcatctagtctacttgaagagaagtggagacataaggagagacaaaaacaggtttgtgccataaagtatattttcaaagacaccaagatgtggtcaatgacaattattagtacacttccctgatgccatgaaactttgccttaagaaggtgctggataccccggctagtaaaggcatctcgg

SEQ ID NO: 558082 - DNA, 521 bp, Homo sapiens
tagggggagaacctgaaaacttgtttttatttccccccaggggcgggtggtaaaagggcgtttttctttatttaaaatctatcccatctttttttttggccttcctttaaagggtgctggcaaagggggttggggctatttgcctggggggaaaaatcttccccttgggcaagagacccccctttaaaaggctggttttgcccctgcctttggggggcgacccttggactcgcaggacctttggggaccagggggttctttttttatttcccctattcgggagaacggaaaggggaaaaacctgggggcctttttattaaggggaacattcccaagggttgccaatttacaagtggggaaatttttttcttccaggggaccacataaaacttaaaggtggaatctagggtttggccaaattttttgggctcacaaggtttgggcaacttttataacttttcttggaacatgtggttccctggccacgaaagcataaaaaattcttgccagcccccaccttt

SEQ ID NO: 558083 - DNA, 250 bp, Homo sapiens
cgcacccctatatcaggaggctaggcaggagatcacttaccccaggaggtgaggttgcagctgagatcatgccattgcactccagcctgagcaacaagagtgaaactccgtctcaaaaaaaaaaagtcccaggatagaaggggctgcctggtttggcactctcggggccagaggggaaagtacagcagccagggggccccttgagaccccttccttggaaaaccgccttcctagtttacccttgcaggtt

SEQ ID NO: 558084 - DNA, 878 bp, Homo sapiens
  misc_feature (124)..(124): n is a, c, g, or t
  misc_feature (163)..(163): n is a, c, g, or t
  misc_feature (198)..(198): n is a, c, g, or t
  misc_feature (211)..(211): n is a, c, g, or t
  misc_feature (628)..(628): n is a, c, g, or t
  misc_feature (645)..(645): n is a, c, g, or t
  misc_feature (669)..(669): n is a, c, g, or t
  misc_feature (691)..(691): n is a, c, g, or t
  misc_feature (707)..(707): n is a, c, g, or t
  misc_feature (709)..(709): n is a, c, g, or t
  misc_feature (741)..(741): n is a, c, g, or t
  misc_feature (745)..(745): n is a, c, g, or t
  misc_feature (763)..(763): n is a, c, g, or t
  misc_feature (765)..(765): n is a, c, g, or t
  misc_feature (775)..(775): n is a, c, g, or t
  misc_feature (823)..(823): n is a, c, g, or t
  misc_feature (853)..(853): n is a, c, g, or t
  misc_feature (878)..(878): n is a, c, g, or t
aacaaatatccgagaaatacagaattcgcatacggagaaatcaggaggacgtcactagaagtgagcccaaaggaaaattatgcatgggagcaaagaatagatagatccaccttctcctagtgtncttccaaagcctcctagtcactggatgggaagcactgtngaaaattccaaccaaaacagggagctgatggcagnacacttaaaaacnctcctcaaagttcaaacttagatttcagatttcagtatgtgtgtaaaacataatttttcccatatccctggactcttgagaaaattggtacagaaatggaaatttgccttgttgcaacatacaattgcaaaagatgagtttaaaaaattacatacaaacagcttgtattatattttatatttgtaaatactgtataccatgtattatgtgtatattgttcatacttgagaggtatattatagttttgttatgaaagtatgtattttgccctgcccacatgcaggtgttttgtatatatacaatggataaattttaagtgtgtgctaaggcacatggaagaccgatttatttgcacaaggtactgagatttttttcaagaaacagctgtcaaatccaggtgaagatctaaagtgaacngttactaatgcactacngaagttaaactgtgggcacaatcnatgtagcctgggggttgttccncctaattgatttgtancnggaatactggaccactcccatcccattttgcnaacncaattccgggtttgggananacccatcccncctaatgcccccaaatttaatgcccacccaaattgggtggaacccaantttaaaataataataaattggccccccccntttaaaaaaaaaaaaaaaaaaaaan

SEQ ID NO: 558085 - DNA, 787 bp, Homo sapiens
  misc_feature (124)..(124): n is a, c, g, or t
  misc_feature (163)..(163): n is a, c, g, or t
  misc_feature (198)..(198): n is a, c, g, or t
  misc_feature (211)..(211): n is a, c, g, or t
  misc_feature (628)..(628): n is a, c, g, or t
  misc_feature (645)..(645): n is a, c, g, or t
  misc_feature (669)..(669): n is a, c, g, or t
  misc_feature (717)..(717): n is a, c, g, or t
  misc_feature (779)..(779): n is a, c, g, or t
aacaaatatccgagaaatacagaattcgcatacggagaaatcaggaggacgtcactagaagtgagcccaaaggaaaattatgcatgggagcaaagaatagatagatccaccttctcctagtgtncttccaaagcctcctagtcactggatgggaagcactgtngaaaattccaaccaaaacagggagctgatggcagnacacttaaaaacnctcctcaaagttcaaacttagatttcagatttcagtatgtgtgtaaaacataatttttcccatatccctggactcttgagaaaattggtacagaaatggaaatttgccttgttgcaacatacaattgcaaaagatgagtttaaaaaattacatacaaacagcttgtattatattttatatttgtaaatactgtataccatgtattatgtgtatattgttcatacttgagaggtatattatagttttgttatgaaagtatgtattttgccctgcccacatgcaggtgttttgtatatatacaatggataaattttaagtgtgtgctaaggcacatggaagaccgatttatttgcacaaggtactgagatttttttcaagaaacagctgtcaaatccaggtgaagatctaaagtgaacngttactaatgcactacngaagttaaactgtgggcacaatcnatgtaaagccaggggggtttggtttcccctaaatggaattggtaatcnggaaatttacctggaacccaactcccaattcccccattttggcctaacctcctttccgggtnttggggat

SEQ ID NO: 558086 - DNA, 127 bp, Homo sapiens
gattatcgctacagatggcttttcacgacagagtgttggaccatcccacttttgaggatatgcaggttctcgatgttagggaaaaacagagacccaagttcccagaagcctggaaattaaatagcaa

SEQ ID NO: 558087 - DNA, 169 bp, Homo sapiens
ggcacgaggaatcaacctggaggacgaatttcaaacacaatttttaagaaccagtcacagccttgaagacacatgcaggagagctatgagctacctgcatcatgctatcgacacagcttggcctatcatggagattagctgacagtcgtcaacttctgtgactgggcgt

SEQ ID NO: 558088 - DNA, 394 bp, Homo sapiens
  misc_feature (390)..(393): n is a, c, g, or t
tccgggccgccccctgcccaagggagcaaaaacaacttccagtttctcctgaagttcgctgagaaacagctcgaaaccgaccatgttttcatttgcttccacaaaaaccggaaggacaaaacccccttgctccgaaccttcagctttttgggctttgaaattgtgaaaccggggcatccccttgtccccaaaaaacccgacgcttgcttcatggcctacacgttcgaaaaaaagttttcgggaaaggaggaagaataaggccccctcggggctgggcatccggcccctggggccaccccttgtcaaccgggtgggtaagaaccgtaaactcgctcatctcgcctgggtttgtccgcatgttgtaatcgtgcaaataaacgctccctccgnnnna

SEQ ID NO: 558089 - DNA, 103 bp, Homo sapiens
ggatgtgatagctgctttggacctgtatgtggagcaggccagtgggacaagtgcattgaaacagctaccaagcagaactacaagattctgcacaagtatgtgg

SEQ ID NO: 558090 - DNA, 269 bp, Homo sapiens
agttaccgctcggtactgtgactaacgtgtgtgtaatttatagtacagttagttttcttctgactgcacttattctcatattattaaaatgctatgcgcattttaccttgcattagtcctcattctaccacatgttaaccctctagcttataatgcatacactaactgggggattttatttatgagtggctctagaactaaacgagattattcacatccagcatcatcattaactaacattctgaactatgttagtcacagtctcccga

SEQ ID NO: 558091 - DNA, 456 bp, Homo sapiens
agcggaggagccccggggcggaggagccggggaggcgggaggcgggaggcgggaggtgtggggccgttgaagcggctccctcccgccccagcgccggctggccccacctgccgaccgcggctggccactccgacctacccggcgaaggtccgtggacacgcgggctcggagcagtccaagcccatgagggccgcgcgcccggccgcggtgctgacgagacggagctcctggcccccgaggaggagcagaggatcaatgcggttcaagaatcgattccagcggttcatgaaccatcgagctccagccaatgggcgctacaagccaacttgctatgaacatgctgctaactgttacacacacgcattcctcattgttccggcatcgtgggcagtgccctcctccatcggctgtctgatgactgctgggaaaagataacagcatggatttatggaatgg

SEQ ID NO: 558092 - DNA, 696 bp, Homo sapiens
catgatggctcagggtggtcatccaggttgaaaactgaccgtgtgatgtttgatttgggcttcatttcgtgtgtaggagcacggttagactcactgttaaggaagctggatgcacttctctaaaaggctgcactttccgtgagcacttttcgtggtacaatccacatgacccactttctaccctgggggacgttggttcagaggctggtagcacttggggagagtatcttaacacagtttcttgacagcagctctggaacttagtatttctgtcccgagtcttgccacactgtgactttgagtagctcctggtggactcaaccctgttcaactcagagacgggccttctttcactgatgcaaagctttaaggcttctctgactgttctgaaactctccgtattcttgccaagtctaaagagactgaagaaaagatttaaatcctaataaaaatcagtcgataattcctgtaggttctgctggaggaatacatacttgtttggtgatttaaaattaagtgtatataatgttgatatgtgtgatacagtacaaattcttactggctttttgtttcactttgtcatttagtccataccacccatgatgttttcaaaatgtttcacaggcatattccgctggatccatttttccttgtcactgtgagatgggcagtccctgttactatgcattccactcc

SEQ ID NO: 558093 - DNA, 417 bp, Homo sapiens
catgatggctcagggtggtcatccaggttgaaaactgaccgtgtgatgtttgatttgggcttcatttcgtgggcaggctgcccacgaagtggcttcaacagctatctatatgcacacgcacacacacctcaaacctttcttttgagttcccaacccacattagctaatatcccaggggcacctaaaactcattctctcccccctaaacgagaaagaaactggtatcattacggcaggggttttccaggtcacaacatttgtacctattagaaccgatctgtatttccacgactccgcagtttgacctttacaacagatcagacgatgatcatgatggctgtggaaaagagccgtcagaaatgctgtcattagattatcagttcgtccctgcaattcatctttaacactgtgagtcag

SEQ ID NO: 558094 - DNA, 462 bp, Homo sapiens
gtgaagtcgatctgcaggcgtgtatgcatgtactgggccgtcatatacaatatatagttcccaattgtgaatgaaaaggagtatcaataggcatgacccaaaaccttcttctacacagttaaacaaaatttctcaagacctgatttaagagcaaactttttaaactgagtacttagggccgggtgtggagagctcatgtctgtcatcccagcactttgggaggccgaattgggccgatcacttgaggtcaggagttcgagaacagcctggccaacatggtgaagccccatctctactaacaatacaaaaaattatctgggtgtggtgacggatgcctgtaatcccagctacactggaggctgaggcaggagactcgcttgaacctgggaggcagaggttgccggtaagccgagatcgcaccattgcactccagcccgggcaacaaacagcgaaactccatct

SEQ ID NO: 558095 - DNA, 215 bp, Homo sapiens
taagcatccagatagtttataagagtaacacaaacatcagtatcgccaaatgatacactcttatcacttttagtgttaataacacagataatcttatgtaatatagtgtccctgaataactataaaaacttcttggaattatttagtatttaaaataaaacactattataataactggtatcatagcccttcaaaagacacattctgaaatgcta

SEQ ID NO: 558096 - DNA, 628 bp, Homo sapiens
  misc_feature (10)..(10): n is a, c, g, or t
  misc_feature (76)..(76): n is a, c, g, or t
  misc_feature (79)..(79): n is a, c, g, or t
  misc_feature (104)..(104): n is a, c, g, or t
  misc_feature (128)..(128): n is a, c, g, or t
  misc_feature (134)..(134): n is a, c, g, or t
  misc_feature (141)..(141): n is a, c, g, or t
  misc_feature (161)..(161): n is a, c, g, or t
  misc_feature (188)..(188): n is a, c, g, or t
  misc_feature (263)..(263): n is a, c, g, or t
  misc_feature (295)..(295): n is a, c, g, or t
  misc_feature (321)..(321): n is a, c, g, or t
  misc_feature (330)..(330): n is a, c, g, or t
  misc_feature (345)..(346): n is a, c, g, or t
  misc_feature (364)..(364): n is a, c, g, or t
  misc_feature (462)..(462): n is a, c, g, or t
  misc_feature (484)..(484): n is a, c, g, or t
  misc_feature (562)..(562): n is a, c, g, or t
  misc_feature (604)..(604): n is a, c, g, or t
ataaacttgnatttttatactttactatttgaaaatcataggcaaaaaaattaatttttattataagaccccttgnccnttttcagttgtctctcaggacgganggcatcatccttcctcttatgttngcttangccttcnttttgtgtccttataaattngcttctaatataagctccagccctttnggggcttctcctgggtagggatttgcgtcccgttttcccttatgagggtgtttcttcatttaaccccttatttgnacggccttccccgcaaatctgggaggcaggcnagccttgggcaatacccttttcttcnaggccgctngccctcttttattgnncggttttatgttgcagtnctctgatactttctgagttcaaagaggtaaatgtataaatttcagtcccttctgaacacagatatcatcagaaaattaccattccctagcaggatgtnttcgtgtttgtattcgtatatnccagtacatttcctttgaaaaaaaaaaaaagtggaacacaaagtaggaagtgagaaccttctggctttggatggattnacttcttgattctttctggttttgcctgaacaccaagtagcntcataatcaaagggtcattttctg

SEQ ID NO: 558097 - DNA, 158 bp, Homo sapiens
  misc_feature (39)..(39): n is a, c, g, or t
  misc_feature (102)..(102): n is a, c, g, or t
gatcaggggaagaataccaacctgcataagtgtactaantctacgtctggttaatgtatgtactctcctggactgaatgcagtgtataattcctgtctacantagaagtgtgccccagttccacatttgattacacatgtgagatttgctgctgttgc

SEQ ID NO: 558098 - DNA, 1179 bp, Homo sapiens
tgccgtctctcggagacagagtgggagacgctgtgagggccgctgaataacgcttccaacatgatgcccacagccagtttaatcctattggaaagaggggactgatagctcccaaggtcatcccacctagactttggtgagtaaacatcagatgcctgccaagggtgacttgcatggaggctgtaaagaactacccatgggatccccgtggcatggacaatgcttattgtagatggcagaggcgaagctcacaatttctaatgatggcggccacaattctgaaagcgttcttgagtgttcgtccagtcctgcagcaaagactttggtagacattggcaaatcccaagatgctgaggtgggtgatggcagcgcagcctcagtgaccttgtctggctgcagagttactgaatcaggtgaataccctatgtgagcggaatggtttacatcccccgagatcatgcgattcgagcttaccgaacagccacccagctggcagttcaacaagatcaaagagattgctgtgaccgtgaagaaggctgatgaagtggagcagaggaagctgctggaaatagtgtgccagtgatcgctctgagtctccaagctgatctcccagcgagaaagctttcttggctaatgatggtggtcgcgatgcagatgatgatgctcgacgatttgctgcagcttaagatgatcgtaatcaagatggtacaggttggagcctcgaggattctcagctgatagctagtgttgcttcaagatgacttatccttaagctgggtagagatgcaacccaataagtaccataatcccaagattgtcctttgaatgtcgactcagttggaagtgggaagaccagctgaatagaatccccatggagaattcagggcatggtgaggcgatgaaaggtcaccctatgacaagggtggagaagactcggtcgtcgcgggggaccaaaaagttttgttgcaaactccccatggggggatttggcgccaagactttgggacaggggacgatatctaggagagggagataccagagtgatgattgcgaccaagacgtggggagcacagccgcaaggaggatctttaatgttggcacaggacgtgtaacagacgggatgagacgccgatggccgcacagatactgcgcgacaaacagcgagacgctaacaggtgt

SEQ ID NO: 558099 - DNA, 222 bp, Homo sapiens
ggaagtcttcctttcttttggacacctgtcaatggtcatattactgagaaatatttaatttccatatcagttttgaattagaagttttcttttaaaaagcaactatgaggacatttgagtgcagtgctagatggtagcgctctgataaacctacccccttgttttgttccaatgtttatagtaatgcttaatgagaagagtggtcatttggaatttgctctt

SEQ ID NO: 558100 - DNA, 937 bp, Homo sapiens
gtaaagaccttgtcctcgatgtccctatcgactccttgcctattctgataaatagtccagtatcagtacttctctgtgaatgcacgacgtgtgcaaagtagatacagcaatgaaatagtgaatagcatatactagagtaaattgatcctcatgtgaagatgtccacatcctagatatctctttacatcatatgttaaccatgtacttcacaattgctcttcatcaatcttgacccattcgattattctttcctctatttctgataaattaccttccatactcttccttcttacacttggcctatctattccactccttccctatctcttccatttccttcctataatctccttcatttcagtccttgacaagtctattaagagatgatgtaagtgacttgtcgagaatcttgacctatatataactcttagacttctccccttctcatatttatgtttctatacctttctcactgtcttctgacccatccttccatctattatccactacgcattcactatgacattatgcctatgattgccgtggtggcattgaattgtatgaacatgactctcctatgtagaatgcgtggctctttgtttcatagtcaagtgatccaatcctaagatctcgtcacatttcctacgatctgtagtctatcgtacttgttattccttttgttccaccgtaattctttaggagtagacatgaggcaacgttggatccgggggtgcaaaatctcccgtggccccacgttggatagtcatctttgatataaggtgggcgcctcctgaaatcctcttacttagcaatgggaggggccaagggtcaaatccgtccaaatgccttgtgtgcccaaccacaaatgcttctgtcctgggtggactcaatcatcattcaacttcctttcccttcatgagctcccaatctgaatagg

SEQ ID NO: 558101 - DNA, 1278 bp, Homo sapiens
  misc_feature (1018)..(1018): n is a, c, g, or t
gcaggcctgtgcctatccctgactgtcgccaggctgtgccccgtggggtcaggagctccacgaagggccagctgggcagtattctagagattggcctactcagggcccgcatttcttgctgcaataggctggctcagagcctagtgttccctccatggagacctaaaagacaggtgccatagtgcctgcacctgtggaccacacgcctgagccacatggtgcagtccggtgataggtctccacgcagggagcggctgtaggacccctgcttctctgcaggcatgccactcgtcctatgtgcctggacaccttgcaagtagcctgtggagccatcgctggcaatgcggcaagatccttgtgtggcaagcattgcggctcgctctgaacagacggagggccacgtacggacggcaggctgctgccggcggcgcaaccgttgctcgcacgggcgcgtcccttgcgcttcccctggccagtggggcctcttgactcgtagggcttttgccgctccttcggcctcgtgcgcttttcctattgcaccttgggccgggctatggaactttgccatggaacgggatcgcccaatacgcggaagacattggctcgcgccatgacttcggcccgtcgctttaccttgcccattgacacaacgagtcccgaatctaggggagtcaacaagcgtataagacgtgcgtgcattatccttccccatgacgataattagcgtgggagccccattgccacatacaatgcccttttgggaccagtgctcgacggagagcgccacttaggacgctccccccacttggcgcacccgggtacagactaacttgcgccacaacacttggaggttgcccaccgccgagagtgcactcgggctcaaagggattccacccatttgtcggtatccccagcaggttccaacacacacccggttcgatacataactaccccatttctaatgcactgcgccaagtctacacacgttgtgcctgtgcaacggtgcgcaagtgaacgncatcccaaaccttccccccgacaaggtacgttggtcgtttgcggcgactaccatccagatgtgtcggggacaggcccccgggatggcggaggcacactggacaaaacaccgggagcagacaggtaacggggcgcaacgcccatcaccagttgccatgtgatggtggaccccacccgttgtactacgggttcccctcccttgctccccttcccttgggtgggcactaaacactccgtattgggataggcccctatgatcgc

SEQ ID NO: 558102 - DNA, 194 bp, Homo sapiens
  misc_feature (55)..(55): n is a, c, g, or t
  misc_feature (71)..(71): n is a, c, g, or t
ctgatccatgagtcataaagaaaaatgttttaaaaagaagtgtttggtgactgantgaataagggaatgantaccttcattttgtaaattagagatttaaattttgctgtggcttggaccttcctgtagttattttgagacacttggtgtttattctgagccagtttttccacgtaaagtttccagtacatata

SEQ ID NO: 558103 - DNA, 704 bp, Homo sapiens
  misc_feature (554)..(554): n is a, c, g, or t
  misc_feature (566)..(566): n is a, c, g, or t
  misc_feature (576)..(576): n is a, c, g, or t
  misc_feature (618)..(618): n is a, c, g, or t
  misc_feature (649)..(649): n is a, c, g, or t
gcacgaggcctggtcagaagaccccgtctcaacaaagatgtgaaaaaattggctggatgtagagcacacctgtggtcatagctgctcacgaggctgagttgggaggatcgcttgggcccaggacttcgaggctgcagtgaggcgtgatggcactgctatactctagcctgggcaacagagtgagaccctgtctcataaagagaaaagacaaatttgctcctcttttagctcagccaagagatgctgttttatctagaagcttcccctggtgtctccattcttcctgggtgatttctccctctctgctttcagcagccacctgtagctgatgacttcctcctgtcccacttctttccagcctcactgccactattttaggtaacccagagttattgcaggtcccatcgccaatccacacagctgcctgaggaattgatctgaaacatcatgtccctcgtatggcatccgaggccctcataatctggcctgattaactccgatctcacctcatgtgccatccttcccccaaatgtgccttcctcttcagctgtccntctgcggggctncctatgcctngggcaactgtgcttaccaccccagatagctggataaacaggncaagggttctgtgccccatgttgatgctggnatctccattctgggtattcctatggcatttaccaatggctactggcacttcctgg

SEQ ID NO: 558104 - DNA, 725 bp, Homo sapiens
gtgagtcccaagcgtgtgtgcgagaccagatagctctaggacgttcttctgtgtgcattgcttctgtaaatgcaggcgcagcttgtcgtgtttccaaaccagttgtgccgtccactcactccttttcagaatagaaatctcctctcgcttctctggccttgtgaggttgaggacaactggaagattctgactcaggaatccagaactaggtctaccttcaacatttatgcagtcagggcagggatgcttatatctttcataagggctggtgcaaccatatgaactgaaaaaacacgcattttgtaatccaaatattgatattccttacaccaagccatcaggctccttttatcaaatagcattcagagtatttgaatgttcaccagacaccagccccggtgggcacagagagaacaacattcctctctgtcaacatcgagaggctttaaaacaactgcttagtggaaaccttttgagagatggaaaacaagctttctggtgggtgcatttttctggcccgggggttgcctggattcacgctactgggcccctgtccacccggccccccagtttgtacgcgttgcaacaggtgtttctctttcttggctttaaatttctgtggcacatgcgttgtgccttctgggaacagggcaccaatgaggggggccctagcacaatgggcttggaccaaaaggaagcggcttaattaataacttggttaattt

SEQ ID NO: 558105 - DNA, 422 bp, Homo sapiens
tccgggccaccgtctccggctacagtggggaaaagaggttgggaaacctgactctcatgccctgaaacatctcggtgctggtgtgaaaggccagcactgtggtggcattgactcccggacagtccagcagcccacagggtcaggctctccatgaaggcgaaggctgacgctttgaatgtccagtagtcaatggcaccgggaatgccagacagtgccagcacgaagttgaggcacacgatgtggccattctgcagctccagcatacgcgccagaaagcccttggtggtccagaactggcccagggtgttaatgtgttggaccttgaagagggcatcatcatcactgtccattaggctcttcacatggaccgcggcggcagtgttcaccagtatggtgatgtcacccactttctagcgagcggt

SEQ ID NO: 558106 - DNA, 190 bp, Homo sapiens
atggcttgtcatctctgaaatctcatccgggtattcgtgctcgtccccatgcttcccagcctggcctggagggtctcaaacttggtctggtacaggcttcagcctctagcctggtgcattttggccatctcctcatactgtgccttgacctcagcgatgatgcggtccaggtccaggtaggagtaccacc

SEQ ID NO: 558107 - DNA, 592 bp, Homo sapiens
  misc_feature (180)..(180): n is a, c, g, or t
ttcgataagtcgaaactgaagaagacagagacgcaagagcaaaagccacggcctcccaaagacacgagcgaacaggagaagcaagcaggcgaatcctaatgaggcgcgcgccgccaatatgcactgaacattccacaagcagtgccttcttattttacttcttttagctgtttaactttntaagatgcaaagaggttggatcaagtttaaatgactgtgctgcccctttcacatcaaagaactactgacaacgaaggccgcgcctggcttccctgtccagccagatagatagacagcatgggaaaggccaggcagggaaggcaaagaacttgcatgttggtgaaggaagcaagtggggtggacagaagtggggtgggacgacagtgtaaatctacgagtaaaacccaagctggccccaagggtgtccctgcaggcctggtaaaatgcgcaggttctaaagtccagaggtgcgcagtttatttagtttatatgtggtatccaaacagtggactatttcaaatctatttgggcaagtgcgccaagtgtgtttctgcaacatagtgggcaaagacacaacaacaacaccaagagg

SEQ ID NO: 558108 - DNA, 209 bp, Homo sapiens
  misc_feature (208)..(208): n is a, c, g, or t
atcgggtcggtccacacgccaccggagaaggtccactgccacctacttgtattatacccagaaacagatatagggtcttctactccaacaactaaagagcagacactacccctgacagggctctgacaaccacaaagcaaagaagaggctttactcaatacccagtcaccacaccacatcaaggacaccccttctccggtggcgtggnc

SEQ ID NO: 558109 - DNA, 116 bp, Homo sapiens
gggccctttttttaaaaggttttcccccacccctaaaaccctttccagggtgttttgggacccaaccatgggaaaggggtttttgggggtgaaaataaaatggggtcccccgccca

SEQ ID NO: 558110 - DNA, 159 bp, Homo sapiens
  misc_feature (158)..(158): n is a, c, g, or t
atgaacaagtctagggtcattcataggtctgatcaatctaaatgagtcgatgacacaatgcctgacagggctctgacaaccacaaagcaaagaagaggctttactcaatacccagtcaccacaccacatcaaggacaccccttctccggtggcgtggnc

SEQ ID NO: 558111 - DNA, 896 bp, Homo sapiens
cacgcgatacggtgagaccatccactccacatctgcatcacgtcatggaccactcgatgtcatggagtcccctcctccagccgcgtggacaacaacagcttcagtccactgggtatagtccgtacatagaaattgtgtttgctaaacaaagtgtagcccttttagccagatgctaggctgtctgcgacacaagtgctaggagtaatcgatagacagggagtgggtgctggggaacgggctggctagcaattgcagcatcactgctgcatgcctctgaaacagcacgtcggacaggaacacgagacacaaagcaagtaagagtagcaaagaaacaatagaggataaagcgtgaaaacggacagaggaccaagacgcgagacacgacagcgacacacaagaggacttccaagatgacatgagggaagggaactcggccatgtaaatccaaatacgcagactcgtgcacgcgcaagaaaaaggcccccaatcccataccagtataacggatgggaacaccacaaagaacgagagaaataagagagggggaacaagggacaccaaggccatataagacacggtgaacagggaccgcacacagataagggcccggactgagtggaaatatactaaccgggagcagcgacacaaggagggatgcgaacacatgagcaaaatcaacgaatacgacacagacagcccgcagcatgggaaaggcacgaacgaccagggaaatggcagacagggaatgaccgccaaaaaacgaggcagaacacacaagccatagctactaacattaaatcaaacccatggaacaacaaccagacaagggagaaaagacagaaaaacgaagcaaatagacaggacgcagccgcaaagaccagaacacaaaaggacga

SEQ ID NO: 558112 - DNA, 440 bp, Homo sapiens
tattacaccgcggtaaaggataacctggtggcctgccactgggtaagttgagcctagtaaattgcctctcccagaaacacagaggttggaataccatgaaactgaatctagcagtaatggacagaatgggtcaggagctacagcaagtgaaaggtcacatacaagcccttagtaacaaatggacagaaaccataagtaaatagagtgaattgaagcagaacacaaaaagaagcagaagtgggatggcatgcagcttagacaaaaatacagacatgggtggccggggcagtggtgcacacctggagtcccaactgtgtggtaatgctgatgtgggagaactgccgaaaccaggaatccgtgcctaatatgcacttggaatagcatctgttaataagtcactgcactccagccagtggcaacagaagtgagaacttgtctct

SEQ ID NO: 558113 - DNA, 436 bp, Homo sapiens
cggtagtaccgattggagagggctccaaatggcccgggaaatggcactttcgatttcaattatacttagaggactgagaccacttggccatcgcaatgagaaacggtctgagattccttatattcaggctttcttcattctccgtaaccacccttctctctgccactcctgctctactttccaaatcctactcaccagctcaaaacctgactcatctcccgtcaccccacccacagacccagccgatgactcctcttccttcgagcccgtggattttctccctcctcgacagcatctgatcctccaccagagcatcatgatcctccaccgtatgtccctgctccggctctacccctctcccccactctctccaaccaacccacttctgactctgagtcctctctgcctcctcccctcacccgctctcgggcgcaag

SEQ ID NO: 558114 - DNA, 160 bp, Homo sapiens
tgattagaggatcttacactgcggtatactgtgcgagaggttacacacccataggcactggggccgtggcaccctggtcactgtctcctcagcgggaagaccttggggctggtcggggatgctgaggagacgatgaccagggtgccctgtgccccatgtg

SEQ ID NO: 558115 - DNA, 931 bp, Homo sapiens
atgtacatgcagcgcagttaggtctacagagacgctacttcccctatcatagaagagcttatcaccttacagttgatcacgcctcataatacatgttccttatctgctacctaagtcctgtatgcccgtttacctaacagttcagaacaaaaactagcataatactaagatcgtcagacgcgcagtgaattagaagcgcgtcctgaactatccttgaccagcaaattatccgtagttccccaggctgccctccccatcccttaggcatcccttaacataacagacgaggtcaacgatccccttccctttaccatcaaaatccaattgtggccaacccaatggtaacttgaaaccttacggagtacaaccgacatacggcgggactaatcttttcaacctccctacaatatttcccccccattattaccctaagaaacccaggcgacctgcggactccttgaaccgttgaacaattcgagtagtactcccgattgaaagcccccattcgtataaataacttacattcacaagatgtttttgcactcattgagcttgtcccccagataaaggcttaaaaaacagaatgcaattccggggacgtaataaacaaaaaccaattttcacagtacacgaccggggtatactacgggacacttgctctgaaatctgggggagccacacccacagtgtcattgcccatcgtcctagtagttaattcccttaaaaatcttggacttcagggccggattaccctataggaccctttaccctttagagaaaacaaaacatcaaaaaacttgtgcgccgcctcaaagactttaaccattgggcccgcccggtgaggaagggcactgtcaagcctgcctaattgcgggtccccaaacccgggccgagcgcacgcggcgggaggcagcggtaaacccggcggcga

SEQ ID NO: 558116 - DNA, 167 bp, Homo sapiens
cccccccccgtttttttttttgggggggggggggggttttttttttccccgggggccccttttcccccttggcccttttttggggccccttttaccccgtttttttccaaaaccgggggggggggggggggggtttttccgggtttttttccccccccggggcccca

SEQ ID NO: 558117 - DNA, 173 bp, Homo sapiens
atcctatttctctggggggctgcaggtgacagcaggcttactcttccagggtgcatgggcaattggtgcgctccagggcagagacctgtattcctatggtcccattcaccagtgctggaccccatccagcattggcaccagggccattgcacacgtcaccatgggtgagcagg

SEQ ID NO: 558118 - DNA, 242 bp, Homo sapiens
gcggagtaaccggctatacatactggcaaggggagcagaggaaagagcaagcgcaccaaacggctcaaacgtttgtcgaagcactagaaaatcaggaccatgagcagctgtctgcaatgctctctgcgtcctcattagaagaagcggcttacacacgcgaagaggtagtggaaagatatgaaacgatttatggcgggattggcgcttcagaatttcaagcggcggatatacgattggccgaa

SEQ ID NO: 558119 - DNA, 1188 bp, Homo sapiens
  misc_feature (802)..(802): n is a, c, g, or t
gggcggctgggaccctgtacacgtatcctgaatagactggagggccttcaaggctctcatcggtgctcagtacagcggaggcacaggtccgcgtgctctccggcaccattccgcccacttccattttggctcaaagtccaagccgcagcccctgcaatttctcgcgacaacattgtgcctgcgcggtctaaggtcccgagtccgattctggccagggtgactgagtggattgctgtggtgtttgagaagcatagtggccatatgtcgcatagctattgtgcagcaagtgcagggagctgcgtgtgtgaagtactccgagacgcgcagcagtcaccaggtggtcgtcagtggcgcttgagcttatgcctgattcctgatatagttgacccctcatggccatatacctggtgctgttaccgccgaccttgtggcagttatgtcaacctacaaagtaagagactagtgcctaccatgaacacagtggcgacaggcaactgggaacacgtcgacggcggacacttcttaggggggcgttcgcgtagcgcaattgctttaactctagtacactgaccgacgtggacttctcgtatctgagggctgtgtgctagaaatctgcaagtgaaccaatgttgggcttgaccattcaccaagtgtctgtcctggacaccccctggattggggttgggggcctgctttaattcacggcagaggtggatccctaacggaacgcgcctttcgtaattcgcggcccaggtggcgcttgggtgcccgctacactgaacccagagctcttggctagggntttgctcctccgattcgctttgccaattataaaagctcaatagccccccgaggtttgcccggggccctagagcttttgcgggcggcggatcggataggaaaatccgtagctgttcgatcacaaagaattggagcgccccccgtgtgttggcaatttggtcttaaaggaagcaccgttacggcaacgaagaaaccccgcagaatacccttaaccactatggcggagcaaccaacgcagtcgggaaaaggacggacgaccggggggtccccgcggcggcgaaacgaaggcacctccgggaaaggcccgcgagggctctcgagctggcgacttgggatgcgcccgaccaacaggggggggttgcccccctggctgccttgcaggaccga

SEQ ID NO: 558120 - DNA, 188 bp, Homo sapiens
tcggtcggtccttcagtggtacgtcctgcggggagcggggctcagatgctcaggccagctgtttatggccgagcccggtgaaggctcctttgaattcccgctaccatcagccgtttgaggacttccgcatctcccaggagcgtctcgctagaccacttttgacatgtccatgtctctggtgccccggt

SEQ ID NO: 558121 - DNA, 295 bp, Homo sapiens
  misc_feature (55)..(55): n is a, c, g, or t
ctcaacctgtaatcctaaccctttgggaggccaaaaaggaaggctcacttgaggncaggagttcaagaccagcctgagcaacatagggagacacccccccccaccccatctctacagaaagaaaaggaaaaaaaaaagctgggcatgatgacacacctctagtcctagctacttgggaggctcaggcaggaggctgaagcgggaagactgctggagccagggagttcaaggcttcagtgaaactatgacggtatcaccgcactccagtctgggaaacagagcaagagcctatctc

SEQ ID NO: 558122 - DNA, 120 bp, Homo sapiens
gggggggggatttttttcccttttttttttggggggggggctcccccccccccgggcccctttttttttttaagggtttcccaaaaaaggggcccccccctcttttaaagtttgggcgga

SEQ ID NO: 558123 - DNA, 193 bp, Homo sapiens
  misc_feature (51)..(51): n is a, c, g, or t
  misc_feature (94)..(94): n is a, c, g, or t
  misc_feature (118)..(118): n is a, c, g, or t
  misc_feature (183)..(183): n is a, c, g, or t
cagactccagaatcagctgcaaggagccctgtatgctgtgggactgctggngcatgcagcgggctctggcttccacccttctgttctgagatgngggtggtgggcagtatctcatctntgggttccacaatgctcacgtggtcagccaggggcttcttagggccaatcttaccagttgggtcncagggcagca

SEQ ID NO: 558124 - DNA, 984 bp, Homo sapiens
tctcgattataatacgttgaaaatcgctagaactcagacgtcctttggcggatatcagactaacttcttgataagacttcaaaacggtgcgcgtatcggttttccacggtgctggacaagattctgtcccccaaattccggggaagattcttctcatgaaacatggggggaccctgaaactcgcaggagctggttgaccaccccgcttaccagaggggaaaccaaaggggaatcttgacaatccctttaaggtcggccctttttcccagagtcttgtccttgggccccacccgagacatcgaacaaattggggtttgcccgaaatttttttacgggtttggcttcttcccgaagagatatatggaccatgtaagccaccccgtgggggaccagcttaaatttcaccacaaacggtgaaggacttggtctttccctcctgtaggtcttgttcctaacaagaaccggtaagcccccccctaaaaggatccatggggataccccctcatgtttggatcgcgtgatcaaccggtttccccgcctcacccttttgtctaaaaatctatctgagaaagggcgaatatgggaagagaggaaccactttgagtccgggaaacacacccatagtctttaagcacatgttaaagtaatggaatctgcgaatacacttcacaacaacgtaaatccctgaggcttggtgatctgaggtataaatagcacggtatgaatgctgcggagctggagaaatagagaacgtctaaatactcaaggggtaaatttgcacagcgtttagtttttttggccctggttcaatgatatttaatggtgttcaccgtgtcccgtggaacaaataagaaatggtaaaggtgtcatttcccaaatttaaattaggaaaattaattagatgaccttaaaatttttacccgccttttttataaggacacctgccttttttgtattgtaaaaaatttcccttttaacctttga

SEQ ID NO: 558125 - DNA, 244 bp, Homo sapiens
ctttaaactttttaaaaaattttaaccttttttccagcagatatggagggagctacaaatcaattcacatttttaaaccaattttagcaaacctgtcattggcaatctctgaggtccctcatggagctccacagatccattttaggggagggatttttggctcaaaaacgatctgaccacctctgccctgtccaccaggataagtgacacctaggacccaggaaataaatgccgatgatttgtg

SEQ ID NO: 558126 - DNA, 168 bp, Homo sapiens
ccaggattcgagtctggaaggaggctacgtattcattctacacactctcctgtgtgtgatagagcgtactatattgtgaggggctatagctcactgtcctgtagaacagctgcgaatgcactgtgctctttctcacagctgaattgattacttcagaggcagctttct

SEQ ID NO: 558127 - DNA, 240 bp, Homo sapiens
ctcaaataacagggtatctgaagacctggacctctaccgaatgtcgcgctccctgggtacgccaagtagcagttgtcgtagtggactgacagcgcacactggcctgcagcgtttggaggcgtctccctgatcgtatgcagccccttcatgtcccgaattttgtggatgtacagggactcctccaggaatactatcagcctctgcctgttgagctatcacagccagacaagagttgaagaa

SEQ ID NO: 558128 - DNA, 248 bp, Homo sapiens
tctgcgccttcctaggagagtcttccatgtgttgagttttcccaagccatgcgcgttgttttctcccggcttttctagttgtttggctttgtgccggcttcgttttctgtggctttttcgcctttttcccgttggtgttttttttgccttggttgctgtttttggcccttttttgtgttgcttctattttacctcaaattgtaaatatagggtaatcaataaaatccatacatacatttaacacaata

SEQ ID NO: 558129 - DNA, 106 bp, Homo sapiens
  misc_feature (83)..(83): n is a, c, g, or t
cacgatatgacacatagcattgtaaaatgactctcactaagctacatgtcatttttttttcggaacgaaatgcttgtctgtanatatcaaagattagttaaactgt

SEQ ID NO: 558130 - DNA, 474 bp, Homo sapiens
tcagacaacaagaggcatccctgtcgctgtcgataagaaaatccagctgggcaacatggtgaagctcagtctctacaaaaaatacaaaaatcagctgggcatggtggcgtgtgcctagtagtcccagaccactcgggaggctagaggtgagaggatcacctgagcctggggaggatgagactgcagtgagccatgattgtaccactgcacccctagcctgggtgccagagtgagcaccccgtctcaagaacacaacaaacaaacacaaaaaacaactcaggggaagactgcgcaaagcaaacgaaaacataggaaaaagggaaacaaagatttggaaaaaagacacaatcccaatagaatagcccaaggacaggaaatgcacagatgggtcatgtccctccctatagtcaatgaaagtctctactgccttcccttaatgctagtaccttggctctgctgacaagttgggagcca

SEQ ID NO: 558131 - DNA, 216 bp, Homo sapiens
ggaaatttttcccccccccccttttttgggtgtttttttaaatttttttttgggaaagggggccccgggggaatttttttctcccccatttaagggggccgggggggggggggttttttcccccgtggttttttttgggttaagggggcctttttttttttcttttttccgggggccccccctttttttggggggaattggggggggtttccccca

SEQ ID NO: 558132 - DNA, 86 bp, Homo sapiens
tcctacagcacaggccccaggtgggctacatcagggtacgattttatgaaggctctgagttggtggctgactctggcgtcaccata

SEQ ID NO: 558133 - DNA, 151 bp, Homo sapiens
gcctcggcctcctcttttgattgtacagctttgtgacctcctatgttctgacttagccacccttggtgttaattgccccaagaaagagaggccaagattacctggtgtggggaaacaaaaaatgtgacgtgaaaagtgtcgcactgtgtac

SEQ ID NO: 558134 - DNA, 197 bp, Homo sapiens
actgagcacccttcgaactggtattacagtacagtgaggcaactagcaggtgatacgccactagatctggaaggcaactgggaaggttctccgcatgaaggtagaagcgctactaggggttgttgttgtcagacgttgcactcattaggcaaaaattcatttttgacggcaccctcatagagaattccagttgtcgt

SEQ ID NO: 558135 - DNA, 644 bp, Homo sapiens
atcacgagccgaaagagtaaaggtgctgcaatgatgttagctgtggacactgtggataacgcaagaacataataaactagaaaacagaagaaataaataaaaaaattgccagtgggtggaaagatcccttagagaaagacatcctgtgtgtgcagcgatacgctcactgattatccatcatcagctagaagactacgatgaaagatcactctttgcatatggacttgattcactcacgttgaaaaatccgcacgtgctaagcagtcttccagtaagagggacaccgagtggtcacttcgaactgtgcggctgtgagcaagcggaaacagctgtaagcgcattgtactcaagaaccaccagtcccggtttctgactgtcaacacagccatattgatagctttgaacaagagggagtatgaaatcccatccaacctgactcctgcagatgtctttctcagggaggtatcccaagtagataccatctgtgagtgcttactggagcctgaggagcaagtctcgagggatgcacctatggattccatcgaatgggctgacagtggttgatcaacgtgaacaaaaatctcaaggatatgctgcaggctgctagatcattatcgcaaaatagaaaatctcgtatagaaaga

SEQ ID NO: 558136 - DNA, 205 bp, Homo sapiens
gagggatttcggcctgagagcgggccgaggagattggcgacggtgtcgcgcttgttttcgttggcgggtgcttggctggtgggacagccgcccgaagaagcaccatgatttcggcgcgcagtttttggatgagttaattgggccgggaccaaacctagccccgacgagaagcacagaacgtcggtgggacacgagagctttgaaa

SEQ ID NO: 558137 - DNA, 563 bp, Homo sapiens
  misc_feature (27)..(27): n is a, c, g, or t
  misc_feature (89)..(89): n is a, c, g, or t
  misc_feature (93)..(93): n is a, c, g, or t
  misc_feature (99)..(100): n is a, c, g, or t
  misc_feature (125)..(125): n is a, c, g, or t
  misc_feature (133)..(133): n is a, c, g, or t
  misc_feature (135)..(135): n is a, c, g, or t
  misc_feature (137)..(137): n is a, c, g, or t
  misc_feature (272)..(272): n is a, c, g, or t
  misc_feature (304)..(305): n is a, c, g, or t
  misc_feature (307)..(308): n is a, c, g, or t
  misc_feature (315)..(315): n is a, c, g, or t
  misc_feature (330)..(330): n is a, c, g, or t
  misc_feature (335)..(335): n is a, c, g, or t
  misc_feature (337)..(338): n is a, c, g, or t
  misc_feature (369)..(369): n is a, c, g, or t
  misc_feature (382)..(382): n is a, c, g, or t
  misc_feature (393)..(394): n is a, c, g, or t
  misc_feature (429)..(429): n is a, c, g, or t
  misc_feature (439)..(439): n is a, c, g, or t
  misc_feature (494)..(494): n is a, c, g, or t
  misc_feature (501)..(501): n is a, c, g, or t
  misc_feature (521)..(521): n is a, c, g, or t
agtccccagtatcccatctgataagangcttcaattctataaacaaaaatatttcaagaaagtatgttacacaatagtacatataagtnatantttggnngagttttgggctctagttgttcatncccccaantntnaaattttaaaattcaaaaataacagttttatttaacatatgttacaccttaacatttaaaatatcatgctctagttaaatatttcatcaacaacactgtatacaaataaaatattacataaaatatatttaaganaatgttttggtctttgatctgaacaataaatnntnncacaggntcttctacatagtcnggggngnngttactactcaataataatcttgtataagcngcatgtgaaaatntggcaataatnnattctgggattttaaattggcaaaccatctatgcnaaagtctgtnacttcaaccttttcactcaagttcaaaatacatatgccttcctggtccatattgnaaattcnctaacacgatatggttgttngcggcaattcaatcttcagttggccatttagggatcacactg

SEQ ID NO: 558138 - DNA, 124 bp, Homo sapiens
cagtttacagcgttcagggcagtttacagcgttcagggcagtttcagcgtcagggcagtttacagcgtcagggcgtattgaattcaagtataatattaagtatgcatggacctctagagctaat

SEQ ID NO: 558139 - DNA, 542 bp, Homo sapiens
  misc_feature (3)..(3): n is a, c, g, or t
  misc_feature (51)..(51): n is a, c, g, or t
  misc_feature (146)..(146): n is a, c, g, or t
  misc_feature (184)..(184): n is a, c, g, or t
  misc_feature (276)..(277): n is a, c, g, or t
  misc_feature (436)..(436): n is a, c, g, or t
  misc_feature (491)..(491): n is a, c, g, or t
ttnactatatagttcatgtcaaagagccaataatattaatgggtgctcgtngttcagcggcaaatcgtaacgtaagtatgggcggacgctttatcgttcgtaatagttcgacgcgttatggtattgtctatggacaccaaccattncataaagcaggagcggatccaccataacacataagtgncggttgtataatttccttcttaggctttaacgtacgtcgtgatggcataatattgggttcgggccatatttcatgtgatatcgggagtcgtnnaattgttccacgatattgcgtgtgtccaggtcccattcatatgcgcgtctggacaaacgccgattatttcggtcgtgtcttatttccgtcgagttgtgtcgtcttggcagcagttatatgttttccaaattcgtctattggtgttgtgcgtttaaacgnctattacatatttcgaaagccagtaatgggtgttagtccgtagtagccacatctntacccgtggaacggcgacttggtcacgtcgtgcttcactgtgggcggaata

SEQ ID NO: 558140 - DNA, 331 bp, Homo sapiens
gagaaatgcaaatcaaaacaacaagataccatttcacaccagtcagaatggcattattaaaaagttaaaaaaaaacagatggttgcaaggttgtggagaaaagtggacacttattcactgttggtgggagtgtaaattagttcaaccattgtggaaagtagtgtggcgatttctcatagagataaaacagaaataccatttgatccagcatccattactgagtatgtacccaaggaatataaattgttctgtcataaaacacatgcccagtatgttcactgcagcatattacatagcaagcatggaccacctaatgccattatggtggact

SEQ ID NO: 558141 - DNA, 1019 bp, Homo sapiens
  misc_feature (706)..(706): n is a, c, g, or t
ggctcttctggaccgtcttcgcacgcaaacctcgagtacagaagtgcggagaactcgaaggatcgagtgcactcccactgacgatacttacactgcagccatggcgcacatggacctatgccatatctagacggaaacggtcgatgttgctgagaggggcgatctgcccctgtctatctcaccagactagaagagggatgtcacctgacaagagggagaggtaatccccgaagggtctcactaggtcggacccgccatgctagcattcgcaaaagccggaactttacacgtataagcgccccaaggtacatcatggctatcgacctagtcaggacgtcgcacgcctcgcatgcacagaccacatcgtgaggcacgcacctcaagtaactgttgccattcacgagcatcgatcaaggccactatgcgcacatcacgcgaagacatcaccatcgagaccttatcatctcccgtgaagcaccggacaagcgtggatacctccggttgcaagccatgtggtgggtagcctctcgagggacgtatcctgtcttctcatacccttcatggggtcgcactcaacggcgatactcacgctctttgtgagcttcgacatctttctagagaggacttcccttgtcggtccgagaagctctcgttgaagcacatcttttgaactccatcggtagcgctagcgtcgtactctattttntatacatagtagatagctacgtaagagagaccggataggtcataataaacaaacaaaaaacgatataatccatcccaattcggggtgtgtggcgtacaagatagtacaatttattgtggtgatgttcagtgagaacacaccccaaaggtagcgttcagaaggggaacgcacaggacggggacggggggggggcacggattggaggcgtttacgctccgcctgtatgttgagcccacaggacccgacatattggaattggggccttagaaaattcgcctggaagaaattcccgttccggaatggggggttccca

SEQ ID NO: 558142 - DNA, 458 bp, Homo sapiens
ccatatcttgcttatacataaatccttgaagataccaataattttggtgcattttgtaggaatcagattaacgagatacattctagtggttagagtctttgatctcttccttgtcagttagattttatgcttattgacaaaccctctaaaccatgttgcacagcagtgtcttcagacttcccattatatttctgaaggttgcagtagcgctgatgggattgttgcttttcagcatcagggacttccttattgaatggtgtctgataacattccgtctccaggaactcagcgagatcggagtatgcattcagaggattcagtcccttctcaagagctttattcgaatagtccatagcatattgctttagtgcttcaatcatctctttatttccactagcttcagattctcctgtattctgcatttgtcttacttttgccttgtagcagcaccaccagga

SEQ ID NO: 558143 - DNA, 243 bp, Homo sapiens
aagtatctgagaagttgtttggcttagctcatactcgccgcagctgtggggaaagagggcagcaataagcattcctcggtcatcttcagatctccgctgccgcacccccaagtaactattaatagctcagcctgcaacatgcaccccagagcaagacagaagtcaatgaaacttggctgagaacacaacctgacttccccactatacctcgactatagattcacaccccaactacccagtatg

SEQ ID NO: 558144 - DNA, 1029 bp, Homo sapiens
gagggatcctgtggctgtaacggaggaggctccacacggacggtgcggctaccgcagacacgatctgggcatgcaggcacggacatgagccctccgaggctctgctgggtgtggctgatggcttgcggggaacctcagaggcgtgaacgagtggtgacatgcgggtggccaaacttggtgggactgccacctaaccagggcacgggctgagaggaatctctctgagcagagcggccgcaggtggggcactgctgtgctggaacaagctgatggggagcctgacctgagtgccagcgtccgtgtgccgggcccctggtgcttcgcagtaacgtcgctaagccagcgtcgtcgtgggtgctagagcatgcgcttcgggacacatggatcaggtcccactcatgctggacgaaggtccagtgacaccggggaaccgaggccatctgctggccgacatgctgaggtccctggcgtattgggcgtgacaagagcaactgcaggccatgatgagacgacgcctgcgtgtggctctgcaccaactgaaagccagggagcagcctcacaccattggcaccgtctccagggagcctctctggagggccttgggcagatcttctgacagcaggaaggggcttgcgacctgttccttgcgagctgtgaatgtgcaagggctgaggacgccgctggagcgtctgtggacacgatcggtcatgcatgatgtgccaacctggtagggccaggggcgtggtggagggagcggcggcagggattgtgaccatgcagtgtggctgcggagtgtgtgcgcttgggtcgaagggtcctctcaggtacgttcgtgtccggatggttgggcatcaacctgttcgtcagtcaagtgcttccaaagtggctctgctatggggcaggcgtgcggctctggcaacctttgcatctctccccggcctgttcagagccctggcgttctttcgggccgggacccgtgggaactgcagttcggcggatggttgggagtggcagtccctcatttgcggc

SEQ ID NO: 558145 - DNA, 845 bp, Homo sapiens
  misc_feature (3)..(3): n is a, c, g, or t
agnacaggagaatgtgataggagcgcagcgccccccccgtagtgtgctttgcggctcccggtgtctcaccaaggttaccaattgtttgggatgatatcaagttctagacttggcacctgggccgattcccgtgcaccgcctcgtcagggtcccggtccccccgcgatgcccccgtcccacgatggggttcaccagcgtcacgaacaacggactcttcgcttacaccagactgtcggcatcttggtcgaacacctcgacaggccccaactttgtgagcctggggcaagcccaccggggaaaggtccgcgccacaccccaccctgttggggagctttttcaagcaacttccacacccttgggagcacccctgcctttgtctgttgataagtacacccaccgtgtcgccccggggggtcttacacacgcaccggacgacccacaaggctgccgaggtcctggcacgagtggcaccccaacgtttccccccacaggtacgagaagtgcgcctcaacagacttctatgcccctttttccccccaccccaccttctcaaacacaacggtgtgaaaaagaccgcttaccaagaccctctcattctcacaattccccaacaacaattattcacttcgaacaaccgttacagtaccaacaagccattcttaaccttcaccaacgctaaagagaaaatttcagggacccctcatgtgttctatttgtgtggtaggaccgaccagtacagtataacatctattctagacaaacccacacttttttattaggcaaaaaccatacggccccaacatccccgaacttggcaccccccaaaaattaaaaacaaacaaaca

SEQ ID NO: 558146 - DNA, 1916 bp, Homo sapiens
gggtagtagaacaatgggattatgctgtcacaaaaaacaaagaaaaaacataatttcttaaatcatggtctgtcactgaatctggttataaaaccttatcttgcactagaaggatctgtagcttttccagctgagaatggggttcaggataccgaatcaacactagaaaagagagaaactggggatgaagaaaactcagctaaatttcctgtaggaaggagagattttgacacactcagatgtatgctgggaagagtctaccaacgttgctggcaagtctgattctttttttgatatggacctgttggtccatatcatcttttcagaagaaaagcatttaattgccaatgggaggagaagcccataatgttactgtaacttgggtattatgttaactgtctgttttaaaagaaagtagcgttaagatagatcagtaaccaaaatcataggctttttctgtgcattgaattttgtgaaaatgctgtataattttgacttactagtatttttgaacaatgcttaacatactaaccttacatacactctagaccaaaataaggcatcataatttacaccttaatctcaaaaattaagcatgtctttggtgaatggttttatatatacataaacctaaaacatataagacaaaaatttatgtttggagcctgtgttctgtaaagagaaggttgatttgtcttttagctatcgtatttggagtggaactataatacaaatgtataatattctttttttttttttttttgagatggagtctcactctgttgcccaggctggagtgcaatggcacgatctcggctcactgaaacctctgcctcccgggttcaagcaattccctgcctcagcctcatgaatagctgggattacaggtgcccaccaccatgcctggctggtttttgtatttttagtagaggcaaggtttcaccatcttggtcaagttggtctggaactcctgaccctgtgatccacctgccttggcttcccaaagtgctgggattacaggcgtgcaccactgagtccagcctatattcttgtttatcagttcaaaaatgctctgcactgtttttgactctttaaaaataacttagattcaaatttatagtagaagaaaaaaaatctttcagataagaggtgttctccagaatggaagaacgacttggcatgtaagaaatagcgtcagtgtcctaatgcatattgtgactgtttgcatatacttctgtttgtaaaaatatcggttttattttcagaggatttgtaagaaacatttaaattttcattgaaataaatgacaagtcatactgtcacttaaaaaaaaaaaaaagacctttgtcaaggagagtgcagtcaaccagtaaactgcagattctcagaatgtttattgacgtactgattattcattctgttatactctaacatctgtatatttttaccagtattctcagaccacttctaccaaaacataaatctgtgattgtgatctctgaaagtcagtccttttatctactcaataactgatctgataatgtcaacttttgaaaacagatagttatgactcaaggctttgagaatgtaaagagaccaccttcacttgttgagaaatggtacgatttcacgttatcagtgcagttccgttctcgggggaaagcccatccgtactaccaggagactggatccgcaaagtagacacttggtctcatgaagccactgctgggctccagagagaagggaaaactaagaggttttaaaacccctaccctccttggtttacctccatcattaaaaaacaacaatgacaacgacaacaaaaaacaaaactaaaacgacttattatttattaattatgttgtggcagacaatatgctgaacattagacataattaaatctttttaaaaattga

SEQ ID NO: 558147 - DNA, 1515 bp, Homo sapiens
  misc_feature (833)..(833): n is a, c, g, or t
  misc_feature (837)..(837): n is a, c, g, or t
  misc_feature (991)..(991): n is a, c, g, or t
  misc_feature (1188)..(1188): n is a, c, g, or t
gtccacctctgtgtccgcccttatttttaagggcgacgcaccgttatgtaggaaaccacagagtgtggtgctacccgcagaaaaagaagcccgcgagcgctgtggtgtaacccgcggtgtgcccgggggaaaatttcccgccgggggggtagttttctgcgtctgggtgacacccccctacaggcgctgttctcccggcccccggaccacacacaccagatgggggggtttttttccgggcggagcaaccctgttgtggaataagagccccccttcggcccccgggcctcctccacacagaggtggtcctccaagacaaggaagtgtaaacccctggagcgggggcatccacaagaaaggccttcaacaaattctcgcgaaggggggggttaattggtggccccaattgacacacaacaagaccacgaattgtgtgggcgccaacagttaatatttgtggaagagacgccgcgcatggtgacacacggcccccccacacccgcgcccgtcgtgcgcagaagaaccttttggtgttaccacataggcccgcgttacacggcttgtggggatgaaataaaagattgcgacacaccgtccaacaaagttgttctttttctcgcgaggaaataaagggagataaaaagggccccaacggcccctctggccaccacaggggagagggtgagaaagaagataaagcccctttttgggcgcacaaaatataatagtgggggtctccctgtcccccgagattgtgtggggagagagacgccacgccctacaccacagcgagataaggtggggaggagtcctactccacgaagattagtgtntaanagagatgtgtatagagatagtgacacactgtgggaccttctctctttgtgagatatctgtgatagtagatagagagagagagaggatatagatgtgagagagagagactcacacaagagagaggtctctaaagagggaaatgagaaacacgctntctgtgcgacgcacacattattgtgagaacttctacacagagagaaatcgcccactacaatataaccctcggcacacctttgtgttgtccacaacaggtctttctctcactctctcttactactctttagagagtgtgtgagaacaccctctgtggagagtgagatgagagagacacagaataatatggcgcgaganaattatagagaggagagtggcgtcacagagagcacatttcaagccacgagccgcggcttatatttctcgggggcttcaattctataaactatgtttccacgctgggagatatccggagaattaaagagaaacttcacaaataccacgtgtgtatgttgagaagatgagtaaaagttggagacacgaataatgctggagggaggcacgagtcacctgcttttgagggagctaatgtgcacgtccactggagatgtggctgctttcacacaccaagaatttaaaatccatcctggatcatggcatttaaataaaagattgaaagattta

SEQ ID NO: 558148 - DNA, 1841 bp, Homo sapiens
gggtagtagaacaatgggattatgctgtcacaaaaaacaaagaaaaaacataatttcttaaatcatggtctgtcactgaatctggttataaaaccttatcttgcactagaaggatctgtagcttttccagctgagaatggggttcaggataccgaatcaacactagaaaagagagaaactggggatgaagaaaactcagctaaatttcctgtaggaaggagagattttgacacactcagatgtatgctgggaagagtctaccaacgttgctggcaagtctgattctttttttgatatggacctgttggtccatatcatcttttcagaagaaaagcatttaattgccaatgggaggagaagcccataatgttactgtaacttgggtattatgttaactgtctgttttaaaagaaagtagcgttaagatagatcagtaaccaaaatcataggctttttctgtgcattgaattttgtgaaaatgctgtataattttgacttactagtatttttgaacaatgcttaacatactaaccttacatacactctagaccaaaataaggcatcataatttacaccttaatctcaaaaattaagcatgtctttggtgaatggttttatatatacataaacctaaaacatataagacaaaaatttatgtttggagcctgtgttctgtaaagagaaggttgatttgtcttttagctatcgtatttggagtggaactataatacaaatgtataatattctttttttttttttttttgagatggagtctcactctgttgcccaggctggagtgcaatggcacgatctcggctcactgaaacctctgcctcccgggttcaagcaattccctgcctcagcctcatgaatagctgggattacaggtgcccaccaccatgcctggctggtttttgtatttttagtagaggcaaggtttcaccatcttggtcaagttggtctggaactcctgaccctgtgatccacctgccttggcttcccaaagtgctgggattacaggcgtgcaccactgagtccagcctatattcttgtttatcagttcaaaaatgctctgcactgtttttgactctttaaaaataacttagattcaaatttatagtagaagaaaaaaaatctttcagataagaggtgttctccagaatggaagaacgacttggcatgtaagaaatagcgtcagtgtcctaatgcatattgtgactgtttgcatatacttctgtttgtaaaaatatcggttttattttcagaggatttgtaagaaacatttaaattttcattgaaataaatgacaagtcatactgtcacttaaaaaaaaaaaaaagacctttgtcaaggagagtgcagtcaaccagtaaactgcagattctcagaatgtttattgacgtactgattattcattctgttatactctaacatctgtatatttttaccagtattctcagaccacttctaccaaaacataaatctgtgattgtgatctctgaaagtcagtccttttatctactcaataactgatctgataatgtcaacttttgaaaacagatagttatgactcaaggctttgagaatgtaaagagaccaccttcacttgttgagaaatggtacgatttcacgttatcagtgcagttccgttctcgggggaaagaagtgtgaaactgtcaggaagacagatgaaatgatttgcctgaggccgtatcatcaaacaagaaattcatattcacctttctggaattcttaggataatgattacatgtgttcaattgttaaaaattggcagataaaattttatgtatttaccacgtacaacatgaaattttgaaaca

SEQ ID NO: 558149 - DNA, 697 bp, Homo sapiens
gggtagtagaacaatgggattatgctgtcacaaaaaacaaagaaaaaacataatttcttaaatcatggtctgtcactgaatctggttataaaaccttatcttgcactagaaggatctgtagcttttccagctgagaatggggttcaggataccgaatcaacactagaaaagagagaaactggggatgaagaaaactcagctaaatttcctgtaggaaggagagattttgacatattctcagaccacttctaccaaaacataaatctgtgattgtgatctctgaaagtcagtccttttatctactcaataactgatctgataatgtcaacttttgaaaacagatagttatgactcaaggctttgagaatgtaaagagaccaccttcacttgttgagaaatggtacgatttcacgttatcagtgcagttccgttctcgggggaaagcccatccgtactaccaggagactggatccgcaaagtagacacttggtctcatgaagccactgctgggctccagagagaagggaaaactaagaggttttaaaacccctaccctccttggtttacctccatcattaaaaaacaacaatgacaacgacaacaaaaaacaaaactaaaacgacttattatttattaattatgttgtggcagacaatatgctgaacattagacataattaaatctttttaaaaattga

SEQ ID NO: 558150 - DNA, 141 bp, Homo sapiens
accttctgcttctgcagggaagtgctgatttattagagagatccaggatgagatacacatggttttgggggttttttgagactggttcctgaaaaattccaccaaatctggctcctttttctgaggaatgactttgggaag

SEQ ID NO: 558151 - DNA, 318 bp, Homo sapiens
ctgtgcctagcttacctagggtcagtttgcagctggtaagccatttaccaagatagtgtaggtaaagaagggcagatttattagagaaattgtgaaaatatgttgcagtgggcagctcagcagagaaggggctacctgcaaagaggcaagggctggaggaaagttttatagggtcctgctgaagggtgctacgtgtggaatgaggtcattgtgcccgcaggtggtttgtgattagctgtttctaacaattgttcatacaataattgttcattattgttctcaacttggggctctccccaacctggggacccttcctta

SEQ ID NO: 558152 - DNA, 835 bp, Homo sapiens
caatggtgtctcatgcctgtaatcccagcacttgggagcctgaggcgggcagatcactttaggtcaggagtttaagaccagcctgaccaagatggtgaaaccccacctctaacaaaaaatacaaaaattagcaaggcatggtggtgtatgcctgtagtcccagctacttgggaattgcttgaacctgggaggcggaggttgcagtgagccaccactgcactccagcctggtgacagaacgagactctgtctcaaaaaaaaaaaattccacagtggctttggaggggtaaatattttttggtttctaaatgaaagccgaaatacaaagatcagaacttttataaaggcggggcatgggggctcacgattataattccagcactgggggggccaggcaggcacatagtttgagaccagcctggcaaactggaaaaacctagtctctacaagaaaaaacaaaaaattttcgccgggatggtgacttgtgcctggtggtaccagctacccggagggcggggaggacggaatattgtagcccagggggttggggtgtgctgtgaacgcaggggatcacttacacgcgcggcccaaccgtgggtggacgacgcaccttcgtgttcttagagaaaaaatgacagaacactcgtcgacacacctagacaacaaaaaaagtgttggggcgccccgccaggagaatattataacacctatggggggcgcgcgcgcgtgagaatgagatgatggagcaaggtgcccaagaaacacgggcaatcggggggtgctcacaaaaaaagccggcgggcgcgggtgtgacaaacaacagtggcgggcactcg

SEQ ID NO: 558153 - DNA, 452 bp, Homo sapiens
ttaatgtcaaaacagagatcagaaggctgacagaactgaccgtggcaataagagccccagttacaaacaggacccaagaccatgtcagacgagggttaagtcaagtcatgcaccctgttagtcacccctgccccatgtttcgggtgcagatgtcctcatcgctgactctaggttttagataaagctttgctcctttaaccagccgcaaactgaagactctctgaatccacctataaccgataaggcttgcttccagatatcccgcgtgttcgagctgagccaatatatatctcgtccacctgtaacgcctgtcccctaaagtgcatgaagccagactgtaatccaggcacctcaggaacactcactctaggcttcttgggtttgttttttctccaagctgtggtcaccgtattaggggtcccaataaacctctttaaaatgttaaaaaaaaa

SEQ ID NO: 558154 - DNA, 510 bp, Homo sapiens
  misc_feature (364)..(364): n is a, c, g, or t
  misc_feature (369)..(369): n is a, c, g, or t
  misc_feature (373)..(373): n is a, c, g, or t
  misc_feature (389)..(389): n is a, c, g, or t
aatggcttctctggctgactgcaaggctgtctccttaaggcactgagtgggccggggaggctgggagccggcggcaggattagctggtgctgaactttctctcataggacgtcgcttggatttcaaatccacggtcacctgctgccctttgcctcccccgacgccccagcctgtgccccggagaggcaggatcgcagtggtcagaatccacgtgctttcctattctcaggctgttctgactctgagccaacagctggaccgtgtctcatccccagaacatgccgtctgtccccaccggggagtgggccttgatggccgggcctcgaaggccacaaacaaggcgtcgaggaattggaaagatttncacancctncagaaaggagagacgnaatctccggtccctcccatgccccacttcggtggaacagcttcctctcactgaacggagagcccccttggacgaacgtgctgatcgttggttctgaggctggtttgtcttatgtatatatg

SEQ ID NO: 558155 - DNA, 289 bp, Homo sapiens
  misc_feature (182)..(182): n is a, c, g, or t
  misc_feature (221)..(221): n is a, c, g, or t
catgcccggcagggtcgacgtctagagggatctcccggcgcaggcgtgcctgatgatgcgtctgcagttgttattaaagaaatcacgcctaaccatgacaactctcatttccgttagtaagcccaagttaggattaacggcctataaacagtgttgggaacaatgtttaacattttgtgccnatttgtcctgtattcatgtatgtaagttacagatctacncttcatttttaagttccttgtacatcatggtcattttctagttttttaccagactcccatgctcacaa

SEQ ID NO: 558156 - DNA, 581 bp, Homo sapiens
  misc_feature (27)..(27): n is a, c, g, or t
  misc_feature (36)..(36): n is a, c, g, or t
  misc_feature (46)..(46): n is a, c, g, or t
  misc_feature (72)..(72): n is a, c, g, or t
  misc_feature (76)..(76): n is a, c, g, or t
  misc_feature (97)..(97): n is a, c, g, or t
  misc_feature (99)..(99): n is a, c, g, or t
  misc_feature (105)..(105): n is a, c, g, or t
  misc_feature (107)..(107): n is a, c, g, or t
  misc_feature (113)..(114): n is a, c, g, or t
  misc_feature (129)..(129): n is a, c, g, or t
  misc_feature (206)..(206): n is a, c, g, or t
  misc_feature (218)..(219): n is a, c, g, or t
  misc_feature (229)..(229): n is a, c, g, or t
  misc_feature (231)..(231): n is a, c, g, or t
  misc_feature (235)..(235): n is a, c, g, or t
  misc_feature (240)..(240): n is a, c, g, or t
  misc_feature (293)..(294): n is a, c, g, or t
  misc_feature (296)..(296): n is a, c, g, or t
  misc_feature (301)..(301): n is a, c, g, or t
  misc_feature (313)..(313): n is a, c, g, or t
  misc_feature (315)..(315): n is a, c, g, or t
  misc_feature (338)..(338): n is a, c, g, or t
  misc_feature (340)..(340): n is a, c, g, or t
  misc_feature (345)..(345): n is a, c, g, or t
  misc_feature (357)..(357): n is a, c, g, or t
  misc_feature (382)..(383): n is a, c, g, or t
  misc_feature (385)..(385): n is a, c, g, or t
  misc_feature (390)..(390): n is a, c, g, or t
  misc_feature (394)..(394): n is a, c, g, or t
  misc_feature (408)..(408): n is a, c, g, or t
  misc_feature (418)..(418): n is a, c, g, or t
  misc_feature (448)..(448): n is a, c, g, or t
caagctgcagcctcggctgctcagggntcccttttnacttattgtngccactgccccttggatgctgtgttngtcncagtggaaggaggggaagatntnggaaancntgtaannaccaataaggatgantctctgccctgttggggccttaaatttgggggcttttgggcaacctctccgtgtactgcgtctgtccacactcgatngggccccaggtnngtatgaggcncncttnataangtgctcaggccagtttcaatgtctgtcatgtaacgtaggcttttgatgtgttnngntggangtgaatggaccngngactgtgttttaatcttacttcntnggcanttgtgcatcacngccttctgttcccgggggaacatgnntnttttntccncacttctttctaantgggaaggcntgagggctcccttgtccccatcatgcaggnatgttgggctctgcccaaccccacacttactctgaaaaccaagtgtcaccagccccttccccttgtttttattttactgttataataattattaacttccttgtaatataaataaaatttgtacttcgagttc

SEQ ID NO: 558157 - DNA, 925 bp, Homo sapiens
  misc_feature (258)..(258): n is a, c, g, or t
  misc_feature (263)..(263): n is a, c, g, or t
  misc_feature (280)..(280): n is a, c, g, or t
  misc_feature (294)..(294): n is a, c, g, or t
  misc_feature (296)..(296): n is a, c, g, or t
  misc_feature (299)..(299): n is a, c, g, or t
  misc_feature (315)..(315): n is a, c, g, or t
  misc_feature (721)..(721): n is a, c, g, or t
  misc_feature (925)..(925): n is a, c, g, or t
gggtctcttggacaactttacaatttactggcttccaagacttcctgcttcaaaacccccagccagactattcatggcccattcagatcttcatgttcatcccacaagtgcaagaacagttaacctttcttaattgatttttgtaattggaggtttatattgtcttgcctaatgcatattctcttttttttttttttttgggaaacggagtctggtctgtggccaggtgggagtgggggggtgcaatctcagctcacntggantctccacctccggggtncaagaggttctccngnctnagcctcctgagtagcngggggagctacaagcttgcaccaccacacccagctaatttttttttttttcgagagagagagggaggtttcggctttgggtccgccacagggtttagatgtggcaggggcgcgcgagatcccgggtctcatgtggaaaggctctggtccccggggcgtccagggccattctcgcgggtttagaaccctccgcgagagttagtccccgagggagtatggggggacatcagcgggggcccaccaccaaacccagttaatttggggatcgcaagacaacaaaggggggttccacccggtttacccgggggaggggtgagaccctcgagaaccctgggaacccggccggcgtggggcccccccaaaggggcgcggggcactaaataggcggggagacgcccacgggccgngggggacacaatttgtggtctttctcacgcccacaacgcgtgggcggttaccccccgtgggtgtgcgcccacggaggtgtgcaccaactctgagccctttgggtgttttgtcccaccctttgcgcctccccaaagctgctctgacgactattgggggggttaacccccaactctttagcataagaggatattgtaatcttccan

SEQ ID NO: 558158 - DNA, 470 bp, Homo sapiens
tactgtgtgtacatacttatagcatgacaccagacctatatgtaatgtattgaaaagtacagctgtcaaggaacgaacaagtgacgtgttgaaattaaattgaggacatagctggactgtctgctttggtcatagctaaaataatattttagaccgctgctgattcagagggtggttatcatacagattgttgcttgttttccaatcactactcaatatcatcatgcacctgcacggtgcctttggaattcgagttccagtaccaaatgcattgtaaacaccaacttcaaaccgaatttcataatcctgaggtggtgtcacccctccacacatgacaggactatgtggccggccaaggaagtcacgctctctgatgagttcctgaactctgggtttatgaccagcagcgagggtgtttacacacacaggatgcacatccgcattcacagtctgctgagccactgcacgag

SEQ ID NO: 558159 - DNA, 226 bp, Homo sapiens
tgccattggaaattctcaatgaatttccctgtgtggcttggccttggaacctctcctaaaattctcagattgttggcttgaagctcaaaaaaatccaaagataagacctattcttcatgacaccaaagtgaaaaaaaaatttacggactttgcaattcaccctgtggttttccttaccccagcttgttgccgaggcttaccttcaaaccccgttggaaaagttggt

SEQ ID NO: 558160 - DNA, 647 bp, Homo sapiens
ccggatcgtttttgtgggtcaaacactccgccacgggccgtcctgggggcccccacgtcttcttcgggtattcaggcttaccaattatccacggcatcagatcccccctcccgggggagaaaacccttggttacccgctgggggcccctctgggggcggttgatgaattccccctcccgctcgcttcgagtgtcgccgcacgctgcttctattgcagcccgctctttcttgaccccccgggtgtgcatgggacacttggtgtcctttccccacacagcttgctttgtttggtaagcgcacacagcgccgccagtggtgcgatgcacgtccttgctcataggatgggtgtataatgcgcccgaaccaaccacgctacgttgttttctgtcggccccctatgtgtataaaggcacgacatgcctacagaagacccacgggcctttgttgtccaacgcaccctcgctgggaagagagggtactcctctcgaaaagattgcaacacactggtggggcagttggttggattatgacacgctctacaccgagcgggcaacacagtaatctccaccctttccccccccgtgattaaaggtgatagccccgggcaccccaaaacaaaaaaacctttttgtctcgccaacaaaaca

SEQ ID NO: 558161 - DNA, 109 bp, Homo sapiens
tacaagatccgggtcccagccctcagttccagtctcccccagccaagcagacatcacattctcgaagcagacaccccgtgaagcccctacaagttctccagacaaccag

SEQ ID NO: 558162 - DNA, 193 bp, Homo sapiens
catagctttatgtctagaaaaccctacgtacataccttattttaaaatcctgctacacaatgttgtgatcattagaggactcagcaagttggaacctattctgttgtgtagggccttgccttgatgttgatgggctgctgactgatcagggcggttgtcgttcaaggttgctattgaaacttctaaaactagg

SEQ ID NO: 558163 - DNA, 160 bp, Homo sapiens
attactatttgcaggaggtgggggtgtatgcaccgcacaccgtggctatgagaagcaagaaggaaggagggagggaacaggatagagggaaaaagaggaacaggaattgaactatataaccttatatatacctattttcccaattttgaaaaatttcaag

SEQ ID NO: 558164 - DNA, 327 bp, Homo sapiens
gggagacgaatgtacccgcaatttcgcgaattgggtgccgcctacgccatggaccccaagagtgacgcgggcatctattggacgggcttattcggcacgcaataaggttgagcgccggcccaacccggccaataatgacggcgtgcaaatagacaatgaaatcaaagtgctatcagggagataattgcgctgaactgaatgcggtcattccggtctgttgctagtcggcctgactcttcaaagctaaacaatacgtagcaagcaaggtgtgaaccccataatgaattggctgcaaggcagcagcgaaatggcagagcgggttcgtca

SEQ ID NO: 558165 - DNA, 169 bp, Homo sapiens
ttatgctggaaagaaacatgctcacatcagtcccaaaggacagcacctctgccacccagtccagtgggctgaggagaggctgaggaacctctttcctctgtatgcactcactcgacaaacactccgcggtactttgccgatgctgggccccgtgctagagtgctgagga

SEQ ID NO: 558166 - DNA, 1259 bp, Homo sapiens
gttccacatgtttcttcctgctgccaccgtggagtcttgaaattcctggagctgtgaaggactatgtagcagctgcagggtttaccaaacgtgggagggcagcccagtactgtccctctgccttccccactttgcagaatatggcagcccgtttcattcctggctagggcgtacggggcagaccacttgcaagtagaacgccctcaacacgccagacttcttccctcttactgtgtgtactccaggaacgaacaagcgaagactcatgctttgataactctagactcggtctttcccctagggcaacgcagggccggatcctagcacgccaacagtccactaggtgaaccactagggaccaggcaccatgggcatagcagagcccaaacatcccttgcaccagccgtcctcccatggcttacgcacacaccccattgctcgcccgacttcacacccccacccttcgcacaccttactcacgcccttcctcccccagccggctccactcgcctcgccctcaactgcgctcccaccgctcccacacatcgctgtcgcgcccctaccttgcgcccacgcgcgcccccgcgtccccatcttacaaacgcataaacctcctctcctggcgcatttctccacttcacacacaacacaaataataggcacacacacattcgcccacagctcgacctttcccgccaacacgcacgcgctcttgagcaccttcgcgacataattccacaccccggtcacaacacacacacttacacgccctagcaccacaaacgggccggaacaccactccatcgcacgccacacacctcgcctcgcacccagcacccaattggtcacacacagcgttggccaaccacatctcactgagcgcaccacccaacacctcttgaggcccccacacccaaagctgcacactctcgcaccccagccccgcacctcctcccacagtctcaacgctacacaaccgtggctccctacaccccttgtgccaccacacccggcagcataccaccccaccagccgcactcacacccattcggctagcacacgcaaaacgcctaagacacacacgaccaaacaccccccagcccgacacaccaacgcacacaggacccccgcgcaaccccaccaaccccccccacctcaccacgacacccaccatgcacacaccgccgcccaccacacccacaccacaacacgcacacaaaacaccgcccatacaccaccacacccccctcccgaccagc

SEQ ID NO: 558167 - DNA, 186 bp, Homo sapiens
tcgaatcgagctggtaccggacgtacactgcagatgtcgctgctgccgcaggacgcgcagacccgcgaaggctcgtggaacgccgtgctgcgcatctccgagctgcaacggctgtaccacgccaagcacgacgtggtgtcgccgcaggacgtgctgcagtacatggtgcgcgacgccgagaacccg

SEQ ID NO: 558168 - DNA, 303 bp, Homo sapiens
  misc_feature (203)..(203): n is a, c, g, or t
  misc_feature (285)..(285): n is a, c, g, or t
tgtcagagatcccgtgatacacgcattatagcagctccgtgagcctgccagcagttcccgccttgacctaccaaagtgctgggattacaggcttgagccatcatggccagcctagatatttttttggtcagagaaaaagtgagaagaggaaataaccaaagagaatgcactagcctgactagttcaagtacagggttcatgtngactcaggcatgtatctattaaatccttgcaatgtattagtctgatagaggttgggtgtagtcacattaaaaacatttggcntataatggctgtgtatcg

SEQ ID NO: 558169 - DNA, 916 bp, Homo sapiens
  misc_feature (558)..(562): n is a, c, g, or t
  misc_feature (564)..(564): n is a, c, g, or t
  misc_feature (567)..(569): n is a, c, g, or t
  misc_feature (576)..(576): n is a, c, g, or t
  misc_feature (578)..(580): n is a, c, g, or t
  misc_feature (585)..(585): n is a, c, g, or t
  misc_feature (587)..(587): n is a, c, g, or t
  misc_feature (673)..(673): n is a, c, g, or t
  misc_feature (695)..(695): n is a, c, g, or t
  misc_feature (699)..(699): n is a, c, g, or t
  misc_feature (705)..(705): n is a, c, g, or t
gcacttcgcctgccgcggtcgggtccggggtctgcgctgtagcggtcgccggcgtgccctggaagtagcaacttccctaacccagcccagatacctggtccccgtgccaggcacggcgtgagcgtgaagatgagcagtcatcataggaggtgtcctggaattctcctggattctgtgggctccgtggcaattgaagttcttctgtgaaggtggattgaaggatctacagtccaggacaaattttaatacttgacgtgggagctcaagtagagtcaggtccactctagctactacgtacaaaggcctcttagtatccatggatactcgtgtgaccgtgcgatgccttgtactgacagtaacctggcaatgtacaaagcgcgcctatactcatgagctgaaccttggagttgcacgcgagtgcgagcctgaatgatgcctttgatgagacttggatccacggcccagctacatcctataccaaccgtggcatcgcccaagatgttgcgaaaacgtaccagcaatggagactttggttcactgtcctcgtgtgtactgtgnnnnncngcnnntgcttcncnnnggccntntcagacatcccaggtgaagccatggtgaagctctactgccccaagtgcatggatgtgtacacacccaagtcatcaagacaccatcncacggatgcgcctacttcggcnctgntttccntcacatgctcttcatggtgcatcccgagtaccggcccaagagacctgcaaccagtttgtgcccaggctctacggtttcaagatccatccgatggcctaccaggctgcaaggtccaagccgccagcaacttcaagagcccagttcaagaagattcgctgattccctcccccaactgtcctgcagtcttggcttttccttactttgtggcacc

SEQ ID NO: 558170 - DNA, 371 bp, Homo sapiens
  misc_feature (14)..(14): n is a, c, g, or t
  misc_feature (38)..(38): n is a, c, g, or t
  misc_feature (168)..(168): n is a, c, g, or t
  misc_feature (294)..(294): n is a, c, g, or t
  misc_feature (331)..(331): n is a, c, g, or t
  misc_feature (338)..(338): n is a, c, g, or t
ggaccaattccccnaaaatgggaaatgtgtgttaatgnccccatcctgaacagatggaaatttggagataaaaccctcctagggttaaactccctgcctcccctgatgtggcagatgccaggacttcacccggcagaaaagtgttttacaatctccttaacctgcctncccggataagccgtatctttttctgaggcctgcagcattaagatgggttaaggaatggaacgtttgtgcatcggcaaaagctgcagaaaccagtgcatccgccctttgattaagttaaaaggcccngggaggttagtatgtgctctcatatgagtaatatagnaaggggnatgtctttgttgtactgcttgttgtaaagaatg

SEQ ID NO: 558171 - DNA, 896 bp, Homo sapiens
  misc_feature (105)..(106): n is a, c, g, or t
  misc_feature (478)..(478): n is a, c, g, or t
tactcactcctcctgaaatatattacccgcgtattctctcttacccctcgatgaatccactctgcttgttacacacacacacttctcgccattgacgtatgcatnnatcaacagtgtgcctctgtccccaattaagtcacccaattttcctcgtaacatcaagtgtccgcgccatcatatcgccgactacaaccagaattggcggtccagtttttaaatgctcacccatacaacagctcttgtctcgaaccactaatagcgaaggcgcgtaaattttcacacaaaactgtctattctctgtatatccaacaagtgtactttcttcttatctacaaaggggaaaaacaaagaactgtctgtcagattgcttattatggcgttctccaacaatacctccccaggggtttattgtagtcttgccaccacgtcgagagatacttcaacatagattttgcacacaccgtgaatgattgcgtgncccacgacgtcgggcacaatttattagctggacacagtaaaagggcagacgctataaaaaatactggtgccacagaggcagccccccgtacgggtctggtcaccaccattaacactcccatgccccgcactacacgctattaacactgcgtcaaaagcgactctatatcccccaaacatctcccatcaccccactttatgtgcgcactttgtgtcttaaacccaaccagatgagcctatccaacatgtaagacccctaatgtggcgccgaccccactacacgccctctcgacaattcatagaggcctttgattctctcttcagatgattgcatagtacagccccgcctcccctgttcattcctaccgccccctcgattatttttcgcaatcgcgccaggattcccccccacaaaacaa

SEQ ID NO: 558172 - DNA, 416 bp, Homo sapiens
  misc_feature (30)..(30): n is a, c, g, or t
  misc_feature (240)..(240): n is a, c, g, or t
  misc_feature (269)..(269): n is a, c, g, or t
  misc_feature (380)..(380): n is a, c, g, or t
  misc_feature (405)..(405): n is a, c, g, or t
  misc_feature (415)..(415): n is a, c, g, or t
aaactcaccgggctcctgggccatatcccntggacccctgtcattgaagcctggcccagctgttctgggtctgaggcccagatatcaccagtgtccagatatcacacagatcattggttttctgctctttttccctcctcagggaggaagaggcctggcattcaggacagtgaagtcaccgaagaaaggtggcagcaggggagactgggggtggactctccagcccgtgcccgctggaanccctctcctttcccttcttaagcacctgncggatggaagcgtctatgcagctaggacttgttataatggagggttttctccccgccgtggactctcttggaggctatggacttgtcttgctttgcccaatcattcttgtncccaacacgttgtctgcatgaagtnaaagatttgng

SEQ ID NO: 558173 - DNA, 421 bp, Homo sapiens
gaatctcataattccccacaagggatggattcaaaatttttatttcaaatttagaagaggatttgggggtatgtgggttataaaaagggaataatttacgtagcactttctgtagcacttttctcttatacatctattaacatttctttcttcctcttaagaatatggtgaggtaggaagctcaagagattattactcccagtttatacatgtggaactaaagctaaaaagaataaataactcacccaaaatcacaagcaaattaggaatgcaaactagaaatgagaaccaagtctcctgatcccctaatgttctggccagcagagctcggctcaaccagcccaatcattcctgtcatcttcatgccaacagctgatcacaaagtgactgacggttaggccccggtagtggtcatctcgtc

SEQ ID NO: 558174 - DNA, 133 bp, Homo sapiens
atgcatactactgaacttaatcatatgaccaaatattcacttatggtaatcttactctactgatttccccccagactgtgatattagaacgtaatgtagagactgaaaagcaaataaataattgcattagcat

SEQ ID NO: 558175 - DNA, 522 bp, Homo sapiens
ccacgcgtcgcggacgcgtgggtcgacccacgcgtcgaaaaaaaaaaaaaaaaaaaaaaaaaaaaaaaaaaaaaaaaaaaaaaaaaaaagagggggggggaaaaaaccccggggggccaaaggcaaccttttttgaaaaggggggccccaaggggggactgatttaattagacgagaagagcaggggggcgcgtattaaaaaacggatgggtgcggggggaaaaaagagatgaagcgtgggaatatcttttgatgaaagaagagaacaaccatcaatattagggtggggggtgggggcaaaaattaggttggggaaaaataactatcctaaaagagaagtatttgtagggcagctactaggaggagaaaaaaataaacaatttaacgaggagttattagggtggtgtgaaaacaagcagctaataatatggagggggtgaagaaagataatggtgtatcagagggattgttgatatggaagaaaatattatataagagaggaatttatagttaaaaaggcgg

SEQ ID NO: 558176 - DNA, 635 bp, Homo sapiens
  misc_feature (544)..(544): n is a, c, g, or t
  misc_feature (564)..(564): n is a, c, g, or t
  misc_feature (571)..(571): n is a, c, g, or t
ccgcacttagcctgagaggattttcttataaaagaaatagataaattgatagacatttaggttgattccgtatctttactgttatgaatagtggtgtaatctacatggaggtgcaggtatccttttgatatattgacttcctttcttttggatacatacccagtagtgggattgctgactcatatggtagttctaggtttagtttttgaagaaatcgccatactcttctcataatgactacactaatttgcatttccaccaacagtgtagaagagttcccttttctggctggtcgcggtggctcacgcctgtaatcccagccctttgggaggccgaggcaggcggatcacctgaggtcgggagtttgagaccagcctggccaatatggagaaaccctgtctctactgaaaatacaaaattagccgggcatggtggcgcatgcctgttggtcccgctactcagggggctgaggcaggagaagcgcttgaactcgggaggcaaaggttgcggtgagccgagatggtgccattgcactccagcctgngcaacaagagtgaactctgntctcaanaaaactgcccggcgtttacacgtcggactgggcccttggggtaccaactttcgcttgagacttc

SEQ ID NO: 558177 - DNA, 173 bp, Homo sapiens
aactgcttgcgcacgcggacgatctcggcgcggctcagcgtcgacgtgcgctgggtgctgccatagcagaccagcaccgcgttgcactggcccgaggccagcgcgtgcagcgccggcagtaggtgcgccacgaagctggagccgcccagcatggtgctgtctatgaagctggg

SEQ ID NO: 558178 - DNA, 184 bp, Homo sapiens
ggatagatgtgaaaggtcagtggacaatagacggaaagatggagacggtcagtggacaacagacagattggtggggagtgtcagtggacaacagatagatgaacagatgtgagacgtcagtggacaacagatgtatggatcgatggatacgtccgtgtgacccacactggactggactacggtg

SEQ ID NO: 558179 - DNA, 235 bp, Homo sapiens
tgactaggaggagttttttattggggatcctgattgcaggtaaaatttatcattgggcttctaaaagtatgtgggtatcttctaatatcgggagtctgtctctatatctgggcattcgttcttcccgtactactgtcttccagttggggacttcaaacttcgtagtcttctccaaattgtttcatcctaccactcccaattaatctttccattgtcgagatagttgtaaatggcg

SEQ ID NO: 558180 - DNA, 234 bp, Homo sapiens
cccccggggttttttcccccccttgggggtggggtttcccccccccgggcccgttttttgggccttttttatttaaggggggggggggggggggggggcccccccccgggggtttttttggggggggggtttttttttttgccccccccttggggtttttttttcccggggggggggggaaaattgggcccctttcccgggggggttttttttaaattggccttggggggggga

SEQ ID NO: 558181 - DNA, 241 bp, Homo sapiens
tcttagctggcactccatacccccaaccccttccccggagctctcttcagccagggaatgagcttcactagaccggccaccttgcaccctattaagcacagcagcttagtttgcaagggcctttggagatagagaccttcacagcacactatatctgagacatcccgctatctttattgcaatattatatgttcagagagccaggttgccactgtacaacccgagaactgctatttgcata

SEQ ID NO: 558182 - DNA, 915 bp, Homo sapiens
  misc_feature (389)..(389): n is a, c, g, or t
ggccgtatgttggccaagccgccattaagagcgtttcctctttggccagcgtggcccttcgcccgtttgaggaccccggcttccccttctgtattgccggtgcccccccccggtgtgtatttcagaactctccgtttgaccgtggacaaaatcgctgttttccgcggagtttctccgggcttccaaaactttgcgataagcgccccaccccggcctctgacattgataacgcccccgcccagcggcttaaatacattgtgtccgcgaccgtggtccatggcactcgagtggttccgccacacacaccacgaaagttcccgccgggctcttttaacagagcgtcctatcctgccctcattaatggacgaccctcggtgggatcttcgctnacagtggggcaactgttccccgtcccgcgagggtggcgccccccgcgtggggcccctcttggagaggttgcggctcggccccccttcatgcaccgctgggaggaaagcgttttcccaggaatcattgctgagacaattaccacgcggcctgttatttgtaaacgcgccctgctccccacgcggttagaacttatatttctgctgctacgaccacgcgaagtgctgcacaacacttttggtgcccacaaattgctcttccaaatcccagtgaccctagtttatcaatccttgtgaccctctcttgtttacagctgaaatgattttctctctttgtgcaatctatcttcttcggaacgatatctcaattcttaaaactcctctatcagggagattgcagacctctatctcgcaactatagaaaaattagtacccttctatattagtactcccacagagtctccccttctttgcccgcataaaacaagttcatctatttcggcaacataacaaaaaaaacgaacataaa

SEQ ID NO: 558183 - DNA, 340 bp, Homo sapiens
cccatcctgttttcagccttctgtttataattagacattgtccgaagcttcatctagtgctttacaaatgtggggagataaatcagacttcacatgtatgcaagatcacctcacttacacagtatggtccacatagcaaaaataggaccaggtgacaacatgctagtcattttttaaaaccatctacttggtcttctgcgtgcgtctgttttctctccattagaatcaaatgtgtccttgatgtaaatgcaaagcacttcttcccgattcaattgtagatgtagactttacaatataactcaatacataaaaagtaattaacctctaaaacaaaaaaaaa

SEQ ID NO: 558184 - DNA, 117 bp, Homo sapiens
atgcccagaatgggcagtggccacacaggggtatttggggtatccgtcacctcatggactggtcattctaagtgttggggaagacctcctgtcctctcttctcactgttttaaagta

SEQ ID NO: 558185 - DNA, 740 bp, Homo sapiens
gagcgggctggggcggggcaggatattacggttggttgaggacatgccactaggccatgctggtgtgggggaactggggacttttgggcttcatgacagccccacgtgtgatcacaggccaggggctcagtgcttgcctttctgctaagccgctgccagagagcagagtgagccattctcccccgagctcccctctatgttcccctttcctggacaggcttcaggctggaggtgcagctcccagcaccgtgttgagccgggggtgtggagtggcgaatggggcagtggctgggggagaagagacagagtcagtcgtctcaggtaaggcagggatttgacagtagacaccgcaaggatcacacatgcatcctaccaattgccctctacaaccttgcatgcaggggaacccagcacaggacacctgggaaagatgtataaacccgacctcagtatggctccccggacgataacgcggaaagagtaggtcgaccccgagcaccacggaagggggtcaataatgacggtaccaggatggacaggaacccaccgacaagatcagaggcccagcgaacagagaaaaaaaaagagagaagcaaggaacacggacacagacgagaaacgaacgagagggagagacagaaagagaagcaagaacaaaacgaacaaccacaaagaagaggaaggagagcgagaggagaaagagaagaaagacgagcagcagagagacaacaagagagaag

SEQ ID NO: 558186 - DNA, 1079 bp, Homo sapiens
agcgggggcgggggctgaggggctgccatggcggcggcgggccggctcccgagctccgggcccacagacacttgcactacctacagcaggtgcgggcagctaacgtaaggaggagcaaaggaatacccagcgtcatgcagcagcgcaagcgggcacgagccgaggcactagtagagagtccaatgatccgggaatgatcgccgaggcagatgggacgtgggaccttcaatgaccgagcgaaagcaaataaatattactaacggtagctaatcggggaataagatgagcggagagcgtgcagtaatattcaagaccaggaagaacttggcctgtagaagatatcctcaaaataaattaataggaatggtgcaggaaaatcatcaatatgcgagagagaaatcgaatgaagaggccctatttaacaaataggagaggggagagcaccgggaagaagagacttaactaaatgtgaatacagcccaggaaatataaatctcaatgatgaagataaatagaggcgagggatcggacgaaattacaaggatgaaatcaatatataccgaaagcagtagatgagggcgaaagcactgaattggacggagactggatggaggcacggattaaatagttttaggcagtaattaaagacaaaggagccttacttagataagttgaactctaagatagaggactcaagttggggctcagtaagcataaaaggaacttttattgatgggacacaggtcatttgcaactataaggccatgggagcatttgagaaattcttaagagacctaatttggaacggatcatttgtatgacatctaagcataagtaagtgagcatggatgacaagagagctcgggaccaatttaaagatgagatgtgcacgtggaattggaggccaagggcaattttgaacagtgatataaattgtgaacgagatggattattattgcaattgggaatttattgtggggaaaggttttggggattgttttattttaaaaagaggggattaagaaactgtacggtatggaattgtgagtgtaatttaattagttgtttcatggggatgg

SEQ ID NO: 558187 - DNA, 258 bp, Homo sapiens
  misc_feature (6)..(6): n is a, c, g, or t
aacggntgatgcggttgtcgtggatctcgaggcgagaggctcagtagaccctttccagattcgattagagccatatgcacttatcatccgaggggagagctacattgggataactgagaggaaggcttataagatgtggagccacagcgacgtgatgcatcagcagcctgtgaagacatgatcagcgactgccgcatcattgaaggctagcccgagagagcgataataaagacgactagacgtgcctcacacagacga

SEQ ID NO: 558188 - DNA, 319 bp, Homo sapiens
  misc_feature (22)..(22): n is a, c, g, or t
  misc_feature (32)..(32): n is a, c, g, or t
  misc_feature (58)..(58): n is a, c, g, or t
  misc_feature (139)..(139): n is a, c, g, or t
  misc_feature (157)..(157): n is a, c, g, or t
  misc_feature (178)..(178): n is a, c, g, or t
  misc_feature (189)..(189): n is a, c, g, or t
  misc_feature (200)..(200): n is a, c, g, or t
  misc_feature (205)..(205): n is a, c, g, or t
  misc_feature (231)..(231): n is a, c, g, or t
  misc_feature (237)..(237): n is a, c, g, or t
  misc_feature (264)..(264): n is a, c, g, or t
  misc_feature (281)..(281): n is a, c, g, or t
  misc_feature (283)..(283): n is a, c, g, or t
cttctgctccctgaactcttanttgaataaancgtccagcagcaaaaaaaaaaaaaanaactcgaaattcaacatcgaatacgccgcagcccttcgccctattcttcatagccgaatacacaaacattattataataancaccctcaccactacaancttcctaggaacaacatatgncgcactctccnctgaactctanaaaanatattttgtcaccaagaccctacttntaaccnccctgttcttatggattcgaacagcanacccccgattccgctangnccaactcatacacctcctatgaaaaacttcctacca

SEQ ID NO: 558189 - DNA, 904 bp, Homo sapiens
ctctcgcctgcggagccggcaagtattggggacaagaacatgatgacaatgactcacccacatgaaggaacaacgggcaatggagcgccgggacctggatgacctccagaaggaggtggctatgacagagcacaagatgtcagtggaagaggtcttgccgtgaaatacaactaccagactgtgtgcagtggttttgacccacagcaaatgcccatgtgagatccttggccctgggtatgggcctaactgcactcactgccaccggctaccacccctagagttgggtcaacgtttttgcctggcagactcttctgggggcttctccatcctgctgtggatcggggctatccgtctgcttcctggcctactggtatccatggctgggcaccgaggacgagccctctggtgacaacctgtacctgggcatcgttgctggctggcctgtggtgatcatcactggctgcttctcctactaccagtgaggccaagagctccaagatcatggagtccttcaagaacatggttgccccagcaaagccctggtgatccgggaatggtgagaacgatgcatggtgaacgctgaggaggtaggtggtcggggcacctggtggagatcaagggtggagaccgagtgccagctgaccctgctggaatcatctcagaccacggctgcaagtgtggacaagtcctccctgactggcgaatccgagcgcccagactcgctctcccgactgcacagcacgagaaccccttggagactcgagaacatcaccctatcgataaccaacaacttgtgtgggaaggcacgtgatcgagggcgtggtggtgtacacggggcgacccggaatgtcatgggactgaatggccacccctggcatcaggactggaggtgggccagagccca

SEQ ID NO: 558190 - DNA, 252 bp, Homo sapiens
aggagtctagctccactggttggcatggtgcttatcaagatgagcatctcattcaaacagtcaaaaaccgagttaaagtagctcagacacgcatagaagggattggctgctgttgtggcctctccgagggtggctccatctgcaggccctgttggcacccgtacccaaggatgatgtcccagcatctgtctctccgggatctcagctttgtaccctgccctcactggttgcgtctcatatctgcttccctac

SEQ ID NO: 558191 - DNA, 222 bp, Homo sapiens
  misc_feature (186)..(186): n is a, c, g, or t
cccgacaccgacagctgggcgtgggccaggctcagggcccacaggcgcaggtggaggcggtgttggagacgcgcccaggcagaactcgatggtgttgatggcctggtgcatgagcaccttcggaggggacgtaggctcggcctccttcttcgatcatccatggcccccttgccttttcctcatcgngagctccagtccagttcagcgagaatgctgctcaag

SEQ ID NO: 558192 - DNA, 443 bp, Homo sapiens
gaccttttcccttataaatttggtccaaccgaagggccccccccccaaatgcgctgtggggggttgtaaattaaactctttgggccccgacccctattttctccccggggcgcccaaggaaatgttttcttggggaaaaaacatcccccccttttgggatttttttaaaatacccccccaaccccggggctttcccaagggggtggggtttgtttttttttttttgggggctcttccccccagttaaaagtttcctgggataaaacccccgttcccccggttccaaaactgggaccgggttttttaatgtccccttttttgggtcccctgtaaacaaaaaacccttcccggggggggccccctaaaatttttttccttcccccctttatttggaagggttaaaaaaaacctgtttttttaaattaaatttttttttgggccta

SEQ ID NO: 558193 - DNA, 1397 bp, Homo sapiens
  misc_feature (356)..(356): n is a, c, g, or t
  misc_feature (521)..(521): n is a, c, g, or t
ttttttttatttttttcttaattgatatgtttattaaaaacttagactaattaatgtgactccgtggtgcttaaatgtgctcattgggtggtgtggtgtgcgtgattttccacaaaacattaattattaagagacctctttcacaaattacacttcgtggcgcagaaggaaaagaggtaacacagaaatgtgactggacaaagacatgtggcctatttacaagaacacagtctccctcttaaataatcttggtctaagaaaaccggatgtttggactatttactttaccaatttataaccatgttattggtccagagggcacaaagtgtacccgaggggtataagagggtaacacncgagaataacagcgagagaaactatcgcgtttcctataatcttcccacaatatagagcttttaatatatatttttgagctcttttgcagaggtccatgttaaccagagagccacaaatcttggtctcttttaacagagccgagaaaatttttatagtgtctcccnattctcgaagagagagtctctctcttttaccagccttttctcgtggggcgcctttattttcacttgtgtgcgcagagagagagcgaagtctcgaaacagcgtgtgttacaccccagggcctctcctctacatatatctgcggtgcccattttaccattatgtgtgtggaagtgtctccggtgggtcttctccatatatgtgtctgtgtcgtccccaaaatttctcttttgtaaacgaaatatacaatgtggggaggggtgaactctccgaacaaggggagggggccccagcgattacagattttggacaggacaccagtgtttcgccgggatatgtggaggacgagggaaggatcttcaagcatgttcccatcaggggggcaatttttctcccgggtttttacaaattctttcccactcccgggggggctcccacgcggcttttcacggaggagcaagaaggggcgccctttacaaatttcccggggagaacaattcacggcgaggacttctgtgaatttattaaaggacaaggtattattccaaagagccggcagcggagacacttcacttggacatttcttcacacaacggggtttggagtgcacggcaccgaaattttccttactcaattcgcgccaggaaaggcagggggcccggggatccttaagtaaaagtatatttcctacttcgcggagaggggggggcccccaaaagagttttatagacgagtagtaataccccgcaggatttttctcttgtggtatcccaagcaggtgtggtgttcctccatataatacggtgacgaggcaccggataatcaatataacggggtcataagaggacactagaggctccggcgacgggtttattacca

SEQ ID NO: 558194 - DNA, 107 bp, Homo sapiens
  misc_feature (7)..(7): n is a, c, g, or t
  misc_feature (78)..(78): n is a, c, g, or t
  misc_feature (81)..(81): n is a, c, g, or t
ggtctgntctgccatgacagaggaggcagctgttgcaatcaaggccatggaaaataactggctcccagggtggcggtngtngcagcagtgatcctctgaacctgcag

SEQ ID NO: 558195 - DNA, 706 bp, Homo sapiens
  misc_feature (4)..(4): n is a, c, g, or t
  misc_feature (6)..(6): n is a, c, g, or t
  misc_feature (8)..(8): n is a, c, g, or t
  misc_feature (23)..(23): n is a, c, g, or t
  misc_feature (38)..(38): n is a, c, g, or t
  misc_feature (41)..(41): n is a, c, g, or t
  misc_feature (59)..(59): n is a, c, g, or t
  misc_feature (67)..(67): n is a, c, g, or t
  misc_feature (78)..(78): n is a, c, g, or t
  misc_feature (80)..(80): n is a, c, g, or t
  misc_feature (102)..(102): n is a, c, g, or t
  misc_feature (163)..(163): n is a, c, g, or t
  misc_feature (175)..(175): n is a, c, g, or t
  misc_feature (177)..(177): n is a, c, g, or t
  misc_feature (194)..(194): n is a, c, g, or t
  misc_feature (213)..(214): n is a, c, g, or t
  misc_feature (219)..(219): n is a, c, g, or t
  misc_feature (221)..(221): n is a, c, g, or t
  misc_feature (224)..(224): n is a, c, g, or t
  misc_feature (247)..(247): n is a, c, g, or t
  misc_feature (254)..(254): n is a, c, g, or t
  misc_feature (263)..(263): n is a, c, g, or t
  misc_feature (269)..(269): n is a, c, g, or t
  misc_feature (281)..(281): n is a, c, g, or t
  misc_feature (290)..(290): n is a, c, g, or t
  misc_feature (298)..(298): n is a, c, g, or t
  misc_feature (302)..(303): n is a, c, g, or t
  misc_feature (306)..(306): n is a, c, g, or t
  misc_feature (308)..(308): n is a, c, g, or t
  misc_feature (319)..(319): n is a, c, g, or t
  misc_feature (353)..(353): n is a, c, g, or t
  misc_feature (363)..(363): n is a, c, g, or t
  misc_feature (380)..(380): n is a, c, g, or t
  misc_feature (383)..(383): n is a, c, g, or t
  misc_feature (412)..(412): n is a, c, g, or t
  misc_feature (483)..(483): n is a, c, g, or t
  misc_feature (515)..(515): n is a, c, g, or t
  misc_feature (539)..(539): n is a, c, g, or t
  misc_feature (584)..(584): n is a, c, g, or t
  misc_feature (586)..(586): n is a, c, g, or t
  misc_feature (591)..(591): n is a, c, g, or t
  misc_feature (607)..(607): n is a, c, g, or t
  misc_feature (621)..(621): n is a, c, g, or t
  misc_feature (692)..(692): n is a, c, g, or t
taanantncacaaaaccccaaanccttaaaaaacacanccngcccacaaagacaaacangaaaaaancaccaaagaanantaaaaaagcaggcagcaacccncaggaggggggagggggggagaaacgaccccaaaaccgcgaaagggacctaaggggggganccggggattccnanttggcacaaaagccccncccagcccccctaaccgcnncaccncncanaaggagtgttttgttgtgggggntgttagnaggcaggantgcccnacaccggggaanaaaaaccancctgagtnaaannccncngtgtttttgantttgtttgtatgtgtgttttaaagcaacaaccancccacagttnccaaggggaaaaaaaancanaagcaacaagtacctgtaccaaagggaanagcctaaaaagaacaacaacaaacaaggcaaccacaaaaaagccacccgacacattaattaattcattccntcaaaagaacttaaactagagaattaagcccnctttatgaagagcgatttcacggntgcttgaaccattcgaatttggatttgtgttcagcactttaaaangntcaantttttgcttctacccngattggtctcaggnctgtcttctcatccatccctttctaaagccaaagcacatttgtagcacataatccaggggaagcagaagtnaatgctatgactgg

SEQ ID NO: 558196 - DNA, 172 bp, Homo sapiens
ggtagagacgggttttctccatgttgatcaggctggtctcgaactcccgacctcaggtgatccgcccgccttggcctcccaaagtgctgggattacaagcatgagccaccgcgcccagcccataaatatatttttacttgtaaatgtatctactcccttctgtcgtcttctc

SEQ ID NO: 558197 - DNA, 715 bp, Homo sapiens
ccgcccttttattatcttttggacaacaaataattttatgtgcaacttcagaagccactcagatacccagtagtggtggaatgctattttctaatctgacatccttggaagaatgtaacaacatgaatggttcattatcttgcaagggtcggtagtgcataggacgaatgtgtactgaatagaaaatagtagcgagttctctataaaaagacttgaagtcggatatgggaagaggccaactggaggtagtatctagggccacaggcgcgtcatattgccctaaccaggtctcaccttcgatagcctccatgatccacgtggcagcttggaacacgaacttatgagtgaccactagttatatgatgttaacgaactttaaagtgttgccgtattacacctcacttcttgttgagctcaatcacataagaaatttctcgagcattaattcttcgaagaaaagcacgcttagacactttcttagaggaacagggcctgcatgcaccagcgagaacgtatgttagaggcccgaggtttccaatgacaatcattcatatcgccatttaagccctcctggatccttctcatctcccgtgaacttcctcttatcaaatccccctctctccccccgtaatcaaaatccggggccaaaaagcaagccatcatctcaccttcccagagcctgctccccgagttcctccccctttgccccggccaa

SEQ ID NO: 558198 - DNA, 169 bp, Homo sapiens
atccgaacccctgtaccgggggtgcttgctgaatgcagttgaagatgtgcccattctcatggtccgtgttgtacatgataggatactccggggtgttcttcttgcgggccttgcaaatattgatggctaggcgggccaccattataaagctgacagcaccaccaataca

SEQ ID NO: 558199 - DNA, 251 bp, Homo sapiens
gtgtgacaggggacaggcccagactctgtctccaaaaaaaaaaaggaaaaaaaaaaggaggaaggaggagggggttgcagttggttccaatgccttttcaacgggggggggccacagaaggagggcggcttttttgaggaagagggaaagccttaacaaaattttgaatttgtgggcaccttgatttgggctttggcagcctcaaaaattatgagaaaaaggtttttgttgtttttaaatcaccaatttta

SEQ ID NO: 558200 - DNA, 123 bp, Homo sapiens
tcaagacagtgcttctaggcactgtgtttggggtcagtgctgctgtgttggggtcaggagctgtgtgtttagggggtcaggctccgtgttggggtcaggctccgtgttggggtcagcctccgt

SEQ ID NO: 558201 - DNA, 354 bp, Homo sapiens
agaggtctcttgccctgtgcaagacaagcctttctgattagcaatcctagagagaacaggtggctcacgcgtgtagtcccagctctttgggaggatgaggcaggtgaattgcgaggtcaggagtttgagaccagcctggccaacatggtgaaaccccgtctctacaaaacatacaaaaaattggcagggcgtggtggcaggcccctgtagtcccaggtacttgggaggctgaggcagaagaattgcttgatcctgccaggcggaggttgcagtgagccacagatggtaccggtgcactccagagtgggcggcagactgtgcttttgtctcaataacgcaaactgtcatccaacc

SEQ ID NO: 558202 - DNA, 313 bp, Homo sapiens
gcccccccccccaaaaaaaaaatttggggcccccgggggggtttttggggtttgggggggaaccaaaaactttccccgggtttttcccctttcccttaggggggggggggggtttttttccccccctcccaaaaaaaacgggggtttgttttttttttcccccctcttttgggggggaaccaaagggggggggggtttgggttccaaaaaaaaaaagggggtccccccctcttcccccgggtttggtttttttttttcccgggggggggttcgtttttcccggtttttttttttaaggggcctttggggggga

SEQ ID NO: 558203 - DNA, 125 bp, Homo sapiens
atttgttggaaatgacgggcgtagaccacttacatcaacagatagtcggcgctttccttgcttggtggcgtagcgtttggcggtgatcaggcgattgaccaggtcgacacccagttgctcgcgga

SEQ ID NO: 558204 - DNA, 204 bp, Homo sapiens
gggcttttgggtgggccttggggtccaggccctgggaccccttgccagggagacccccgaacctttgggccaggacacctcttggtcccctggccctttcctgtttggtttaaacccccaaactgggggggggatggaaaaccgtaaagggcaggaacggggggggaattttaaaaacaaaaaccaattaaagtccctttccga

SEQ ID NO: 558205 - DNA, 549 bp, Homo sapiens
acggaagtgcctctcgacagcagatccaggctcggagctccagacgctgggacaggccgcccgcagaccacccccgccgcgcgcgggacacgactgcccccctgcaggaccctgcccatcagccctggaaaccccttggaagcttggtttttccctgtgaggccgtgattgccctaccctgtgtgatgcccaccaagagacgtctgcgtgggcgttccgcctgtggggtgccacccttgcgagtacttcgacgccctgcgcagttggcgcccggttgtgggcccctcgcgtggtctttgccatgtgtgaacatagggacgcgggccgcgacccgggaagaggggcagcgattccgagaacaaagagaagccgaaatgggccggggccaccaccgccacaaccggggaccccagccgtttacccagcagggggttggggacccccgagagcggaatcaccctccggcagaaaaagagaacgccccaggagaggcgagcgaaaacgcgcacaccagacacgaagagacagcgcacaggaaccggtgggggg

SEQ ID NO: 558206 - DNA, 217 bp, Homo sapiens
atgtgggcccacgcagcactatccttagcttcctccatcatccagaggcaacagggaataggaacaaagtcctagagcagtgccacaccatgatcttaccgcaaatggaaatgtgaggaaaacgatcaatttgcttcctgaaaatgacatttttattttctggtttctatgagactcgaggtggccttgctgaaattgaactcggtatgagctccct

SEQ ID NO: 558207 - DNA, 116 bp, Homo sapiens
aagctacctgttcaagacaagcctgggcaatagagtgagaccccacctccacaacaacaagaacagcaacaataaataaataaatagctgggtgtggtggtgtgtacccatagtcc

SEQ ID NO: 558208 - DNA, 210 bp, Homo sapiens
ttagccgggtgtggtggctggtgcctgtggtccagctacttgggagggtgagctgggagggtcacttggacctgggaggtggagtttgcagtgagccggtattgcaccactgcactcaagcgtgggtgacagagcaataacctgtcaacaacaacaacaacaaaaagtaatatggaccgggtgcagtggctcatgcctgtggtcccagcg

SEQ ID NO: 558209 - DNA, 112 bp, Homo sapiens
cgtgtgcggacggtggcgcgccccaccgaccacgcccgccgggactccaccccctgacaggactgtgactcactcgccgacctgcggacagactcgacggtggacgacacgc

SEQ ID NO: 558210 - DNA, 170 bp, Homo sapiens
ggtaaaaacatggatgcaaatgaaattcccccagagaacaaagtgaagatatttggtatcagtggggtgaagtcccaagtatgaaagccgtgtactcaaaaatgtaacccttctttcattgcgggacaatggaagaaggcagttcagtgggtggtcagtgtgctcaaaga

SEQ ID NO: 558211 - DNA, 210 bp, Homo sapiens
ccattcatagagaggcttcgtacaacttgatttcccgctatttcgtcagggtacaccctaggaccaaacctacgcctaaatccatcacactactcatatacactcggtgtgaatctcactttcttcccacaacactttctcggtctatccggaatgccccgacgtttctcggagtacccctatgcatacacctccttactgattaacgga

SEQ ID NO: 558212 - DNA, 398 bp, Homo sapiens
gtgagtgtaagaagactcatgcttataccatcacctattaatatgagcttgttcataatatgcatgatgtcaggcacataacagatactcaaaatatattggtgggttgaatgactgagtctggcatatatccagcatctgagatagtgcaaaggatcgttagctttcttttcatgaagaagaacactaagcagtctaacgtaggactaggtgttttctagtccagaagaaatgctgttaggcatatgggaattataataagtatcccaatatgaaatttccttcttcagataacaaatgacaatgtcaagatggttccatttcttttcaatcttgcccttctcctttctcaaagaaagccttgcggtttctgaacagtcattcctacatgcatcact

SEQ ID NO: 558213 - DNA, 181 bp, Homo sapiens
tgctgagacctcgagaagactgagagccatggcacgaacgggtcgtgcaggcgtgccaagcctgtccgtggcacagcttgctgccctgatcggctcaacagcgcaggtgccccttcagctaggtgtcagtcatgctgtagggagtccatcctcaggaatggctccagtggtccgaggcgcc

SEQ ID NO: 558214 - DNA, 142 bp, Homo sapiens
tctgggtggttgcctgctgtcccgtcctcctcctcggctgctctccgtactcggcgctggtgctgtcatcctcttgttcgccgtcctcgtctttcctcttcctcttcctcttcctcctcctcctcacatccgtactggcccg

SEQ ID NO: 558215 - DNA, 501 bp, Homo sapiens
  misc_feature (123)..(123): n is a, c, g, or t
ggcgtggtgcggcgcctgtgtcccagctacccagaggctgagcaggagaatgcatgaactcggaggcggagcttgcagtgagccgagactgcgccactgcactccaggctggggacagagtgngctccgtctgagagataaataaatagatagataaatatataaaaaagaaaaacaccaaacatgaaaaaatgctcaaccttcttttgattagagaaatgtaagtgaaaacaactatgatatatctttatctgtcagatttgctgattggcaaagattcaaaacatgtcaagggtatgttgaaatagacatttcccatgcatagtttgaaagaataattgcaatcttgttggagggtaatttaacaacatttatgagcatcaaactttcttctacagtttgacccagcattgccgtatttagaaatttatcctataggtatgctcaaacacacaaagatacttggaaaaaagattaattgcacattgtttatatttctta

SEQ ID NO: 558216 - DNA, 596 bp, Homo sapiens
aaaaaaaactgccccccccggttttataaaaaaaggaggccccctcttttcttcgggggggacaacaattttttatttttgaaaaaaaaaaattctccccccaaaaaaaaaaaaccaatatctctggtttgttataaaaaaaggccccacttccaaaatatttttttttaacaaatctttttgggccccaaaaaaaaaaaagctcttttaatttgtttttttttttttttttcccccccccaaaaaaaaaaaagggggggggcttttttaaaaaagcggggggttcccaaatagttttttttttcccccccccaagaaaagagtttttccccacaaaaaaggacaaaacccccccccaatttttttttaaaaaaaaaaacaaaattatttttccccccccccggggtgttggccccacaacccccccctctttttttttaaaaaacccccttgttttttttgggaccccattttcccccccttttttaaagaaaaaaaaaagccctaaagatgggtttttaatccggggggcaagggccacccctattgtttagtcccggagcccaagcctttaagtcagccctgcaccttcagct

SEQ ID NO: 558217 - DNA, 1539 bp, Homo sapiens
ttttttttttttgggggggtaggctctttattaaacggttatggctggtactacggggtcagagtgcagggtaagcagggtcaaaggcccgggtttcagcccaaaaatgtggtggatttttcttctctcccttattgtgatctcacaggggggtgggtttcttcagaaaaagccccagaaggcagggaccaggtgagcttccaagggttaaaagtgtggaacgtggaagggctctcagttcacatgtggcgtggttctccagcgctctccaggcggtgggcagacaaggagaggaatagtgtcccatgtgaccgtgtggccgagggtctctcccacattctgtgtaacacccgagtgtgaaagttctgtgggtgagagaacaagccgagcgcgcgccaacgcccgtgggcacctcgtggccgagagggaggcgccacactcgagtggcgatagcgccagacaaatgtgcgcagggggctcagagagggctcgtggagactcgcggaaaaatagggaagaccaggggcgcagaagagtgtccctctgtgtgcggagagagagggcgaacttctctgtggggcgctgtgacacagacacagagcgtctccaagtgtgagacgcccccctgtgggcggagtcatcaccagagcgggtggtataggtgcgctgttgtgggaaacccaaaagacgccaacaagaggcgctgttgtgattacaaaagtggggaggcgcgcactgtgcgcacgagaggggccccacacgggggcgccagaggcgagaggggcgataatatcacgcgcgagagaaaagctctggtgtgggtctcccccacttgtggtggtgtagccacagacagagagaggccttttggagtagggcgagagagctgggggggcagcacacacttattgtaggagggagggccacaacggccgcctttctttttactaccacgcacaagagcaaacagactgttttaaggacgggtgttctacaaccccaaaaggatttcacacaaaaattccccaggccctgtttggccttgtgagagaaaacggcgcccttctttttctccaaacggagagagagggcgacaagaaacaaaaatatggtggaactagttgaaggggaggaggaggaccaatataaagggaggacagaagggtttaatccccgccgacggagcaatatttcattcttatgaccaaaggcgggggaatgttggtgtattccccccgcgggtgggggggtctacatccacaaccctcttggggagatatagtggaaaaaccaattcattctcggtagggcggccccccacaaagcagtatgaggacaccgaggggaaaaacagaccacaacaaaatggcgtggaggggggggcgcaccgaacacccaacactatggggagcgcgcgacaccaaaaaacaccacgaggggaggcaaccacaaacacacccgcggagcgagcagaagataacctcgctatcacaaaggagtgggggtgggcgcaccccacagcgcgaaagaacaacaacg

SEQ ID NO: 558218 - DNA, 263 bp, Homo sapiens
gcctgctccgtctcacacaaacaaacaaacacacaaacaaaccatcatcatcagggttaacatacttctgaacatccatctacagacaacaggaaaacagactcccttaatgtactttcataaacaatatggcaactttatgccctggggcatatgaattttgaagcacagggggcaggcatccatttttctcatcaatgtccacctttccctcacaccttgctcccaatcccagacccattttacttgcacacacttgtctg

SEQ ID NO: 558219 - DNA, 185 bp, Homo sapiens
ccttctacgtctcatcactgtcccaattctgttcctctgtcgcttaccctgtatctttgtcttccgcgagatcttgctgaatctggacacgtgcctctctctctcttaaaaccttggcaaaactcacttggtcactacctgctgttcccttggatgctagttcctcagtgatgagacgtagaagg

SEQ ID NO: 558220 - DNA, 637 bp, Homo sapiens
agtggcaagactagattgcggctctgactctgacggacagagcagcgtgtagaggctcgcgtcatgaattttagctccagaacaaccataggaataaatcaggaaacctaagaggacccacagaccctctgaaggaagcagattgctcctacaggacccaagagacacccgaaatactatgctggtatccatggctgagagacccatagacggttcacatcacaggaatctgtgcagacaactcccgtaccagcccagagcctggtagacttgctgggtggctagatcagaagagagataacaatcaccacagctcggctctcaggaagccacatccatagaaaaagggggatggtattacatcaagagaacaccccatgggacaaaatctcaacagccttcagccctagcccttccctctgacagagcctacccaaatgagaaggaaccagaaaactgtgttggttttctgacaaaacaaggctctttaacaaccccgcgaaaatcacactagctcaccagcaatggatccaaaccaagaagaaatccctgatttacctgaaaaagcattcaggagattagttattaagctaaccagggagggaccagagaaagacgaagcccaatataacgaaac

SEQ ID NO: 558221 - DNA, 407 bp, Homo sapiens
actccgacagcctgttcttctgccatcatgtgtcctagctattcccagagtagtacaagcctcagataatcagtaacttcttacatatgacatcacaagctcaagcaacaaacgaaaatataataacttgtactacctcaaaataaaactttttctttattttgagacgcgatcttgctctgtcatccaagctggagtgcagtggcacaatcactgcctcgacctcctgggctcaagcgatcctcccacctcagcctccggagtagctggactgcaggcatgcaccaccatgtctggctaatcttttatttattgtagagatggggtctcactatgttgcccaggttgatcttaaactcctgggctcaagtgatcctcctgccttggtgtcccaaagtgctgggatt

SEQ ID NO: 558222 - DNA, 1441 bp, Homo sapiens
  misc_feature (150)..(150): n is a, c, g, or t
  misc_feature (152)..(152): n is a, c, g, or t
  misc_feature (156)..(157): n is a, c, g, or t
  misc_feature (160)..(160): n is a, c, g, or t
  misc_feature (166)..(169): n is a, c, g, or t
  misc_feature (180)..(180): n is a, c, g, or t
cgcagagagtgcagctgaccatatgctgcgtacagtctacagggccgacagtctttggcctgtcggaagaatgtcggcattggtgccatcgcgacctcgtatggatcctctacactagatatgtcatcatgaaacgagtgaatctgcacncnatanngantaatcnnnntaacctcaaancaaatgataaccatacacaacactaaaggacgaacctgatctcttatactagtatccttaatcatttttattgccacaactaacctcctcggactcctgcctcactcatttacaccaaccacccaactatctataaacctagccatggccatccccttatgagcgggcgcagtgattataggctttcgctctaagattaaaaatgccctagcccacttcttaccacaaaggcacacctacaccccttatccccatactagttattatcgaaaccatcagcctactcattcaaccaatagccccgcattccgctacgaccaacctcatacaccatcctatgcaacaaacttcctaccactcaccctagccatctacttactatgactactgtctccactacccatctacacactctccagcattcccccctcaacaccaacacccccacacacaacacacacaacacacacaacacaacaacagcacaaacacccaaacgcggggagaccgcgtccccctacagactatctcaccaccagagggcacaacaaagtaacaaaaagaagccacgagaagatatacagacgacaaaaaaacggagagccaccacacaacccccaacccacaacacaaagagcacacagcaacaccgagcacgaccggacaccataccaccagcgacacttccagcgcacacgagggaccgccacacgcgaaaccaccaccgccagcacccacacacgagaagagacaggaagacacaaaacacacaacgagacgaagagcacaaccataaagtgagacaaccgccacacccacagaagacaccaaacgcaacatagggggaaccagaacccttcccaccaccgtaccaagcgagggacaccagagacaaccaaacagaccgagcgcatcacacacccacacgcaaaccaccgcgcaacaatcaccccaccacccttcaccacaaacgaaacggagtaaaccacgccccgccgcccgccccacgccccaccaaaccactccgaagcccggacacaaacgccgccgcgcgcccaccacagcccccacgcagacgaagagagcaagccaacacaggacgacgaaggcaacccaagcaccaagaaagcaagacgcgcagcacgacgtcggacagtaaaagcaccagaaccggcgacgaggcagaggagcagctgacaggcagcgagcgacaaccgggacagaagcccgcccaccacagaaaccagaaccacacaggcac

SEQ ID NO: 558223 - DNA, 1480 bp, Homo sapiens
gggacgaccccggggatggtgcagcaacgtacgctgctgacactacttgtagacgcactgtcgcttgacagtctaccttgtactctaccggatggtgctcctacacgggacccacaaactaccgtgacctttcggacgacgacggatgtggacacactctcgtacttgcacaccacccctggacacgacctgacttgaccttcttacgacgtgtggacacacacacccaactctgacgacagacaccaaccctacccttggtcctctgactgacacgccgactacgacacttgcttgactactcgcgcgctttgacacccccaaactaccggacacgacttggtggactcacacactaacgaccctgactaacggcacacctctaacatgtggacgttgcgacctgtgggacgacacacgaacgtacagaccacgactctgcgtgacacgaactttgcctgacaaacgacctagtacttaccttactaaaaccactggggtggcacctatgacccctgaccgtggcacaaaccaaaaccactatccttcacgacttcggtggctgtgctgtccatgaccgtcaggcaagacgggcatgcaacacacagttcatttcagtctcacatggccaagcagacatccatggacgtggcagaacaggcaggccattcaccaagccacattgctaccccgccgggcaaagccgaacaaagaaacgcactggtggcatgcacgctatcaaccgcgcgacaacagcacatagggacgcgacgcagcccttgcgcgggatggagcccagggcaccactggggagcaacttcccccattaggatagaacccaagcacaggacccaaaacaacggacgcacggtgcaaccagaggggacactacacgcctggacacctaccacacacaacggagaaaccccagaccaaccgtaattacctgacagacagccccacaacgaatgatagggacacccaacaaagggggactcaacacatggccggcgacagacaacgccagacaacacaggaccaccaaaacagaagaccgagaaacccacaaacccgcacaacaacagggaccagacaaacccaaccagcacacgagccaagcagcaggcagctcgcaccacaaacaacaacaagagccacacgacgcaaccaccaaagtcatcacccgcaacagactaacagacagcagcaccgctgacgccgacacccgaccactagagaccgcagatcaacagcacacgaacccacaataaacgcaacagcagaccaaaccagacgacataaaccaacacacgacacgaccaaggagaaccaagccaacacaaagacaccgcacagccaccaccaacctacgagaccacaaccgacaaccagtaaacgagcaaccgaccaacaagggacgagcgagctagcacctgacgacgaaaacgagaaccacagctaacacaacaaacaaacaacc

SEQ ID NO: 558224 - DNA, 956 bp, Homo sapiens
ttgtatgtgcgtgagggatggaatggggtgcgagcgtgggtgttgagtgtgttgtgtgtgttgtgcgctggtgtggagccgtgcgatgcgtcgtggccgttgttggggctggagttcttttgttgtgggacggtgcgctgtgggagtgtgtgcgctgttcgacgttagggttggccttaggatggtcgatctgtcggtggttaggtcttttctgggctctgcggcctgctggaataggcggtggtgctccgtgtggtcgtgatgtcgccgagggtggactcctgctgtcgatgtgtcggtgtggttggcgctcgggggtagtaatgctcgtctgcgtcatatttgtgagttgctgtctgccgtggtctccgtggtggggcgtggcttgtggctggtgccgctcgtctggtcggtggggcggcggcgcagcgtgctgtgttcgttttgtgtgcggcggagtgtgacaccgcgcgtgagggtgttgtggtcgccgtgggtcttaggctggtgtcgtttgttcggttgtgttgcggttccgtcgtgtagcgtcggtgggctcgggtgtctgtcgccccatgaagacggtgtttcgtcggcttgtctgcgcgtcgtcggtttgactcgctcgtgttgcccgccctgtgtttacggttgtgtgggagctttctttggttgtttatccccgttgtgcgcgggcgctaggttgcaggttgctctgcgtcgagggttcggctacttgtcgtggtgtgcgcccacgattggtgtctggttcgtatgtgtgccgccccacgccgtggggggctgttctgagcccatgtccagtgggtcagcgataagtgcgatcgttgtcaccgctggtgaccaccctcgcgtggtgtgtacgcccgtatcccccattttcacgcctttgccccttccccccgaatattttgcggggttttccctttaaaaaaaaa

SEQ ID NO: 558225 - DNA, 739 bp, Homo sapiens
  misc_feature (150)..(150): n is a, c, g, or t
  misc_feature (152)..(152): n is a, c, g, or t
  misc_feature (156)..(157): n is a, c, g, or t
  misc_feature (160)..(160): n is a, c, g, or t
  misc_feature (166)..(169): n is a, c, g, or t
  misc_feature (180)..(180): n is a, c, g, or t
  misc_feature (633)..(633): n is a, c, g, or t
cgcagagagtgcagctgaccatatgctgcgtacagtctacagggccgacagtctttggcctgtcggaagaatgtcggcattggtgccatcgcgacctcgtatggatcctctacactagatatgtcatcatgaaacgagtgaatctgcacncnatanngantaatcnnnntaacctcaaancaaatgataaccatacacaacactaaaggacgaacctgatctcttatactagtatccttaatcatttttattgccacaactaacctcctcggactcctgcctcactcatttacaccaaccacccaactatctataaacctagccatggccatccccttatgagcgggcgcagtgattataggctttcgctctaagattaaaaatgccctagcccacttcttaccacaaaggcacacctacaccccttatccccatactagttattatcgaaaccatcagcctactctgtatgggggatctcgagatcccccatacagagtattatcgaaacatcagctatcatcaacaatagccctggcgtacgcctaacgtaaatactgaggcactactcatgcacctaatgaagcgccaccctagcaatatcaacataacttccctctaattatatcttcncaatctaattctactgactatcctagaaatcgctgtcgccttaatccaagcctacgttttcacacttctagtaagcctctacctgtactctgtatgggggatctcg

SEQ ID NO: 558226 - DNA, 691 bp, Homo sapiens
  misc_feature (150)..(150): n is a, c, g, or t
  misc_feature (152)..(152): n is a, c, g, or t
  misc_feature (156)..(157): n is a, c, g, or t
  misc_feature (160)..(160): n is a, c, g, or t
  misc_feature (166)..(169): n is a, c, g, or t
  misc_feature (180)..(180): n is a, c, g, or t
  misc_feature (513)..(513): n is a, c, g, or t
  misc_feature (535)..(535): n is a, c, g, or t
  misc_feature (547)..(547): n is a, c, g, or t
  misc_feature (575)..(575): n is a, c, g, or t
  misc_feature (588)..(588): n is a, c, g, or t
  misc_feature (603)..(603): n is a, c, g, or t
  misc_feature (607)..(607): n is a, c, g, or t
  misc_feature (609)..(609): n is a, c, g, or t
  misc_feature (624)..(624): n is a, c, g, or t
  misc_feature (631)..(631): n is a, c, g, or t
  misc_feature (649)..(649): n is a, c, g, or t
  misc_feature (678)..(678): n is a, c, g, or t
cgcagagagtgcagctgaccatatgctgcgtacagtctacagggccgacagtctttggcctgtcggaagaatgtcggcattggtgccatcgcgacctcgtatggatcctctacactagatatgtcatcatgaaacgagtgaatctgcacncnatanngantaatcnnnntaacctcaaancaaatgataaccatacacaacactaaaggacgaacctgatctcttatactagtatccttaatcatttttattgccacaactaacctcctcggactcctgcctcactcatttacaccaaccacccaactatctataaacctagccatggccatccccttatgagcgggcgcagtgattataggctttcgctctaagattaaaaatgccctagcccacttcttaccacaaaggcacacctacaccccttatccccatactagttattatcgaaaccatcagcctactcattcaaccaatagccctgggccgtacggcttaaccgttaacattaantgcaggccacctactcatgcanctaaattgggangggccaccctaggcaatatcaaccattnaaactttcccctnttacaatttatcatncttnancaatttcttaattcntactggncttatcccttgggaaatnggtggttggcctttaattccaaaggctancggtttttaacaa

SEQ ID NO: 558227 - DNA, 1198 bp, Homo sapiens
  misc_feature (150)..(150): n is a, c, g, or t
  misc_feature (152)..(152): n is a, c, g, or t
  misc_feature (156)..(157): n is a, c, g, or t
  misc_feature (160)..(160): n is a, c, g, or t
  misc_feature (166)..(169): n is a, c, g, or t
  misc_feature (180)..(180): n is a, c, g, or t
  misc_feature (418)..(418): n is a, c, g, or t
  misc_feature (425)..(425): n is a, c, g, or t
  misc_feature (427)..(427): n is a, c, g, or t
  misc_feature (443)..(443): n is a, c, g, or t
  misc_feature (454)..(454): n is a, c, g, or t
  misc_feature (456)..(456): n is a, c, g, or t
  misc_feature (459)..(459): n is a, c, g, or t
  misc_feature (464)..(464): n is a, c, g, or t
  misc_feature (469)..(469): n is a, c, g, or t
  misc_feature (476)..(476): n is a, c, g, or t
  misc_feature (1092)..(1092): n is a, c, g, or t
cgcagagagtgcagctgaccatatgctgcgtacagtctacagggccgacagtctttggcctgtcggaagaatgtcggcattggtgccatcgcgacctcgtatggatcctctacactagatatgtcatcatgaaacgagtgaatctgcacncnatanngantaatcnnnntaacctcaaancaaatgataaccatacacaacactaaaggacgaacctgatctcttatactagtatccttaatcatttttattgccacaactaacctcctcggactcctgcctcactcatttacaccaaccacccaactatctataaacctagccatggccatccccttatgagcgggcgcagtgattataggctttcgctctaagattaaaaatgccctagcccacttcttaccacagcccaccatanttacccncntactccttacactatncctcatcaccnanctnaaaanattanacacaanctaccacctacctccctcaccaaagcccataaaaataaaaaattataacaaaccctgagaaccaaaatgaacgaaaatctgttcgcttcattcattgcccccacaatcctaggcctacccgccgcagtactgatcattctatttccccctctattgatccccacctccaaatatctcatcaacaaccgactaatcaccacccaacaatgactaatcaaactaacctcaaaacaaatgataaccatacacaacactaaaggacgaacctgatctcttatactagtatccttaatcatttttattgccacaactaacctcctcggactcctgcctcactcatttacaccaaccacccaactatctataaacctagccatggcatccccttatgagcgggcgcagtgattataggctttcgctctaagattaaaaatgccctagccacttcttaccacaaggcaactacacccttatcccatactatatatcgaaacatcagctatcatcaacaatagccctggcgtacgcctaacgtaaatactgaggcactactcatgcacctaatgaagcgccaccctagcaatatcaacataacttccctctaattatatcttcncaatctaattctactgactatcctagaaatcgctgtcgccttaatccaagcctacgttttcacacttctagtaagcctctacctgtactctgtatgggggatctcg

SEQ ID NO: 558228 - DNA, 1138 bp, Homo sapiens
  misc_feature (150)..(150): n is a, c, g, or t
  misc_feature (152)..(152): n is a, c, g, or t
  misc_feature (156)..(157): n is a, c, g, or t
  misc_feature (160)..(160): n is a, c, g, or t
  misc_feature (166)..(169): n is a, c, g, or t
  misc_feature (180)..(180): n is a, c, g, or t
  misc_feature (418)..(418): n is a, c, g, or t
  misc_feature (425)..(425): n is a, c, g, or t
  misc_feature (427)..(427): n is a, c, g, or t
  misc_feature (443)..(443): n is a, c, g, or t
  misc_feature (454)..(454): n is a, c, g, or t
  misc_feature (456)..(456): n is a, c, g, or t
  misc_feature (459)..(459): n is a, c, g, or t
  misc_feature (464)..(464): n is a, c, g, or t
  misc_feature (469)..(469): n is a, c, g, or t
  misc_feature (476)..(476): n is a, c, g, or t
cgcagagagtgcagctgaccatatgctgcgtacagtctacagggccgacagtctttggcctgtcggaagaatgtcggcattggtgccatcgcgacctcgtatggatcctctacactagatatgtcatcatgaaacgagtgaatctgcacncnatanngantaatcnnnntaacctcaaancaaatgataaccatacacaacactaaaggacgaacctgatctcttatactagtatccttaatcatttttattgccacaactaacctcctcggactcctgcctcactcatttacaccaaccacccaactatctataaacctagccatggccatccccttatgagcgggcgcagtgattataggctttcgctctaagattaaaaatgccctagcccacttcttaccacagcccaccatanttacccncntactccttacactatncctcatcaccnanctnaaaanattanacacaanctaccacctacctccctcaccaaagcccataaaaataaaaaattataacaaaccctgagaaccaaaatgaacgaaaatctgttcgcttcattcattgcccccacaatcctaggcctacccgccgcagtactgatcattctatttccccctctattgatccccacctccaaatatctcatcaacaaccgactaatcaccacccaacaatgactaatcaaactaacctcaaaacaaatgataaccatacacaatcctaggcctacccgccgcagtactgatcattctatttccccctctattgatccccacctccaaatatctcatcaacaaccgactaatcaccacccaacaatgactaatcaaactaacctcaaaacaaatgataaccatacacaacactaaaggacgaacctgatctcttatactagtatccttaatcatttttattgccacaactaacctcctcggactcctgcctcactcatttacaccaaccacccaactatctataaacctagccatggcatccccttatgagcgggcgcagtgattataggctttcgctctaagattaaaaatgccctagccacaattactgtcctcagagaggcacacgtacatcccgtaggagactgaatgtgcaggggattctttagagtcat

SEQ ID NO: 558229 - DNA, 1068 bp, Homo sapiens
  misc_feature (150)..(150): n is a, c, g, or t
  misc_feature (152)..(152): n is a, c, g, or t
  misc_feature (156)..(157): n is a, c, g, or t
  misc_feature (160)..(160): n is a, c, g, or t
  misc_feature (166)..(169): n is a, c, g, or t
  misc_feature (180)..(180): n is a, c, g, or t
  misc_feature (418)..(418): n is a, c, g, or t
  misc_feature (425)..(425): n is a, c, g, or t
  misc_feature (427)..(427): n is a, c, g, or t
  misc_feature (443)..(443): n is a, c, g, or t
  misc_feature (454)..(454): n is a, c, g, or t
  misc_feature (456)..(456): n is a, c, g, or t
  misc_feature (459)..(459): n is a, c, g, or t
  misc_feature (464)..(464): n is a, c, g, or t
  misc_feature (469)..(469): n is a, c, g, or t
  misc_feature (476)..(476): n is a, c, g, or t
cgcagagagtgcagctgaccatatgctgcgtacagtctacagggccgacagtctttggcctgtcggaagaatgtcggcattggtgccatcgcgacctcgtatggatcctctacactagatatgtcatcatgaaacgagtgaatctgcacncnatanngantaatcnnnntaacctcaaancaaatgataaccatacacaacactaaaggacgaacctgatctcttatactagtatccttaatcatttttattgccacaactaacctcctcggactcctgcctcactcatttacaccaaccacccaactatctataaacctagccatggccatccccttatgagcgggcgcagtgattataggctttcgctctaagattaaaaatgccctagcccacttcttaccacagcccaccatanttacccncntactccttacactatncctcatcaccnanctnaaaanattanacacaanctaccacctacctccctcaccaaagcccataaaaataaaaaattataacaaaccctgagaaccaaaatgaacgaaaatctgttcgcttcattcattgcccccacaatcctaggcctacccgccgcagtactgatcattctatttccccctctattgatccccacctccaaatatctcatcaacaaccgactaatcaccacccaacaatgactaatcaaactaacctcaaaacaaatgataaccatacacaatcctaggcctacccgccgcagtactgatcattctatttccccctctattgatccccacctccaaatatctcatcaacaaccgactaatcaccacccaacaatgactaatcaaactaacctcaaaacaaatgataaccatacacaacactaaaggacgaacctgatctcttatactagtatccttaatcatttttattgccacaaccgccatttacaactatctgcttgcattggtgaatatatagcagtcgagagttatacttacgtgtatacttgtggtaagtttagtgccataggaaaaaattatcttaaaactttggccatagttcataacattaaca

SEQ ID NO: 558230 - DNA, 262 bp, Homo sapiens
tgactgtataataaggcacaatattagtagacttcatcttctcaatgacagaagaaggggatatcagaggaaaacgtagggaggagtaactaaaatggccaatatattatcaggagtaacatttcatagatgaacccctaaagctcagttagagagacagcatttaaagggccattgtcaggtagtgcaatgtcatactcacctcaccactctacctcagaatatcatatgcttaatccagtcagcgatcagggttcgtgtt

SEQ ID NO: 558231 - DNA, 1107 bp, Homo sapiens
  misc_feature (150)..(150): n is a, c, g, or t
  misc_feature (152)..(152): n is a, c, g, or t
  misc_feature (156)..(157): n is a, c, g, or t
  misc_feature (160)..(160): n is a, c, g, or t
  misc_feature (166)..(169): n is a, c, g, or t
  misc_feature (180)..(180): n is a, c, g, or t
  misc_feature (418)..(418): n is a, c, g, or t
  misc_feature (425)..(425): n is a, c, g, or t
  misc_feature (427)..(427): n is a, c, g, or t
  misc_feature (443)..(443): n is a, c, g, or t
  misc_feature (454)..(454): n is a, c, g, or t
  misc_feature (456)..(456): n is a, c, g, or t
  misc_feature (459)..(459): n is a, c, g, or t
  misc_feature (464)..(464): n is a, c, g, or t
  misc_feature (469)..(469): n is a, c, g, or t
  misc_feature (476)..(476): n is a, c, g, or t
  misc_feature (1001)..(1001): n is a, c, g, or t
cgcagagagtgcagctgaccatatgctgcgtacagtctacagggccgacagtctttggcctgtcggaagaatgtcggcattggtgccatcgcgacctcgtatggatcctctacactagatatgtcatcatgaaacgagtgaatctgcacncnatanngantaatcnnnntaacctcaaancaaatgataaccatacacaacactaaaggacgaacctgatctcttatactagtatccttaatcatttttattgccacaactaacctcctcggactcctgcctcactcatttacaccaaccacccaactatctataaacctagccatggccatccccttatgagcgggcgcagtgattataggctttcgctctaagattaaaaatgccctagcccacttcttaccacagcccaccatanttacccncntactccttacactatncctcatcaccnanctnaaaanattanacacaanctaccacctacctccctcaccaaagcccataaaaataaaaaattataacaaaccctgagaaccaaaatgaacgaaaatctgttcgcttcattcattgcccccacaatcctaggcctacccgccgcagtactgatcattctatttccccctctattgatccccacctccaaatatctcatcaacaaccgactaatcaccacccaacaatgactaatcaaactaacctcctcggactcctgcctcactcatttacaccaaccacccaactatctataaacctagccatggcatccccttatgagcgggcgcagtgattataggctttcgctctaagattaaaaatgccctagccacttcttaccacaaggcaactacacccttatcccatactatatatcgaaacatcagctatcatcaacaatagccctggcgtacgcctaacgtaaatactgaggcactactcatgcacctaatgaagcgccaccctagcaatatcaacataacttccctctaattatatcttcncaatctaattctactgactatcctagaaatcgctgtcgccttaatccaagcctacgttttcacacttctagtaagcctctacctgtactctgtatgggggatctcg

SEQ ID NO: 558232 - DNA, 555 bp, Homo sapiens
  misc_feature (150)..(150): n is a, c, g, or t
  misc_feature (152)..(152): n is a, c, g, or t
  misc_feature (156)..(157): n is a, c, g, or t
  misc_feature (160)..(160): n is a, c, g, or t
  misc_feature (166)..(169): n is a, c, g, or t
  misc_feature (180)..(180): n is a, c, g, or t
cgcagagagtgcagctgaccatatgctgcgtacagtctacagggccgacagtctttggcctgtcggaagaatgtcggcattggtgccatcgcgacctcgtatggatcctctacactagatatgtcatcatgaaacgagtgaatctgcacncnatanngantaatcnnnntaacctcaaancaaatgataaccatacacaacactaaaggacgaacctgatctcttatactagtatccttaatcatttttattgccacaactaacctccccacctccaaatatctcatcaacaaccgactaatcaccacccaacaatgactaatcaaactaacctcaaaacaaatgataaccatacacaacactaaaggacgaacctgatctcttatactagtatccttaatcatttttattgccacaaccgccatttacaactatctgcttgcattggtgaatatatagcagtcgagagttatacttacgtgtatacttgtggtaagtttagtgccataggaaaaaattatcttaaaactttggccatagttcataacattaaca

SEQ ID NO: 558233 - DNA, 364 bp, Homo sapiens
cgagactctgcgtggttctgtgcattgatgtatccttgcctagcattcactcctggcccgcatccaagagccccgccttgccggactctggtcatcgcctttctttttgtggcctgaatcgatttcatctattcgcattaacataactgccgtctccactgctgtcttatttctctgcagcttcacagccaatggctcccatatcccctagttccttcatgttcaccaatgtacccagtctcatccatttacaccccaggtctcatgagttctcctgggtgtgcttggcccgaatggagcttagtagactgatggtgcttgccccactgttctggctcaggatacgaggaatgatctctagcgc

SEQ ID NO: 558234 - DNA, 692 bp, Homo sapiens
  misc_feature (390)..(390): n is a, c, g, or t
  misc_feature (395)..(395): n is a, c, g, or t
  misc_feature (457)..(457): n is a, c, g, or t
aaaatctacatccttctcatatacaaaatacatgcatttctccccagtagccccaaatatcaactcattttagcatcaactttaaaattgtagtccaaagtgtgatttaaatgttatctgagtcaaacatgggtaagactcaaggtacaatttatcctgagtccaactgttcttgctgcgaacctaggaaatcaaacatgttatgtgcttccaaaatacagtggttggagaggcataggataaacattcccattccagaaaggagaaacaggaaagaagaaaggagtaacaagtttcaagcaactcctgactggattttccatcttctgaacatagtggtgcaaggattggttccctcagggcttcaggatgctcttgcccttgagcttngctgngtgcagctgcagtgcagctctcatgagttggaagtgcattccctgcaagtctccagactggnatgactcacccgtagcttcacctaccctgggatcctgggcttgccttgctctgcttgcttcactaggcattgcttttacaggaagcctcttgctcagtcttgtgcctgaagttgtggccaattcaaccctttggtaatcaggtgcagctttcaaacccaacagttaatgcaacttaacttcaagacgagtgaccttatttgcaacaccaaggttaactacaggccctttgggggt

SEQ ID NO: 558235 - DNA, 330 bp, Homo sapiens
gtgtcggcctgcgcgctgaacaggccggcgaacggcgccggttggcgcggcgcagctgggcgtacagcgcctgcgggctcaccggtgcggcgaactgtgcgctccagcgccgcgacaggttcacctggaacacgtcgccggcacgcaggtagtcgatcacccggcgcacgccgtcggtgaagcgctgcggcgcgtcctcgcccaccgtctgcggcggctgccagtcctgcccggcatggggaagcgttgccgaggccagtgtcaccagcacatccagcagcgcctgctgaccggcctcggcaatgacgaagctggcgtcgttgtgatggt

SEQ ID NO: 558236 - DNA, 182 bp, Homo sapiens
ttgttgcacagatatttgtgtacctttgctagaagcaggtgttccagcgccttgggattaggttctcctatggaacaggcctggggcagcctgctcagacctgcattctcccagccctgctcggcccctgcatctctcccagccctgactcggacgctgcatctctcccagccctgcctcgg

SEQ ID NO: 558237 - DNA, 118 bp, Homo sapiens
tacgcatatacaaaatcagctcacaatgggtcagagatccatacaacaagatatatgcattgcaacagcgtactaatggcgccatcacaccagtgatagacaagcgccgctatctata

SEQ ID NO: 558238 - DNA, 455 bp, Homo sapiens
ttagaagaaaggctagcataatcaataacttgcagggctgccctatgggatgtagattagattcatttttttttatttctaaaatagaattggttaagattagaaagaaacaaatatctcaggctaccatgagatggaaaaatctatttactcctaggacttttaaaaaatgtaatagggtggctgggcgcagtggctcacgcctgcaatcccaacactttgggaggccaaggcgggtggatcatgaggtcagaagttcaagactagcctggccaagatggtgaaccccgtctctactaaaatccaaaaaaaaaaaaaatttagctggatgtggcagtgtgcgcctgtaatcccagctacttgggaggctgaggcacaagactcgcttgaactgggaggcagaggttgcagtgaggcacttcactccagcctgggcaacagagtgagactatctc

SEQ ID NO: 558239 - DNA, 204 bp, Homo sapiens
ctatttccacagggacacaatatgcctgtttatgtagtcttaggcccttcagataagattatcttctcactacaggaactccgtaggtttttaaagatgaacttcctaatttttaaacgtttttatatgctatcatagcatgatatatattttattgaaactagggtctcatatctgatcaaactaaatatacttttcaagtta

SEQ ID NO: 558240 - DNA, 254 bp, Homo sapiens
ctgtctccttaattttacacccgggagtcattcttaaccctggcctgggctgggcacggtggctcatgccgtgtaatcccaggaggctaaggcaggagaatcacttgaacccaggaggtggaggttgcagtgacccgagatagcgccactgcactccagcctaggcaacaagcgagactccatcacaaacaaacaaacaaataaacaaaaaacctcctggcctggcacagtggcttatgcctgtaatctcagca

SEQ ID NO: 558241 - DNA, 157 bp, Homo sapiens
ctgctggcaccaggacaccagtggccactcagtctccctgccattccactcacctgccccaggcggggcacagcttcctttctccacggattctccagtgctgacctgccccctcctgtgtctgtatcatgctctgcacgataaggtgatcttctgc

SEQ ID NO: 558242 - DNA, 1626 bp, Homo sapiens
ggtacccatgttgaccctagggaatcccagcgcaatcctattctagagatccatatcaagaataggggtaatcgaccgcgctagtgggatcacgagacatctccgagtgtggtgctaggcgcatatataacaggattcgtcatgttccaaacggaatctacacgtcctcacagtgtactctcgagttctaggaccggtagtagatctcaggtcgggttgtctgagtcgttattgtacagagagttccttgcgccatgggacggaaatgtgaacaaggacgcacacataatcggcctaaactttcacaagagatgctgccgttccgccctgctaaatttgatagtcaatcatccataccattgtaatgctactccaataaccccaaaccacccacccaccgcaagagaagaacgagcggtgtgttacgcacaacagccaaaaccaggcaacagaaacaacgtgccagagaccgcatgttcatcacagaggtcgagccgagtggccgcgcgctagaaacacaggagcgcgacaaaccataagaaacaaagcgtgacgcggcacaatcggggagcccaataaaagtggggggcaatggccaacggagaaacccaccaacgaaatgatagacgggtggagacccacagaaaacaagcaagaggacaacagagcagcaagccgccactgggggcagtcaccacacggcacacacaaggaggagagggaagccaccaacaacagaaacacgaaccgacccagaacgcgaaacacgccctgagcgctgcaactagcccaagttgcgagacaccatacacatgagaaagatggcagacacgagaacaccacgcgaaaaccacaggaacgccatccgggtagccgacacacagatgattacgccacagaccaatccacacgacgagaaaggcaccaacacaggaacaagtacaaccccgtatgcaaacaaaggatgggcaacaccacaaaggacagccaaggacacacaaaacgtggggtgactaacaccgaagcgaggaaccacaaacaccagggacccccgacaacacgggcaccagacaggacgagaaagggcgaccccacggtggaacaacaccacgccaaaaggcacggccatgcacagtaccacgaagagcaaacacggcgaacagagccaaccagaaacatcccaaagaagaaacaccagacacacaagaaactaggggcaaaccacacagggacatgaaccaaatcaataacacaaacaaacaagacaatcaccatagaagaaaactccacaaagaacacataacacaccaataaatataaaacacaaagacacaataacaaaacacatcgctacttacaatcatacaacatcagtatgtacacacaacttctataaacaaactatataaaacccaacacaatacaatataatcatacatagtaaatatcatgatatctcgcaacaatcaaacataataaatgacatataaacatactataatacaaccatacaacgacagtaaccccacaacccatgaaacaaacaacacacaaaaaacaaacagaaaaaaaaaaacaataatcacaatacataaaccaatcaataataacactacaaacactaat

SEQ ID NO: 558243 - DNA, 468 bp, Homo sapiens
  misc_feature (31)..(31): n is a, c, g, or t
  misc_feature (38)..(38): n is a, c, g, or t
  misc_feature (63)..(63): n is a, c, g, or t
  misc_feature (96)..(96): n is a, c, g, or t
  misc_feature (196)..(196): n is a, c, g, or t
  misc_feature (465)..(465): n is a, c, g, or t
  misc_feature (467)..(467): n is a, c, g, or t
gccttttaagttgtgcccgggtaccttaacnaatggtnaaaagcctattggtatagatttttnattccaatgtgaccctataatacatttcctgantccttcctgtattgaatgtccccagtttcccatattaagtgctatgcccctgtataacattaatgaatttaatagtgtacaattttgggcccaggcatgngtgtcacgccagtaatcctggcactttgggaggcagaggcaggcagatcacctgaggtcaggggttcgagatcagcctggccaacatggcaaaatcacatctctactaaaaatacaaaaattagccaggcgtggtggtgcatgcctgtagtcccagctactcaggaggctgaggcaggagaatcgcttgaacccaggaggcggaggttgcagtgagccgagatcatgccattgcactccagcctgggagacagagcaagactctatctntnt

SEQ ID NO: 558244 - DNA, 205 bp, Homo sapiens
ttttttccctcctcccttgcactgaaggccttgaaggccttatgaggccccgccaaacaagcaattttccaagctgggttataatcttttggcccccttattaatattcctgggacccctggccaaggagtttaccattgtccatcataattgctgaagaattcccctcccctgcccctggttccttgcccttccctccctcaag

SEQ ID NO: 558245 - DNA, 489 bp, Homo sapiens
gaccttatgaatgctggggacgtctagtaaaagagggaagtcgctaacagttattagaaacgtgagaagagaaaaatgtgctggactgctttagatagtctaattggcacacatgccacaagactaacgatcttgtatgctgaggtggaaatgagcctctaataaaagctacgacatcctctaatacaagatacaaaaacttatacattacaccagtctagctgaaacataattttttgacacgctttgactgaactttagacagaaaagacaaaactgaaatggaggaacgtaatttaagtgtggcagaaagttgggaatcatgcggcctgatatacaaagataaatgcatcactgaggcatattcccctggccttgaggtatgcaggcaaaggagaggtcacaccttcctgggagacaaaggatcaaagttgacacagagctccaagaaaatatttaccagaagaatgtgatgattcatttatcagt

SEQ ID NO: 558246 - DNA, 431 bp, Homo sapiens
  misc_feature (168)..(168): n is a, c, g, or t
agatggattccaagattttcagattggcagttggttgaaagagtttatctaaagacctagaatccatagaagggagtatctgggttgagataaagggttgtggagaacaagtttcttcttatgcagataaaacctccaggtagcaggcttcagagagaatagattatnaatgtttcttagcagacttaaaaaggtgccagaagatcagggaaaagacctggaaagggaaagggaatctctatagaatgtcaattatcctcacaagagatagctttgtagggccatttcaaaatatatcaaaggaatatattttagggtaaaatacttcagtttctttcagggccttctatgtgccatatgatgctgtactaaagtaaggctggaattttttttattgctacaataaaactcttttattgctccaaaaaaaa

SEQ ID NO: 558247 - DNA, 904 bp, Homo sapiens
  misc_feature (451)..(451): n is a, c, g, or t
  misc_feature (531)..(531): n is a, c, g, or t
  misc_feature (534)..(535): n is a, c, g, or t
  misc_feature (564)..(564): n is a, c, g, or t
  misc_feature (570)..(570): n is a, c, g, or t
  misc_feature (585)..(585): n is a, c, g, or t
  misc_feature (613)..(613): n is a, c, g, or t
  misc_feature (636)..(636): n is a, c, g, or t
  misc_feature (640)..(640): n is a, c, g, or t
  misc_feature (711)..(711): n is a, c, g, or t
  misc_feature (725)..(725): n is a, c, g, or t
cgatttgcacctttctgttttcctgcatggtcaggctggtggcctgcagggacctgagctttgctacccaagcagattcctcatagagattcctaatcactagtttcttgtattcataaactcagagatacagatgggcttggtttgacagttggggtgagatgaaacctttgctcttgagccaaagctctggggcctagtcattgccctgtcattgggttgatgactgtcagcatcactgccgcaggccatgcgttgagtaaggtacctggatttctaggccacagccaccatccgttgtatgtgaccttgtcagctctggccaagagtggcgacagggctgtttaaccacaaataggcagcagcatgcaatacctagtgacttgctgcacaggtatagtatcataattacaggaagttcctattttgaaaactggatctggggtatatncatttgccccatcacctctgtctaaaggcccaagtcctagggctgccatggtcacaagcacactgatgctccttaagatngtnnatctggagcccacatagtgtggaacaaanagtcanctagaaagcatcctnggtcatcattgtctccttcccacctggnccagagatgcttaaatccaagtngttnctccagctgtcacctcccccaggagatcaggattccactgacgtcctgggcagccagtgaatttaattttncatgagaaacaacngagttaacctgtggcattaggagacctacttcatgtggaccctttttttccttcagtttaacttttctggagcagtgtgttcatgtggaccctttttttccttcagtttaacttttctggagcagtgtgctgcgtagttcggcctgagtttgtgcagcttgttaagacaactcttgtgt

SEQ ID NO: 558248 - DNA, 126 bp, Homo sapiens
tgctggggcaggtactccggatacttggtatttagctttggttcacaagagcgtggggtgatccagtcaccgtcgtgactatgtaccaccatttcgctccatggctttagctatggcaagaaacac

SEQ ID NO: 558249 - DNA, 903 bp, Homo sapiens
taagcgtacagtcgaagtcgggcggcaaaagaaagtaaccggccctgacgggcactgtgggacagacaggggaacggatccaggtacagggaacacccccatggaagagagggcccccgatgggccatatgacgacagctctggtgcaatggacgggcccttcaatggcgctccgcgaaactgttcccggggcccaaagggctgattcccataacacgggcgttatgcccccacacagagcggtccccgaaattgggagcaagaagtacgcagcaatgaggggaacgacaaagaaggggggcaaaccacacagccacaaacatgcggcgttctctggggggcacaaaaaagcggcccccctccggaacggccccacatctatgatcaatggggtgctccaccaagaagagcacaaaagggcgcccaggcttctcttatcaaggccggacgattaccgaagcgaggcgctggagggcgcggcattacacaaaacacgttctgggggcgcgcgcgtcccccccgcacgcccaattcctaggagaactgccccccttcgagggcgcacacttagccccgccaaacgcgtgggagaggcgcccccaccgcacaacacacgaggatgtctccccaccgaggggtgagtctcccagaccgcgcccgccggaatggatcacgtcacgcccgaagggcagatgcgagaagcagtctactaaaccgcgtggaacgacggagaatggcaacagcacatccaccatgagggagaaagcgacccacacggagacggtccgaagagaaccccgtggggcaccgctataacgtagcccttggggcctccacgacaaccatcccgcgggggctactttccccagaacacaaaagacaattatccgccaaacaatgaca

SEQ ID NO: 558250 - DNA, 149 bp, Homo sapiens
  misc_feature (22)..(22): n is a, c, g, or t
  misc_feature (27)..(27): n is a, c, g, or t
  misc_feature (80)..(80): n is a, c, g, or t
gatgcacaggtgagaaaaattncttgnccgccagtccacggaaggtgggtagggaccagtacctcgaaggtagttacttntggttgctactggttcagcagctctgcagaaaatgtcctcccttgtggctgcctcagctcgtacctttg

SEQ ID NO: 558251 - DNA, 909 bp, Homo sapiens
gcgccgcgctggggagagcgggtgtttgaaggctccgcggaccggcactaggagccgggggcgggtccgtgaccctccggctgctcggagtgaacaggcggccaggaaagaagcgggcctgaacaccatgatccctttggagaagccaggcagctggctggctcctccccatggcgccacctcagtgctcgtggccggtgcatgtgcctggggtcttgatgcgggcctgtgcctggccgcctgcctgcctgccccatgtgccctgcgggcttggtgacagagaatacgcgcctgtggtgcgcaccgaggcccttccagggacgtgctacatgccgtgtgccctgtgggccctggaagcttggggcaggcggcggacacattttgcaggtgggtgatgaaaaatgtatagacaggacaacgattctgcgtgaacagcacatttgcctgcaagaggttcatggagaacaacatgaagagaaagggcaagattgtcgggatggaaataattcacttgagattgcgtgtactttgaactaggcacaaagacaatccttggggtcaattaatttacattgaacgtttatgaggactgcatcaggaaaattgattcttaggttcttggacatatgctgcttgggggttgaaaatctttgaccagtggtgtttgcatgacgagagaaagaagccttttaaagaggacaggagaatgttcaaaggaacttatgcggacagatttttagaaaggtggacactttcatgttagcaccacctcggggacgggacagttcatcctcgcacttttgaacgagcctccagaaattaattcctgtgtgacaaagttgaaatctaccaatggggatggaccgtcacaggattgggtgcatgctgggtgccctttccacgaagttt

SEQ ID NO: 558252 - DNA, 603 bp, Homo sapiens
gatgaactgggggcgctcgccttttctgcctcactcgcagatgccgggagttgcggacagagtcgcctgcctccggaccggagtgcagacctgtgaccctggagacgctcggccgctgggaaccgtccccttgggtcggcggctgtgccgcccgtaggtccccggacccgaggggtatcggctgtccgcggtgtgggtcgaggtcagcatgagccaaggggtccaccgtgcaggcgctgggcagggggtcgcggccgcggtgcagctgctgagcaccctgagcgttctgcggagcgctgtcgaggcgcatgtcactggagttctggatgatagcttgtgtgatattgacagcatcgataacttgaatacctacaaaatcttccacatactgaaactattgcaagatacgagactatgcttcgagattacaaggataatctgaagcgaccttgtcctttctgcgcagaagatggccactgttcaatgactggcatgtggagccctgtacagagagtcaaagtccggctggaatcaaagctgcgcattctaagaagtactcggagctattgacagcacagtattggtccaggggagctttctttt

SEQ ID NO: 558253 - DNA, 395 bp, Homo sapiens
gttgtcgtgcgtcgtgcctgcgtgcccgtgtgggccagctgtccgtgagtgtgccgtgatcgcctgtgtgtcgcgccggtgtgcgtgcgtgtgtacgtgtctgtgtgtccgtctctgtgcgcgtctgtgtgactgtgtataagtgtatgtgtgactgtaagtgtgaatgtatgtgaatagtgtgtgtaaatgtatgtgactgtgtgtgactgtgtgtgtgagatgtggtgtctaagtatgtgtgtgactgtgtatgtgtgaatgtgtgtgaatgtgtgtgaatgtatgtatgagtgtgactgtgtgtgtaaatgtgtgtatgtgtgtgaatgtcagtgtatgtgtgagaatgtgtgtaagagaatgtgtgcgtgtgaatgagtgcgtgtgaatgt

SEQ ID NO: 558254 - DNA, 268 bp, Homo sapiens
  misc_feature (11)..(11): n is a, c, g, or t
  misc_feature (40)..(40): n is a, c, g, or t
  misc_feature (47)..(47): n is a, c, g, or t
  misc_feature (114)..(114): n is a, c, g, or t
  misc_feature (149)..(149): n is a, c, g, or t
  misc_feature (257)..(257): n is a, c, g, or t
ttgcgcgggancggactgagcggtgcatgcgcgcaggcgnctcgacnggggcgggctgctactccggaatctgctaatcccagtcggtgccgcatccccagcccgccgccatgncgcctacaaactggtgctgatccggcacgcgagangcatggaacctggagaaccgcttcaggcgtggtacgacgccgacctgagcccggcgccaacgaggaggcgaacgcggcgggcaggcgctacgagatgctggctatgangtttgacatct

SEQ ID NO: 558255 - DNA, 151 bp, Homo sapiens
cccttacgcgagcttccatcaactcccctcctcttatttttttccagctatgaagctcttgcttaaagtagtatgaagtgggttctggtcaccagatgacaattatataaacagatctcatcaatatgaactggatggaagcgtcgcgcat

SEQ ID NO: 558256 - DNA, 127 bp, Homo sapiens
  misc_feature (24)..(24): n is a, c, g, or t
  misc_feature (51)..(51): n is a, c, g, or t
  misc_feature (80)..(80): n is a, c, g, or t
catggtggacatgggatgagacgncttcagtcttctcttgaccccaggctnctgccgctcatgtaggacaggatgtccancttgacgttgctgaccgtggtccggtggtgccagcgcatgatgggta

SEQ ID NO: 558257 - DNA, 112 bp, Homo sapiens
ggccccctgtggaatagaattcatctagtgtcttattcaagtaataaataggagtacttggaggcatatagtaggctatagctagctctacaccaacagacaatatagacta

SEQ ID NO: 558258 - DNA, 572 bp, Homo sapiens
  misc_feature (115)..(115): n is a, c, g, or t
ctcagggccttgtctctaggaagatttcgtcaattccaaatacagttttgaagatacaaaaaaaaaaaaaaaaaaaaaaaaaaaaaccgtggtgctgcggcgcgcgccctgggancccctagaaaaagcttttcatgaaacccattcgcgtggggagcgcgcgcggggcccccagagaggtcagagggaaaccggtggcccaagacggcgtgtttccctagaggagaaaccgcgggcacagagagaacacagagggcgcggggatattcatccacaccaatataaaaaacagcgcccgcgggggacacaacccgcgagcggcgtttctgagaacccaaacttcccaagagaggggaagttcatcgcgaagagagctcccaacacagggggatctctctatcataaaaccggggggaggcccacaaaggggagagacccctcagacatatcacaaaaattatagcgcgccccgggagtcggggggggaaccgccaaacaacgcatagctgaccaaaacaaataacaaccacacacacacaaaaaagaccaacaaacaacacaacaaagaccaa

SEQ ID NO: 558259 - DNA, 323 bp, Homo sapiens
  misc_feature (4)..(4): n is a, c, g, or t
  misc_feature (23)..(23): n is a, c, g, or t
  misc_feature (61)..(61): n is a, c, g, or t
  misc_feature (70)..(70): n is a, c, g, or t
  misc_feature (73)..(73): n is a, c, g, or t
  misc_feature (222)..(222): n is a, c, g, or t
  misc_feature (315)..(315): n is a, c, g, or t
agtngtttgccttttgcaattgngcctgggaatcccctcaagaaagaacttaaactttggnctgggaagntgnggaaggaaactgaaaaaataccacttccatgggcagacccattatatccaaattcgtagagaacgagaaagctatgattttatcatcttatgcttggaaatcttaatgaacagtatcccgattgaggaaagtctttaaaatttatgggnctgattcttctgccgattcttggtaccatcaaggtttccccgagtttcatctctccgcctctccttgcaacccctttgccatgttaacagcanccaaagca

SEQ ID NO: 558260 - DNA, 326 bp, Homo sapiens
caaagtgtgaacccgtctctactaaaaaatacaaaaattggctgggcatggtggcgtgcgcctgtaatcctagctactcaggaggctgaggcaggagaatcgcttgaacctgggaggtggtggttgcagtgagccaagatcacaccattgcactccagcctgggtgacagagtgagactctgtctcaagaaggaaaaaaaaaaaaaagatgtgtactcattacagattttgggtaagctcatctcagtgttttaaggccatttattatcgagaacccttttttcccgtgccacagaaagcttttaaattttcccccttaggagtta

SEQ ID NO: 558261 - DNA, 493 bp, Homo sapiens
cctcagggaatgcttaataattcaactatttgtcagactttcatagctcaagctctgcaaccagttagagacaagttttcagactgttatatcgttcattatgttgatattttgtgtgctgcagaaacgagagacaaattaattgaccgttacacatttctcagacagaggttgccaacgcgggactgacaatagcatctgataagattcaaacctctcctcctttccattacttgggaatgcaggtagaggaaaggaaaattaaaccacaaaaaatagaaataagaaaagacacattaaaaccattaaatgagtttcaaaagttggtaggagatactaattggattcggagatattaattggatttggccaactctaggcattcctacttatgccatgtcaatttcgttctctttcttaagaggggacttggaattcaacagtgaaagcacgttacctccagaggcagctaaagaaattgaatttctcgtag

SEQ ID NO: 558262 - DNA, 185 bp, Homo sapiens
actccccaaaattatttctaaaaataaataggctgatgtcacttattaaataggttacaaaaaccacttctatatcagtatgcctatatatgtttatacttatataatggttgctgagttcattcagaacagttccatattctagaaaatgttgaaaaaatcaagtaaatttattaattcatttg

SEQ ID NO: 558263 - DNA, 548 bp, Homo sapiens
atctcagagtattgaacttgtgagctaatttggaagaaacattaaccctgatgagacattgctagttgggtcacgagcccatttctcactgactgccccgaagactgccccagctcaggccccaggatgagaaaggggatctgaggctgcagctcaccctgctgatgctggagctccccgaggacgatgtacagggagcccacctgggcgtggaagggctaccaccaactatggtacagacaagaacctggtgctgatacggatccgtgctgagccatctgtttttttctggactgaatcatgtcatagaggcacaacctggaaggcagaagaaatgcaataatttccatccatacgtagaatcaccaccacgctcaacaggtttgcatggccaagaaatctatagaaaagtgctcagcctcagtcctcatcacaggaaatgcaaattgcagcaacaaaccagaaaaaaaatgtttcagtctacactgtagaatatgaaggaattcctttaattttcaatctcctttgctcaattttcttaatggcat

SEQ ID NO: 558264 - DNA, 149 bp, Homo sapiens
agcagagacacacggaggaatggttactggagcatgagcattggggcgccggaaggcccaggcaacgcctggccctgagtgagcacctggttacccactgacaacgttcgtccatcggctccactggcctcctggtgtatgacttacca

SEQ ID NO: 558265 - DNA, 324 bp, Homo sapiens
aaagagaaaggagagccaggagcatttaaaaatcagcatctgggccaggcaagatggctcacacctgtgatcccagccattttgggaggccgaggcgggtggatcatgaggtcaggagatcgagaccatcctggctaacacggtgaaaccccgtctctactgaaaatagaaaaaattagccaggcatggtggcaggtgcctgtagtcccagctactcgggaagctgaggcagaagaatggcatgaacctgggaggtggaggttgcagtgagccaagatcatgccactgcactccagcctgggcgacagagcgagactccatctc

SEQ ID NO: 558266 - DNA, 302 bp, Homo sapiens
ttaccggtcctgggtagcaggactacaggtgcgcacaccatgcaggctaattttgtagtttagtagagacaggtttccccatgttggccaggctggtctggaactcctgacctcaggtgatcagcccgctcggctcccacagtgttgggattacaggcgtgagccaccaaacccagctgtaaaactgtttctagtagtcttaattgcatgttataatggcaactcttagaaattttaattttgatgtaaaacctggtgagttatgttcaataaggtttgatgtatagtcatgactccacaca

SEQ ID NO: 558267 - DNA, 375 bp, Homo sapiens
gtgtgtacgagataagacattaatcaaaatgtaggcaggatgcagtgactcacgcctgtaatcccagcacttcgggaggcaagggcaggtggatcactggaggtcaggagttcgaaaccagcctggccaacatggtgaaacccagtctctactaaaaatgcaaaaattagctgggtgtggtggcacgcatctgtattccaagctacttgggaggttgagccagagaatggctgggacctgggaggcagagttggcagtgagctgagatcgtgccgctgcattccagccttggtgacagagcaagactgtatctcaaaaatgaaaaaaagaaatatcttaaataacttttcaacgttcaaacttactcgtacacac

SEQ ID NO: 558268 - DNA, 108 bp, Homo sapiens
tctgcagatctgtgtcatcccttcgtgagaggggttggggcggcaggagtttgaggaaatatacttcgctgaaaactgaaagagcagtaagaatgagtcaggtgaaga

SEQ ID NO: 558269 - DNA, 291 bp, Homo sapiens
cctcggaggcgattcacgctggttcacgaatgaagcctgagcactctcgctatcgccacggcgcacatggcttgcgcaaaaactattgaaggttggagcggctgagcggaaacctttcgatagccttttcttattaagaaaaggcggatacttgggccagaagaaagggtattgacatttacataagcgtttcttggggctaaaagaatttgagacgggggttaattttgggtggcgacactaccatggttgggaagcccaaacaaaggatttttgcccccctaaaaggac

SEQ ID NO: 558270 - DNA, 222 bp, Homo sapiens
  misc_feature (34)..(34): n is a, c, g, or t
cgcggtctcccagtctctcgcgctcaccatcttnctcaaagttgatgagattctccaccagtgtgtggtttccctcatggatgaaggtcatgtctatggagagatgggctctgttcacaggtccccagctccctccccttccagccgccaaggaaaggtgcagggttaggaacagtgtgacaggggcctgtccccttccactcggccctctgcctcccactc

SEQ ID NO: 558271 - DNA, 386 bp, Homo sapiens
gagaactgtacccactgactcattcattcatacactcactcatccatctattcactcattgtttgattcatttatccatccatccatccactcacccatctatctacgcatttattcatttacccactcagtcatccgtccatcctcattcatttatccatccatctccattcatttactcatccacccactcattcattctttcatccacccactcatccatccactcattcatttgttcattcatccatctctatccactcatccattcattcattcccattcactcattcatccactgattcattcattcattcatctgggtattcacccatccactcacttatccatccatgcatctgtctgctcactcatccatcctactg

SEQ ID NO: 558272 - DNA, 650 bp, Homo sapiens
gtccagtatcagttacttcctatttttatccttaaaagacccattgcaaatcagctgtaaggcgtttttccagataattactcacagcacttgtgttaaaagtttgcaaattctcttcagccattataactacatatccttctcgtggtgaaggacaacttgtgcctggagtttaaccaattaaaactgattcatctcacttgacctgggcttgcgcgcactgctgcacactgcgcaaatggatcaaccacacactgctcaggctgctgcaaccttggacaacgctctccatgctaattctcccaatatcaattacgcaattgcctaagacaccattataatctatacactatcagaaactgcttgcacaagttttcccgattttaccttaaagcactaaccttaagcgcaacacttggcacaacacgcttggaacggaagcaactctctcccttaaaagcacccattactatgtgggcccgggcaacatcaacggagttgggagcgtgcttcccaagcttttacttcctatctggtgcggcttccttccgggggaacccattacctttacgcactttaagggacccacggtgggcaaccgaatgccaacgacttttataaatttaacgtccccaaacgaaatcatccct

SEQ ID NO: 558273 - DNA, 812 bp, Homo sapiens
  misc_feature (646)..(646): n is a, c, g, or t
  misc_feature (650)..(652): n is a, c, g, or t
  misc_feature (812)..(812): n is a, c, g, or t
gcgtcgaccgcagcaccgcgcatgctccttcttttccagccccggtaccggaccctgcagccgcagagatgttgatgcctaagaagaaccggattgccatttatgaactcctttttaaggagggagtcatggtggccaagaaggatgtccacatgcctaagcacccggagctggcagacaagaatgtgcccaaccttcatgtcatgaaggccatgcagtctctcaagtcccgaggctacgtgaaggaacagtttgcctggagacatttctactggtaccttaccaatgagggtatccagtatctccgtgattaccttcatctgcccccggagattgtgcctgccaccctacgccgtagccgtccagagactggcaggcctcggcctaaaggtctggagggtgagcgacctgcgagactcacaagaggggaagctgacagagatacctacagacggagtgctgtgccacctggtgccgacaagaaagccgaggctggggctgggtcagcaaccgaattccagtttagaggcggatttggtcgtggacgtggtcagccacctcagtaaaattggagaggattcttttgcattgaataaacttacagccaaaaaacaaaaaaaaaaaaaaaaaaaaaaaacgggggggntttnnnggggggggggaaacaagacgagtcacagaaagggcgccaggtggccaagagcggtcccgtggaccccagtttccgggccacacagtcgtgcgaaccagcgcgggacaccccattaagggagcccgaataagtcagaataaccacgttaacccggctaggn

SEQ ID NO: 558274 - DNA, 771 bp, Homo sapiens
gcgtcgaccgcagcaccgcgcatgctccttcttttccagccccggtaccggaccctgcagccgcagagatgttgatgcctaagaagaaccggattgccatttatgaactcctttttaaggagggagtcatggtggccaagaaggatgtccacatgcctaagcacccggagctggcagacaagaatgtgcccaaccttcatgtcatgaaggccatgcagtctctcaagtcccgaggctacgtgaaggaacagtttgcctggagacatttctactggtaccttaccaatgagggtatccagtatctccgtgattaccttcatctgcccccggagattgtgcctgccaccctacgccgtagccgtccagagactggcaggcctcggcctaaaggtctggagggtgagcgacctgcgagactcacaagaggggaagctgacagagatacctacagacggagtgctgtgccacctggtgccgacaagaaagccgaggctggggctgggtcagcaaccgaattccagtttagaggcggatttggtcgtggacgtggtcagccacctcagtaaaattggagaggattcttttgcattgaataaacttacagccaaaaaacttaaaaaaaaaaaaattgggggttttaggagggggggggaaaaaggggtttggaattgggcttgggtattagggttgttcctggacccagtttttttggcccaggggtagtctggggggttccctaaagggagcgataattgaaaagcagtaactgta

SEQ ID NO: 558275 - DNA, 419 bp, Homo sapiens
  misc_feature (3)..(3): n is a, c, g, or t
tgnaccttgtggatcctgccccgcctcggccctaccttagcccaactttttaaggacaagtcccagcccatcccttatcccttccacagccaaataacaaacatagtgatttgtgggggtgaagagatgttggtcaaggggtatgaaagtacagtcagataaaaggaatgtgtcctagatttgatagaatactagggaaattacagttaacaaaaatttattgtacacttcaaagtagctagaagcaaagaactgtaatgtccccaacacaaagaaaagataaatgtttggggtgataatatctcaattactctgatttgatcattacacattgtatgcaggtatcaaaatatcacatatccccccaaaatatgtacaactgttgtatattaataaaaataaatacaaacaaaaaaaaa

SEQ ID NO: 558276 - DNA, 1644 bp, Homo sapiens
gccaaggccggggcgtctgagtctccccagagcatgaccaaacctcagctggagggagcctctgtcttcagtgtcccgtctggactgactatttcatgaagccgctcgccatcgagagtggcctcggctacaagtcataaccatgacccatggtcttatcctctgcggctatgaacccagccaaggggaagttctccatggcacttatgggtccatggacgagagggtcccttgtggatctccatgggtcgattgtgcgttgcctcgactcataacaggcaccttgactgaacctgtctcacgtaatgacaacaaaattgctatgtccagattggcctgtagatgagtcttttgccttggccaagagtagaaattgtgatcagtactgcgttgacgaaggtgcgggatgtagaggctcatgaggccactgtccaggcccatcgtgtgtctgactcatcggagtacactccttgatgcgatggactgatgcagtgttagatgcccagctctggtgatcttatcgtacctacacgcaatgggttgaatgtgaaacgtgggaacatcgggggcaagatgattcagagatatgggggggtttacaaaaaacacccgcaacactacatgctaagagttagcgcacgcgagggaaggcctgctctttatcccccttctagggtatgctaaattcatgtgtgtctcctcgaagattctccgcggagattgaccccggatggatccgcgtaaaagtataattttcacacttcccaccgatttggaatcgccatacgacccaaaaatagcaataatcttggagaggggaccacttctgttggtgccattagtaataggactcttgtgagttttggccccaagtataggggaggcaaaggtacccgcaccaccaaaatagttccatttcaagataccgacatataggcaagacagaagttaggggggcgcatcctttctggaccattagagtaccatcccccataagggtacccccatgcaagtgcccctattctgcattgtgtgcagcaaggcaggcacccaagctgtagattgaggtcccccttgggagcggaaacgacacgaaatgggggtaattgggtaagcatcccgcgagggaggagatcgacttatacaccagtgtcaaaccctgtgaacccaaatgggtagtgtatcaccgcgcgcaagtggcaaagagggtcaactttcgacaaattaaaggcccccagagttgggtggcacacaccccgaaaaaataatgttacacatgtgtgtgcacaacaagttgtttcagcgcgtaacgagtatagaatttcggggcccattcggcatcggcgaccagcgcatcccccacagaggctcggtatagagcggaccccggagccaacaacaacaacatagggaaaacattaaaaagaggttaccgaagtcagagcgaaatagagcaccaagacgccaaatcaaagcacaacgcgtatgtgaccacatgacccgaagaaaagagagaacaacaaaggaacaacacagaggaacagacatgacgagagcagcggaaaccaagacggaacacgacaagagaaaacaaacaaagatcacgttagacgagacatcgtcatactagttaatagccagaaa

SEQ ID NO: 558277 - DNA, 737 bp, Homo sapiens
  misc_feature (667)..(667): n is a, c, g, or t
gcgtcgaccgcagcaccgcgcatgctccttcttttccagccccggtaccggaccctgcagccgcagagatgttgatgcctaagaagaaccggattgccatttatgaactcctttttaaggagggagtcatggtggccaagaaggatgtccacatgcctaagcacccggagctggcagacaagaatgtgcccaaccttcatgtcatgaaggccatgcagtctctcaagtcccgaggctacgtgaaggaacagtttgcctggagacatttctactggtaccttaccaatgagggtatccagtatctccgtgattaccttcatctgcccccggagattgtgcctgccaccctacgccgtagccgtccagagactggcaggcctcggcctaaaggtctggagggtgagcgacctgcgagactcacaagaggggaagctgacagagatacctacagacggagtgctgtgccacctggtgccgacaagaaagccgaggctggggctgggtcagcaaccgaattccagtttagaggcggatttggtcgtggacgtggtcagccacctcagtaaaattggagaggattcttttgcattgaataaacttacagccaaaaaaccttaaaaagagagcacaaagggagagaagaagcaaagaaaccgaggggggccgngtaccaatcgcctataggagcgaattcattcctggccggcgttacacgtcggatgggccggggtaccgtt

SEQ ID NO: 558278 - DNA, 658 bp, Homo sapiens
gcgtcgaccgcagcaccgcgcatgctccttcttttccagccccggtaccggaccctgcagccgcagagatgttgatgcctaagaagaaccggattgccatttatgaactcctttttaaggagggagtcatggtggccaagaaggatgtccacatgcctaagcacccggagctggcagacaagaatgtgcccaaccttcatgtcatgaaggccatgcagtctctcaagtcccgaggctacgtgaaggaacagtttgcctggagacatttctactggtaccttaccaatgagggtatccagtatctccgtgattaccttcatctgcccccggagattgtgcctgccaccctacgccgtagccgtccagagactggcaggcctcggcctaaaggtctggagggtgagcgacctgcgagactcacaagaggggaagctgacagagatacctacagacggagtgctgtgccacctggtgccgacaagaaagccgaggctggggctgggtcagcaaccgaattccagtttagaggcggatttggtcgtggacgtggtcagccacctcagtaaaattggagaggattcttttgcattgaataaacttacagccaaaaaaaaaaaagtcgtatcgatgtcgagcgatcatgatgatgatgtcgacc

SEQ ID NO: 558279 - DNA, 1102 bp, Homo sapiens
  misc_feature (18)..(18): n is a, c, g, or t
  misc_feature (20)..(20): n is a, c, g, or t
  misc_feature (23)..(23): n is a, c, g, or t
  misc_feature (25)..(25): n is a, c, g, or t
  misc_feature (27)..(27): n is a, c, g, or t
  misc_feature (85)..(85): n is a, c, g, or t
  misc_feature (163)..(163): n is a, c, g, or t
  misc_feature (165)..(165): n is a, c, g, or t
  misc_feature (197)..(197): n is a, c, g, or t
  misc_feature (199)..(199): n is a, c, g, or t
ttatttctttttttcttntntantntntccaccataaatattattttcatactcatatctcgctttacactacagtacgtccgtncggacaatcactcgccattcgcactctactgcctattattgttaatgttatcatcttctttatactatattaaattananactgactactaatttattaatattcaaatgcntntcgcacccggaccgccggcggcgcaccgagtgaaggatagcgggtaagagcgggaggcagaggggaggaggagaggtcgaacaagccacccacgagcagaaccctacgcacactcccaacgcgccacgaaacaaagacacaacgagctgcgtggcttgtcctcctccccgttgtcacgccgacacgatccgccacgaagcctcgagaggagccgacatatagaggtcaagatcgtgtctgtctgatggggtgaggttgaagggagaggagaagtgggtttaatatttattaacaggctgagattgttgctttgttcctactacgcgctacgacatactatgcttactttatattgatttgtaagttgagagtcgttactagagtcgggagacacataacaacatgtagtcgctcgctcgggtcggcggtatatttatacgctgaattagagacgatcagacaaaggaagtgtataagtcctgacacgcttccggtgccgggcgtcgtactactccggctcaccgttggctacacgcgtttgctcgtgttctagcgtgctgtaatatatgtttagtgttggtatggacgatggatagtgtcaggaatgcagatacgcgaacggtagaggagcggtgagtcttagatgagcctatgattacgagcgatgccggcgtcttaattcgtataatatctgtgctttgagcgaagtcaagagtatgtctgtgttgtcagtcgtaccctgcgcgtgtaatagtccagtctcgggtgctctcgtcgcggtacctatgagtaacgagcttgtaagatcgacgatagtggagggataggaggtgaattgtagacctgtagtgtgaggctggcgtagatctaggcactctatgtttatatttattgttttcagcg

SEQ ID NO: 558280 - DNA, 775 bp, Homo sapiens
gcgtcgaccgcagcaccgcgcatgctccttcttttccagccccggtaccggaccctgcagccgcagagatgttgatgcctaagaagaaccggattgccatttatgaactcctttttaaggagggagtcatggtggccaagaaggatgtccacatgcctaagcacccggagctggcagacaagaatgtgcccaaccttcatgtcatgaaggccatgcagtctctcaagtcccgaggctacgtgaaggaacagtttgcctggagacatttctactggtaccttaccaatgagggtatccagtatctccgtgattaccttcatctgcccccggagattgtgcctgccaccctacgccgtagccgtccagagactggcaggcctcggcctaaaggtctggagggtgagcgacctgcgagactcacaagaggggaagctgacagagatacctacagacggagtgctgtgccacctggtgccgacaagaaagccgaggctggggctgggtcagcaaccgaattccagtttagaggcggatttggtcgtggacgtggtcagccacctcagtaaaattggagaggattcttttgcattgaataaacttacagccaaaaaaccttaattcagaggcacggaatgctggtggagaacctgtatcgaggaccgggctgatgattgactgtgtcaggaatgtcatcgcaaagtcccactttggctcacccagtattctgtggcacctgttcttgagcaggtgatgagccagatcggggacacgcaga

SEQ ID NO: 558281 - DNA, 744 bp, Homo sapiens
  misc_feature (249)..(249): n is a, c, g, or t
  misc_feature (258)..(258): n is a, c, g, or t
  misc_feature (285)..(286): n is a, c, g, or t
  misc_feature (307)..(307): n is a, c, g, or t
  misc_feature (314)..(314): n is a, c, g, or t
  misc_feature (316)..(316): n is a, c, g, or t
  misc_feature (345)..(345): n is a, c, g, or t
  misc_feature (378)..(378): n is a, c, g, or t
  misc_feature (412)..(412): n is a, c, g, or t
  misc_feature (415)..(415): n is a, c, g, or t
  misc_feature (428)..(428): n is a, c, g, or t
  misc_feature (463)..(463): n is a, c, g, or t
  misc_feature (470)..(471): n is a, c, g, or t
  misc_feature (486)..(486): n is a, c, g, or t
  misc_feature (489)..(489): n is a, c, g, or t
  misc_feature (491)..(491): n is a, c, g, or t
  misc_feature (512)..(512): n is a, c, g, or t
  misc_feature (518)..(518): n is a, c, g, or t
ggttgagtgcgagcatggccggcaatcgccgagtcagagggccaggaggggcgcggccattcgccgcccgtgccttgttcctgtggctggttttctccgcgggcgcctcgggaggaacctgggagataatgggcagcacactgggggagccctggctgggtgcggctcgctctttgcctgacgggcttagtgctctcgctctacgcgctgcacgtgaaggcggcgcgcgcccgggaccgggattaccgngcgctctgngacgtgggcaccgccatcagctgttcnncgcgtcttctcctccaggtgngggcagngngtttctgggctggtggagcatgtgctggngacaggacagcatcctcaatcaatccaacagcntattcggttgcatcttctacacactacagctatngtnaggttgcctgcgngacactgctgggcctctgtcctgatgctgctgagntccctgnntgtctctcgctggtnctngnctacctggcctggatcctgtncttcgngctctatgatttcttgcatttgttttgtatcaccacctatgctatcaacgtgagcctgatgtggctcagtttcctggaatggtccaagaaccccagggcaatggctaatgatgtgcactgatgccctcaacccaatgccaggctgacctcatcttgcttttgcttttggcattgtgatgccttgcctaagggggcatatctgggtcctagaaggcctagatgtggg

SEQ ID NO: 558282 - DNA, 252 bp, Homo sapiens
tcgaatcgagctcggcccctattttgattgggaaactggcgcaatcaatatagtaccgcaagggaaagatgaaaaattataaccaatgcagtatatagcaaggactaacccctataccttcgtgcataatgaattaactagaatataactttcgcagggagtagccaaagtctaagacccccgataatccatgacgaggctactctatagaacagtctaaacagagcacacccagtctatgtagtcaaaact

SEQ ID NO: 558283 - DNA, 707 bp, Homo sapiens
gcgtcgaccgcagcaccgcgcatgctccttcttttccagccccggtaccggaccctgcagccgcagagatgttgatgcctaagaagaaccggattgccatttatgaactcctttttaaggagggagtcatggtggccaagaaggatgtccacatgcctaagcacccggagctggcagacaagaatgtgcccaaccttcatgtcatgaaggccatgcagtctctcaagtcccgaggctacgtgaaggaacagtttgcctggagacatttctactggtaccttaccaatgagggtatccagtatctccgtgattaccttcatctgcccccggagattgtgcctgccaccctacgccgtagccgtccagagactggcaggcctcggcctaaaggtctggagggtgagcgacctgcgagactcacaagaggggaagctgacagagatacctacagacggagtgctgtgccacctggtgccgacaagaaagccgaggctggggctgggtcagcaaccgaattccagtttagaggcggatttggtcgtggacgtggtcagccacctcagtaaaattggagaggattcttttgcattgaataaacttacagccaaaaaagaggagtaaaaaaaaattttgggggggtttggggccttaaaaaagtttttaaaacatttggtttggggggggggccccaaggttaaggtacgtgg

SEQ ID NO: 558284 - DNA, 214 bp, Homo sapiens
  misc_feature (5)..(5): n is a, c, g, or t
  misc_feature (41)..(41): n is a, c, g, or t
cggancaaggcaaggagcaggctggctgagctgagaggtgntcctcgtggcctgtatgacggacccgggtgtgaagtgactgtgaggcgcaagacagtcactccagcctcctcggccaagacgtctcctgccaagcagcaggccccacctgtccggaacctgcaccagtctggattcagtttggctggagctcagattgatgacaacattcccc

SEQ ID NO: 558285 - DNA, 691 bp, Homo sapiens
gcgtcgaccgcagcaccgcgcatgctccttcttttccagccccggtaccggaccctgcagccgcagagatgttgatgcctaagaagaaccggattgccatttatgaactcctttttaaggagggagtcatggtggccaagaaggatgtccacatgcctaagcacccggagctggcagacaagaatgtgcccaaccttcatgtcatgaaggccatgcagtctctcaagtcccgaggctacgtgaaggaacagtttgcctggagacatttctactggtaccttaccaatgagggtatccagtatctccgtgattaccttcatctgcccccggagattgtgcctgccaccctacgccgtagccgtccagagactggcaggcctcggcctaaaggtctggagggtgagcgacctgcgagactcacaagaggggaagctgacagagatacctacagacggagtgctgtgccacctggtgccgacaagaaagccgaggctggggctgggtcagcaaccgaattccagtttagaggcggatttggtcgtggacgtggtcagccacctcagtaaaattggagaggattcttttgcattgaataaacttacagccaaaaaaccttactggattaaaaagtaagagacagctgaaacccctcgtggagccaattcttgggggtcccctaattggggggaac

SEQ ID NO: 558286 - DNA, 337 bp, Homo sapiens
caactttggccccagtgggctggatggtgggatgcaatgaaccatccaacttggtgactaaggctctttctaaccctggagtgtggacaaagggaaagtctgtcatcagcagacaaagggtaagttgtctgtgaatcccaatgacacgtgccccataggctacctgtttaaggagctagaaggttattccactctaagaagctcacctttgcctggtggtccaagggacttgctggacattttccagagaggaggaaggaactgcagacaggtgtggttttccagctcacctggccccagactgttgagtattccttcccctcccatttaggcttca

SEQ ID NO: 558287 - DNA, 679 bp, Homo sapiens
gcgtcgaccgcagcaccgcgcatgctccttcttttccagccccggtaccggaccctgcagccgcagagatgttgatgcctaagaagaaccggattgccatttatgaactcctttttaaggagggagtcatggtggccaagaaggatgtccacatgcctaagcacccggagctggcagacaagaatgtgcccaaccttcatgtcatgaaggccatgcagtctctcaagtcccgaggctacgtgaaggaacagtttgcctggagacatttctactggtaccttaccaatgagggtatccagtatctccgtgattaccttcatctgcccccggagattgtgcctgccaccctacgccgtagccgtccagagactggcaggcctcggcctaaaggtctggagggtgagcgacctgcgagactcacaagaggggaagctgacagagatacctacagacggagtgctgtgccacctggtgccgacaagaaagccgaggctggggctgggtcagcaaccgaattccagtttagaggcggatttggtcgtggacgtggtcagccacctcagtaaaattggagaggattcttttgcattgaataaacttacagccaaaaaaccttagcatgatgggccaaaggaataatgaatgtgccatacagaatacaagtgccggatggctgtcg

SEQ ID NO: 558288 - DNA, 571 bp, Homo sapiens
gcgtcgaccgcagcaccgcgcatgctccttcttttccagccccggtaccggaccctgcagccgcagagatgttgatgcctaagaagaaccggattgccatttatgaactcctttttaaggagggagtcatggtggccaagaaggatgtccacatgcctaagcacccggagctggcagacaagaatgtgcccaaccttcatgtcatgaaggccatgcagtctctcaagtcccgaggctacgtgaaggaacagtttgcctggagacatttctactggtaccttaccaatgagggtatccagtatctccgtgattaccttcatctgcccccggagattgtgcctgccaccctacgccgtagccgtccagagactggcaggcctcggcctaaaggtctggagggtgagcgacctgcgagactcacaagaggggaagctgaccaagaaagccgaggctggggctgggtcagcaaccgaattccagtttagaggcggatttggtcgtggacgtggtcagccacctcagtaaaattggagaggattcttttgcattgaataaacttacagccaaaaaa

SEQ ID NO: 558289 - DNA, 219 bp, Homo sapiens
acacttagctcggtacccatcctgaagttctggaattgagtcccacatcgggctccctgcatggagactgcttctccttctgcctgtgtctctgtctctgtctctctctctctctctctgtgtgtgtctttcatgaataaataaataaaatctttaaaaaataaaaataaaaaataaaacatacagaaacttgtctatgtaaaatatataattttttct

SEQ ID NO: 558290 - DNA, 154 bp, Homo sapiens
ggaatcagccttctccatgatcctgtcgatctggcgattctgtgtatcgatctcattgaccatatccagggacatgtgacggaggtacccgatgatgccgctcaacctgctctagagtaaacatccatttaatttactcgggcatcatttgtaa

SEQ ID NO: 558291 - DNA, 165 bp, Homo sapiens
ggcaatagagcttttgaaaataaatgtgaagctgggcttaggagctcatgcctgcaatcccagagactagggaggctgagaagggaggatcgcttgaggtcaggagttagagaccagcctgggcaacacagcaagaccccatctcaaacacacacacacacacac

SEQ ID NO: 558292 - DNA, 523 bp, Homo sapiens
ggtggcgctgagctgtggcttgctcgctgggtctgtggatgtcgggttcgaccactgtggccgatgggaatggtctgtcacaatctgctcctttttttggtccgccacacgtaactgagatgctctttaaataaagcggttggtgttcaagataaaaacaaaaaaaaaaaaaacaaaaaaaaaaaaattgtggtggggggtatggggccctgggagaaggtttttggaaaaaaggcgggtggggaggcggagggcccaccagatggcgtaagagggaaaagtgtgccaaacagggtgttccaaaaggaaacaccggggaccacggaacagagggcgggaggaatcctccacacaaattaaaaaaaggcgcgggggggaccacacgggcggtgtcgagaaaacatccccaagaggcgggcccagaaaggcccataacgggaggaactttacaaacagggaggccccaagggagagcgcgagaatctacagttaacccccggcggggggagaacgccaacaacgg

SEQ ID NO: 558293 - DNA, 432 bp, Homo sapiens
gagctcggtaccccgcctaggtcatgaaggccatgcagtctctcaagtcccgaggctacgtgaaggaacagtttgcctggagacatttctactggtaccttaccaatgagggtatccagtatctccgtgattaccttcatctgcccccggagattgtgcctgccaccctacgccgtagccgtccagagactggcaggcctcggcctaaaggtctggagggtgagcgacctgcgagactcacaagaggggaagctgacagagatacctacagacggagtgctgtgccacctggtgccgacaagaaagccgaggctggggctgggtcagcaaccgaattccagtttagaggcggatttggtcgtggacgtggtcagccacctcagtaaaattggagaggattcttttgcattgaataaacttacagccaaaaaa

SEQ ID NO: 558294 - DNA, 1120 bp, Homo sapiens
agcggggcgtttcctccttcccgcctgaggcgagtctgggcctcatgctaccatgctctccggcgacggcgcaccttcagggcacgctccgggctgctgcgagtgaccgagggcatgcgctgctgatagggcgagagcaatcgacctgtgtcctccatcgaacaatcacataccatccttccctccctcagacactcctccaacgctttcgatactcccttcgtcttccatcgcattcctctgtgcaagactcgagaccagtcatgctgatgcgtgagaagaatggtgagagcacacaaggagcagtcaggtatggacaaggatagtcactgtggtcgtaccattggttgcccgggcagctcccaatacgctagggtagcctaaggcaagggccaccttaggcgacggccaagctacgacagggcatcctacttttaggacacacgaagacaaggggggacacgctgagagaacaccgagacgagccacgatggtacttactccttaccccatagagacgtgttgcttggcattaatcccttaaacacgagaacattcctttgctccagttgactccgtgaagacagcgtttagcgcttcgtagtgaagagataccgagttcctccataaggtttgcgacaaaactcatagggccattgaccaccgttcgatgcgcgattgtgtccccttaatcatcgcaaactaggcctctctaaacgagctgcgtcctgttcaggccgaccatgggccttttgtcgaatcagagtaggctaggtttgcttcggtggcaacagcccgatgcaaatgttcccatatttcctaagtgggaaaaaccttgcggagcaattgacccggccattgtggggctagggtaatggccttgcgttttcacgtactctcccataggacttttcactctacctcggttcgtgtacggtttagcaacaaccttgggccaaaaggtttggcgaaaccaccgcgaacaattcctctcgtcgctttggtaaccgagggtctttatttcgccggttcctctacagtggagtcctttggcacagattcaaatccaacaggtgcaaagaaccaattatgtgcgccctaaccgactggcgaacacttg

SEQ ID NO: 558295 - DNA, 913 bp, Homo sapiens
  misc_feature (913)..(913): n is a, c, g, or t
gctctaccggcggtatttgatggcgcttgatgtctcacagaatagttctccgctgcccaggatgtgggtccctcaagcttcgctgtctcggaatgcgcggtcgcaggtcatcgtgtggaaggtgaagagcttccctaacggatgacccgctcacaaggccggttctcacctctaggcgaagggccttgccgttggcgaatagcagaggctggtcagagaccttccggtcgatcggtgcgtggccaaagtctgagccaggcctggggaatccacaccggtgatacaagtaatgatgtggtggaggctgtgaccattgtacgaaggaaccggcccatccccatggtttcgcgctaggtgtgtgcccatttggaggcgctataccgtttgagaaaacgcgcgctcagtaggtgctcgtcccgcgacactctcggaagaagcgttgtcctttctgtccatgaggggcacattcatggtcgactagcacgtttcgctgggaatgacggctattcctatttacaggaaatttttgcgcggtaaacacttcttatagggaagggtaacacgggcctgtgtgtaggcccataaggtcatccttgccatttgcaaacactgtgccacgcgattggaggcgattgcgccataggaacagccatgcttgggccgcaactggcctgttcgagggccatggcattgaaatgcaatcgttccagtgcacaagggtctcttccctgatgttccaatttagcgcccaccaatgcgcaacatagtgcaggccttcgctttctcttcttagactgccctaagaaggagcatgtgggtccctcccgtgggtttcgcgaggatcccattgtgttggatggccgagttggggccctggttggcccggagccactctggctactgggggccccgn

SEQ ID NO: 558296 - DNA, 1868 bp, Homo sapiens
  misc_feature (402)..(402): n is a, c, g, or t
ctcattgtctcccgtcctagatcgggtgtgcgagtaccgaaaatagggcgtgtccgctgtctgccatcattcccaaggtgtataatccgagtaactacaccatcaccattcatcaatgcgcctcctatggagctgggtcttcacacgcatatgccgtgaacgcctcgtagacaactcataacgaagcattcgagacacactttagccatgcagagcgaacgattgtggacattcacacgcattgttgcgtcattcgacacccaggcttcaactacatcgactgtctgggtgcctctacatagcgtaattaaagcgcacactgttgcccatatccgcaaatccgctgctgcgtgcatgtcccaagaacataacgtaccatgccgagtattgatagcatttcanccaatataaggctattatagcttttgcgtttacctaattgtaccctggtgtaactcagctatttcaaaaacattcttaccatgaaccagctacaaactgctggcactgacgtaaactaaccttcgcctgcactcgggttcaggatttcccacatttaccacggcttactacaccatcttggacaaaccaatatccacacatcaattcacacccaactttaaacattcaacaactcaacgtgatcgagacttacaataatataaaacacccattcctacccaaaccaacgatatacactacatcaacaacagcggtgcgccgcgggcaacaccgagaccactatcacgatggaacaattactaaccatcccccttgagacgcggagtacgcacctgacacacaccaattgtgagcaccaacaacaaccacataccttggaaaattattacatacgattcacccaacacgaagcgggacgacccaccgcaccgcaaagacagagagagacaggacataacaacaacaacaataacacgaaacgcccagtcggaccccgaagacccgagccgagcacatatacagacaaacgactacgcgccagtgccacagggctgtgacgaccagaccaccacacctccgcgaccaatacaccgccacggccaaccgttctcactcgagcgatgagacgggcaccgcgcacacacactaccacaacccaagataggagcgcgggagcgagagcaacgcacaccacacagaaggcgagtcgcaccatgccctacacaccccacaacgtgaacgagcaagtccaatccaaacccaacgccagaatgggcacgcacgttagatcgcacaaaccacacccaccctcttgcgacagccagcgtagtcacgtcaggcctagcagacaaactatccatgacccgcacactaatgaccagcgagcgcgccgcgcaagaaaacgcacgacgctacccaacgaccatgacacgatgatccatgagcagcacacatctatcccgccaccagccacaagcaagacgaccacacaagcccgaacccaccccaacagaccaggatggaaagacaaacacacgcacagacgcgccgccaccgaaagcaatcaacaccatgagaggaagacgtgcgtcatccaccggacaagcacagacccgcggcaaatcgagcagcactcactgcacgaaccaaacaccagcacggcgccctcctccacccgaagagcggacggcgaccagagcaagccagccacggacagagacgcaggaccgaagagccacgtagcaggcagcgagaccaagccgaccagagcgaagaacacagcagcaagctgctcagaaaatcagccacaacaacgctacctacttcaccactgcagcgacacacaccacaagtacgaataacacacacggcagagcaggacgcgaagccagcgtcacacactcgac

SEQ ID NO: 558297 - DNA, 705 bp, Homo sapiens
  misc_feature (75)..(75): n is a, c, g, or t
  misc_feature (200)..(200): n is a, c, g, or t
  misc_feature (268)..(268): n is a, c, g, or t
ttgggcttactttggctaaaggggatctcatttaccttcaggtaaagtgggttaacaaggaagccacccggcccnaacaggtctaaaatggttgaaccagcaaaaaaaccgggaaaatagcccaagagaaggcctccagttaataaataaggattcaaatctgtcctccccgtgaccaagtgccttccacacatggcatntttcaaggggtgagtcaaagggagtagctgctcaccttggattggtatggcaagaaaaggtacttagnctgcagccttagcaaaggtgagtatgcatgatcccacgaagtcaatgcaaaagccatttgaaaatccctgcttttcaaataggtgtaagggtttctgtccatgacaaggctgttctacttcagtcttttaaccatgtatccacacagtcccagagatggtcactagtgtcttcctcacctttaacttcctccttggaaataattttcacatgctacgttcttgacctaccaggacaaattctatgaattcttcacgtatgtgtcctgggaaggaatagccaaaagctttgacaagaataactaagtctgggctgggtgtgatggctcgtgcctgtgatcccaacactttgggaggccaaggcgggtggatcacgaggtcgggagttcgagaccatcctggccaggatggtgaaaccccatctctactaaaaaaaaaa

SEQ ID NO: 558298 - DNA, 454 bp, Homo sapiens
ggatctcggctcactgcaacctccgcctccggtgttcaagtgattctcctgcctcagtctcccaaagtgctgagattacaggcgtgcaccaccacgctcggctaattttgtgtttttagtagagacggggtttcaccatgttggtcaggctggtctcgaactcctgacctcaggtgatccaccctcctctgcctcccagagtgctgggatgacaggtgtgagccacctcacctggccctattttatttttattttttgcaaggaaggaatgaagggatttattgaaaatggaagtaccctccacagcgcgggaggagaccgagaagaggagctcaaagactaaagggacgggcttttaaagacatttaattaaaaggaattaagtttcccttatgacatttagaaaaaagtcaagtccaaatggtacaaaacggtcagcttgctttgtgccttg

SEQ ID NO: 558299 - DNA, 806 bp, Homo sapiens
tgcagtggcacagcgaggtcggcagcggcacagcgaggtcggcagctgtgcagcgaggtcgcgagcggcagagtgaggtcggcagcggcagggaggtcggcagcgaggcgcgctggtgctctttccggcgggacctcttgaattcatggcggacgacaggccacggagtgtgcgaacctcgggtgctcgggggccgaacagcgggctgccttcaaacgtagggaacgacatgactaaaggtggcattcggagaccagcgaggaggtggatgtgacccccagttcgaccaccatgtggcctgctgttgaggacccttgctggtggcatctaccgccttacggttttgaacacaccaatcagaaatccagacagggagcaatcaagcagatcatcaggggagaagatgtcactcgccacagtctcaatgtcgggcaacaggaaaaacagaccaccttcagtatctcaggccctccaggtgtcggcatatccagggttcgtgaaacctcaggcttggatcttggtccccacaaggacgatgttggggctggtgcagatcccaagcaagggtgctggcttgctcctccgtgtggactaacatttgaattgtccagttgcgcatgccttgcattttgggatgtgcacccaattgtggggcgagggactatcaggaaagcttgcatatccgggacagacaatgtttgtcgcgggcacctccaggggcgatgatatggatattgattccgtcgcaaaaaggagtaagggacacgtgcttatcaaaatgttcgttttgtggataaagcgctgat

SEQ ID NO: 558300 - DNA, 1617 bp, Homo sapiens
  misc_feature (446)..(446): n is a, c, g, or t
tcaatcatctagcgagcacacgtacacactgcgttccgtaatactatcgacaaataaactcgcataatatccgtagagtacctaactctattcatccctctcaaatcgactacatctaccacactacttcaatatcctgtgagcacacacatagaacgaacacaatgaacaaaaatcacatatacaccacattagacacccacaagctgcgcaagcgtcagccccaccatgcccgccgacactctcgcacacaggacccgccatccagtttatcggccatcacctaccccgctacacgctactaccgagatacgagccgagcaggcacccgcctccctcgaggccaagccccacccaccctgccaccacccctggcgtgccaccccacaccacgcgtaaggcgccgcctagcaaaacgacgaccaccacatgccaacatgagccgnacaccctctccccaccagctgaaaggcgggcgtccctaatgaccaaccacttaacacacccccccaaacaccctactctccacaccccccgaacccccaagccccgcagacagcccgcggccctgcccctcgcccgtcaactcacctgctaacctgcgcgcagacaccaccacactagccgcatacactggcacggaagaggcttcgcaagcaccgcagcaaaggcgccagaagagaaaccacccaccccacagcgcgcacactcccccaccccctccgcccctacccaacactaccacgccgcgcccccctcctccccacacccaccccccaacccccccctccccccccaccacatcctaaccaaccccaaaccacttccacttactaatggtcaacgcactaccttatcgctccgtgttattcgacctgtctatctaactttttcttatccccctcccctaaccctaccactcaccctcactcccccctcccccccacttccccctccacccccccctccccccacccacctccccccttacaaccacaaacagcacaccccccccccaacacacaaccaaccccccacaacccaccccctctcacccacactcacacccacccatacccacccactccaccaacacacacccacactcacccgacccatcacctgtcatccaacacacaaactcacaactctcactctcaactcaaccaccgacgctacccgaccctcactcctcaatacacaacactataacacacaacataccaacaccacactaactaatcatcacccctaacacacctactactcccaccccacactccacaactcactacattcacactatgctattccacatccatccttcgactccctcttctgtcacttctatccttacttacactagacattcttacatctactctatatcgattactcctcacttcacaacaccacactcacaacttactgcctcacatacacgtaactacctaccatccacacacaccccgtctcatccccacacaatccactccacacacaactacagacatcgactacacagacaactaaactaccaatctcttgagacatactacactcacaacatacaaataaaactaaaaaaacaactgtcacttcactttttatctacag

SEQ ID NO: 558301 - DNA, 452 bp, Homo sapiens
  misc_feature (28)..(28): n is a, c, g, or t
  misc_feature (50)..(50): n is a, c, g, or t
  misc_feature (214)..(214): n is a, c, g, or t
  misc_feature (404)..(404): n is a, c, g, or t
agccagaattcatggcccctctccatgnattggaactttggtacaggttnagtatcccctaatccctgaaatctgaaaacacttgtggttcccaagcattttggataaggcaaattcaactttcagtctcttttctgggggaaaaaaataataaacctagcctagccaggcgtggtggctcatgcttgtaatcccagcacttcaggaggctganatgggtggatcacctgaggtcaggagttcaagaccagcctggccaacatgtggaaacctcgcctcaactaaaaatagaaaaaaattagttgggcatggtggtgggcacctgtaatcccagctacttcaggaggctgaggcaggagaattacttgaacccaggaggcggacgttgcagtgagccgagcttngccattgcactccagcctgggcgacaagagcaaaactaaacaaaaaac

SEQ ID NO: 558302 - DNA, 398 bp, Homo sapiens
cgggcaagaggacagcgccgggagcgtagtgatctgctcacgttactggccaggcgtgcaggacatccgtctaagtttccccctgcaaaaactacacttgctagatactgacaggaagtgcagcacatacgacaacagtcaggcaacagcatctgtagcttagatttagtgtccaactcctagcgctttagcttcgggcacttgaggtaaacccacatatcatgcctcagttctccctttctctgggccacattcatttggccttgctagaggcttccacagaaggaagctccatgttgatcttatcgtatgaaaccagcggtgtttcactaaaaacccatgccctggccgggcgcagcggcctcatgcctgtaatcccagcactgcgcctcgtgccg

SEQ ID NO: 558303 - DNA, 145 bp, Homo sapiens
gtaggcatgaggcgggatcagggacggaggaggcagaagtcaggattgcgggcgtggactgagatgaacgggcattaaagagctggactcaggccaggcatggtggctcacaccttttatcccagcactggtgaggctggacggg

SEQ ID NO: 558304 - DNA, 150 bp, Homo sapiens
tccaccctggaatctctctagaagctaatcccctggatggattttgcttccatggaataacccacagcgatatctgaacgtctctgtggcattctcatctttctattcgtttggagttccgtgttcctgtacaagactggtggatcagga

SEQ ID NO: 558305 - DNA, 501 bp, Homo sapiens
  misc_feature (476)..(476): n is a, c, g, or t
  misc_feature (482)..(482): n is a, c, g, or t
tctcagagcaccaaataaggaaagtgtaattggatgtcattgctgtcagtcagctgggctataaaagagagagtggggttgcctcatcccctgggtatccacagtcagctgtgtccctagagcttcttttctttcattgctgcccagctgggtatattgcaagtatggattataagaggggaagggacttcactgttttaacgtttgaaacaaaaaggaaaaaactcagaagtagtaagctaaaaacaacttgtgcaaacgttctgggattattacttaattttaagaatttttgctaaaaacaataggaacatcgttgaaaaaagaacccctttgagtgatgactgtttcatagtgttctacatctcctactccctgccttataaaaataaagctaattaattgaagttctggcaaagagaagggagtattccttggcctttgaccaagaattcccctcaccaccatgaacattnccccgncgagccctatgcagtctca

SEQ ID NO: 558306 - DNA, 486 bp, Homo sapiens
aggaccttgggagccttaacctacactttaatttctttttcagatggttgctgtggcatatggagatgctttatagtggtgaaagtgggtatccttttatgttccagatcttagaggaaagtctttcagtttttccccattcagtatgatactaactgtgggtctgtcatatatagcttttattatgttgaggtgtattccttctgtactcagttttttgatggtttttatcatgaagggatgttgaattttatcaaatgctttttcagcaatgatcatatggtttttgtccttcaatctgttggtattatgtatcacactgatggatttgcatatattgaaccatccttgcatccctgggataaattccacttggccatgataaaatgatcttttaaaatgtgttgttgaatttggttcgctagtattttgttgaagattttggcattagtgatcattaaggatactggcctgtagtttgcattt

SEQ ID NO: 558307 - DNA, 239 bp, Homo sapiens
aatttcccctaaaccctgacttcccacctcagcctcctgagtagctgggactacaaatgcgcaccaccacaccaagtaaatttttgtatgtttttgtagacggtcttgccgtgttgcccaggctgttctcaaactcctgggctcaataacctgcctgcctcagcttcccaaaatgctaggattacaggcatgagccatcgcgcctggcccttcccatgttttcaatgtgcctctttgtg

SEQ ID NO: 558308 - DNA, 1093 bp, Homo sapiens
tgggaaatggagtttcactcttggtggcccaggctggagtgcaatgggcggcgatctcagctcatctgcagccactgcctcccaggttcaagtgattctcctgcctcaggcctcccgagtagctgggattacaggcttgcgctaacacacccagctaatttggtacttttatagtaggagacgaggtttcctccatgttcgacaggctggtctcgaactcccacctcagcctcccaaacgtgcgtgggattacagggtttgagccaccggtgaccagccaatgtggtgccttctatataggtgtcatactcattgtggctctctgtgttctgcccaggtgataacaagtgggaataacgccgtgcatacacattcttctcatggtggtgaaaaccctttcccctgtgtgtgctggagaattaaatgaaactcttaagaattattcaaatgagttatatttctcctttgaaccagccttagcgttggaatgaatttataaagcctttatgttttaattatacaccaagggaaagtataacgcagctcaataatgtgcgtaatttgtgcataaacctccttaatcttattggaaagtggggagaaggctctcttaacaaaatttctcccccgaggtataacgttttataaagaatctcaaaaagccacctattcctattttgggaagccaccccccaccattgtgtgtggtgtccccagggggtgagcataacaaatgagggggtgccttttctacatataacaacaaagttggtttccctccaagattctcccgtggtgagagggctcccggaaaactttatatccctccgtggccattttgtggaaaaactctgtgggaggggaacacacacagtcgcgcccaagaagagtttgccacagagaaaaggtttataccctttggccccttgaaagaatatacacccataagggaaaagggggagaacccccttctaaagaaggcccggggcaaaagttgaaatctcttgggggggtcccccttgtgtggaattggtacaaaagccccccaatatgtgtctctctttccccaatcttggcaggaaaccaatggggc

SEQ ID NO: 558309 - DNA, 143 bp, Homo sapiens
  misc_feature (109)..(109): n is a, c, g, or t
ctgcgtggaggcggagaccgaggtgaggatcgagaacgcgaggagcgcgaccgccgcctggccccagaagctgttgccgaacagggtcggcgcgatggccgaggggacntccgccgcattagactccacgccgaggccgatct

SEQ ID NO: 558310 - DNA, 154 bp, Homo sapiens
accgatcaccgagcagccgtgagtgtctctcaaggccataactaagatgccgctactcatcctagcaccacaacctgaatgtgtgttaatatttttttgttagttttccccaaaatgtttacgatcccaacaagctttcttttctaaacctgca

SEQ ID NO: 558311 - DNA, 130 bp, Homo sapiens
cattggcaatggggagctattagggaagggagagtttgtttgacttaagcatctggactatggtggattaaccacacaccaatggaatgtcataaactttatccttagagtcttcagtgtatgtcgacgc

SEQ ID NO: 558312 - DNA, 108 bp, Homo sapiens
acccaattttttgtagactaggaaaaaaatgcttgtgtttttcggaagtgtaatgcttttttttgactgccaaacttttttatggaatatatttttatattaatgcta

SEQ ID NO: 558313 - DNA, 224 bp, Homo sapiens
cgtcagatatgcttgttatatttaatggctgatctatgtaatcacagaggccagatatgtacatgacaagagtgggaggtttaatgttcttggtctcttcctccttggataaagtcttgatgatctcctccttcttggcctggaggcgctcttcacggcgcttgcgtgcttccttggtcttagacctgcgggcctcagcctggtcagccaggagcttcttgcgg

SEQ ID NO: 558314 - DNA, 118 bp, Homo sapiens
cggtcgctgaaacaggtgtagacgtacaggccattgaattggtcatgtcacaccgcacctgtgtcgagagcaacggccgtccgcgccctgaagaacaacagtaatgatcttgtaaatg

SEQ ID NO: 558315 - DNA, 117 bp, Homo sapiens
ctataatataagcgcacagaactaatcatatttgatatcttcttcgaaagcagactgtatccccaccttggttatcatcaaccgatgaggcaacagccagaacgcctgaacgcaggc

SEQ ID NO: 558316 - DNA, 455 bp, Homo sapiens
gcggccgcctactactactactgctcgaattcaagcttctaacgatgacggggccatgcagtctctcaagtcccgaggctacgtgaaggaacagtttgcctggagacatttctactggtaccttaccaatgagggtatccagtatctccgtgattaccttcatctgcccccggagattgtgcctgccaccctacgccgtagccgtccagagactggcaggcctcggcctaaaggtctggagggtgagcgacctgcgagactcacaagaggggaagctgacagagatacctacagacggagtgctgtgccacctggtgccgacaagaaagccgaggctggggctgggtcagcaaccgaattccagtttagaggcggatttggtcgtggacgtggtcagccacctcagtaaaattggagaggattcttttgcattgaataaacttacagccaaaaaa

SEQ ID NO: 558317 - DNA, 208 bp, Homo sapiens
ggagatgcacatggacattgatgagactacccatcgacactacagcgacggctcaggcccgtacccactgagaccacatgctggctaggtggctggcccagtgcggttctcatctgagaggctctccgtgcaggcgatggggcaagacagaaaatgtgctgagctggggaacgccggggtgtaacttctctgctgcaaccttgcgcct

SEQ ID NO: 558318 - DNA, 356 bp, Homo sapiens
  misc_feature (344)..(344): n is a, c, g, or t
gcgtcgaccgcagcaccgcgcatgctccttcttttccagccccggtaccggaccctgcagccgcagagatgttgatgcctaagaagaaccggattgccatttatgaactcctttttaaggagggagtcatggtggccaagaaggatgtccacatgcctaagcacccggagctggcagacaagaatgtgcccaaccttcatgtcatgaaggccatgcagtctctcaagtcccgaggctacgtgaaggaacagtttgcctggagacatttctactggtaccttaccaatgagggtatccagtatctccgtgattaccttcatctgcccccggtgaccggctacggngtaccgagctcg

SEQ ID NO: 558319 - DNA, 106 bp, Homo sapiens
tcgaggatccctccccccggttaaaacatacaagtttcttcttttttcccacaataaattgcagcttataataaaaatttgaaaggactgtcattggaagcaatga

SEQ ID NO: 558320 - DNA, 268 bp, Homo sapiens
ggtctacgtgcctggagtcactgccagtgaacctggaccctctgccctcctgccagggtccccagcccggtcactctgagcctcgttccccaccagcctttccgagctattgttctagaaacagaagcggagccacccgagcctggacccttgccctagttcctgtcctgcctgtcacattgtcctgctcctctcgggagggactgcatcccgccacccagctgcctcatcccaaactgtccaggctgttggaagaggagggctaatg

SEQ ID NO: 558321 - DNA, 580 bp, Homo sapiens
  misc_feature (578)..(578): n is a, c, g, or t
gtcgagcaccgtggccggcacttccttgacgccttgatagacgttgaagaacacgatgaagaacaccagggtcacgccgagcgcgaccttggaccagacgccgagcccgaaccacagcgcgaagatcggcgccagcaccacgcgcggcagtgcgttgaccatcttcacatagggatcgaacacggcggcgacgcgcggctgccgcgcgaaccagaagccgaccaggatgccgccggccgagccgatcacgaaggcaaggatggattcccacagcgtgatcgcaaggtgcttccagatcactccggtcgagaaccacttcacaatctggctgaagacgtcgaccgggttggagaagaagaacgacggcagcagcaccttgccgaacaccggcacggtggcgaagacctgccacagcgccagcgtgacgaccgcaaccaggacctgcagcgccagcaacgtgatgcgcgacatcaggcggctcccgcctgcgtcgactgggcatagcccttcatcacctcgtccttcagcacgccccagatctcgcggtgcagggcatggaaatccttctccatcctgtnct

SEQ ID NO: 558322 - DNA, 288 bp, Homo sapiens
ggaacatgtagcccgtccctatcagtcaacatgttgcccgtcggcgtaacagtcaagatgttgccctcccgtccagatcaacatgtagccctcccgtcagacaaacatgtagccctcccttcagtcaacatgtagccctccctccagtcaacatgaagccctcccgccagtccacatgtagccctcccgtcagtcaccatgtagacctacccttcaggcaacatgtagcccacaactaccagtcaacatgtagccctagcctatcagtcaacatgtagccacctctat

SEQ ID NO: 558323 - DNA, 216 bp, Homo sapiens
cctttctctacaaaaataaaaataaaaaattagctggatctggtgatgtgtgcctataatcccagctacttgggaggctgagatgggaagacagcttaagcccagaaggtcgaggctgcagttagtgatgatcatgccacttcactctagcctaggcaacagagcgagaccctctcttaaaaaattaaaaatcaagcaatctgctgttctcagagg

SEQ ID NO: 558324 - DNA, 818 bp, Homo sapiens
gcaggttgactgcgcaatgcagaggctgcaggtagtgctgggccacctgaggggtccgggcgattccggctggatgccgcaggccgcgccttgtcctgagtcgtgtgcccctgcagtgcctcgtgtccgcgtgactgtggttggtgtgtgcactggtgctggctgcactggccatcttgccgggctggtgccggcggctggcttcaatggacaccacgccccgaccgagcttctctcgtgcatgtcattgacctgctggttctcaatggactgtgaatctagaggccgggaacagctgggggacatctgtgtcgtgacatcccggagactgtgcctttgtccactgtcaatagacagtgttcgtcggtgggctacatgggcagtggcccagcatagcatgggtggacgtccatgtccctggctgacagaggggaacccttgggaaatattacttcgcgcttgatggagaaggacaatggccaggagattgcctgattcctatggggataacctctgagactgtggctgagcggtttggcatttcaccgggacgaagcatggatacctttgccctggcttcccaggcagaagtgatgcaagaagcccagagcaatgggctgtttccaagctgacgattgtgcctgtgaccaccaacggtccatgatgacaagggcaccaaagaggggccatccactgtgacccaggatgacgggtatacagcccaaacagcatcatggagggcctggccaaacttgaagcctgccttcaagaaagatggttctaccacagcttggaaactctagccaggtgacgtgatg

SEQ ID NO: 558325 - DNA, 329 bp, Homo sapiens
cctcccggattcaagtgatggttctgcctcggcctcctgagtagctgggattacaggcacgcaccgccacacccagctaatttttgtatgtttggtagagatgaggtttcatcatgttggccaggctgaccttgaactccttgacctcatgatccgcccgcctcagcctcccagagtgctgagattacaggcgtgagccaccacgccccgcctctttcaaacacatttaataacttccataaagatcttgcatgtcttttcttagatttcatcccaggaactttagatttttgttgcttttataaatcgtgtgggcacacattatggag

SEQ ID NO: 558326 - DNA, 191 bp, Homo sapiens
tttggcaatttaacggccacggtagtagcatgcatctcggactcctttcgtttgtgttgaagacctgacctccacgcccatgaagaccagagcgcgaatctcgcgcaaacaaacgggggagtccatcccatcattcaatccggacgcgccgcggaattgggcccagaagcgtgctggtgagcgtacgcctt

SEQ ID NO: 558327 - DNA, 448 bp, Homo sapiens
tagaaatatctgtgtttcagcacgggattggatttcttcaggagactctatggggcagtatattgattctcctaaggggtgaccagtgcctgggtggaggcactggggtaatgaactcaccaataacccatttgaacttgagacaaccacaagggaagcagccacaaagcattttgcaacaatgggacattgctagcctttgaataattaattccaagagacatacagatataggactcaaccctgacaaattccaggtttgatgctttgttaattaaaccctgtcctccattgaaaacacacacacacacacatacatctggtacagaacatagacactgctatatcaccagtacctcattttaacttcttggttcaggatgcatataaacctctggagtacttttcaaactcaccaaaaaataaaatcattcgattgatcttaaaa

SEQ ID NO: 558328 - DNA, 364 bp, Homo sapiens
gggagcccaacggacattccgctttccgcttccgtcccgcggggcccatcggggttttggggccgcaaccgggaccctcccggaaaatgaccttgtacaaaagctttccctccccttccccccaacgccacggccaaggcaggcccccccccccgctgttttccgtgtcaaccgtgtttgattttgggacccccgagccccccagggacccttgagggccccatcccgttatccgagacccttcctacccccccttcctcggcgctgggagctttttttgcccaagggggggggatgggggggctggcgccccccaacctgcccatttcaacttgttactcaataaacaaaagtgcccatcgga

SEQ ID NO: 558329 - DNA, 118 bp, Homo sapiens
tgtcttcccaccagacagtctcaaactcctgggctcaagcgatcctcctgccttgggttcccaaaccgctggtattacaggcgtgacctacttcgctggcctacagcacatgccgggg

SEQ ID NO: 558330 - DNA, 1040 bp, Homo sapiens
  misc_feature (719)..(719): n is a, c, g, or t
  misc_feature (731)..(731): n is a, c, g, or t
  misc_feature (784)..(784): n is a, c, g, or t
  misc_feature (786)..(786): n is a, c, g, or t
  misc_feature (788)..(788): n is a, c, g, or t
  misc_feature (791)..(791): n is a, c, g, or t
tctgtctcttctctgccggtcttcttctgttgctctctccctctttgttctccctcttgtactcttggtcttctcttttctttcctcgtgtctgttgttctgctgcgtggctgtgctaggctcgtgttctcgcgtgtggttttcctctttggtcctttgatgtccttttcttcctatcttcgtcttgctcctgttgttgagtgtgtctccgctgcctgccgtttggtcgggttagttggctttggtgtcgcgctgggcccgcgtgttggtgtctgtttcgtgttcgcttgtgtttggtgggttggcgctcctatactctgcgtctccggtgtggtctgccccttttcttctcgtggtgccgttctgagtggaggggcgttctgtcgtcggagtgtgctttgagctcggcacccttgattgtccgtggcttatgtgcttgtcggtgttcagggtggtgtctcgcacgcccgtctagtgagtcttccggtgatctccgggagatagtgtgtgacgtcttgttgatgctccatgtggagcgtcgttgtgtccagtatgtttttcctggtgtgtctcataggtccactttggtgttcaatgtctttcatcccttgactgtctggtgaggccaccatcttccaacgttttctcctctcttttctggccactctcacttagtctcctttgtcatttctttttgctgttcctgccttaaatatttntgtggtttattnatttttaatattacatgaaatgtgatgggaaatacacaggatcactgacaatntntnttntaattgaagttccacttttcatctaaagaagtttgagaacagtttagaccagaaaccttaagtgagatcttgagtttctactgactctaatcttgagactctacagacacaaacctgcctgggaatagaggacagaatgatatgattagacgtgtggcacatgctaggttcatgtacctaatcagccacacagggtaagggctgccagaaaaacatattagtcaatctagtctttccttcctttcttct

SEQ ID NO: 558331 - DNA, 946 bp, Homo sapiens
catcttgggacttttcttaaaagttcagtaataagctaactgtgtttataaacatgtaagtctcttacagaccatcaagtagcttggactgagacagtctgtgacttcatgactaggaaagaggacggactgcggtctggggttctttaacagtctctggctgggctgcctcatgactttaatcagctgtgaactggccagtgcaccagcaacttaagcgtgtgcatgcagcagcaattccggatatacgtttatcattttctaacaaaagtgtcacctccaaattcaaagcaagtgtaagtctagtctcttaaggctagaaggtccaaaatgcttgcctctggtcttccaacaggcattatcccaattgtggcacagatggcccatgacctgggtcagcatacttttcctccgtattaccattctggggtttcctttgacggggtcactcattggacgaccacgcagggcctctgacgaggggccctgggttcctaagacattccatattggcaccttggacggggttaaccagcctgggctttattttcaatggcattggtaacttctttggactgttctttcaattcctggtcaagggcctccacgcgaggcctattcaactgacatggtgttcctcacaactttaagtggcttccccagggctaagctacatagggaaacctcccaaatttcaaggggcccacagtttacacacggctccacactctgtggtgggcccacaaacgtataacccctttgataaacaatattgcacttcgggagcaaaccttgtttcgccaataaggtcccaacagttgtacacagatcaccaccttgggtcactctttcccgcacttggtacctccttacgcagaagtttaacactatttatcacacccggggtttttaacacgagaccctctaaatattctcacccattctt

SEQ ID NO: 558332 - DNA, 482 bp, Homo sapiens
ttttgaattttcagtttgatatcttgtccttattcattgttgtataaagcaactgtactttaatactacttgaaattaaagtacagttgtttatacaacaatgaataaggacaagtagtattaaaagtatttcacttcagtttggggggattattatcaatttataattttataaaagtattttaaagaataattgtaaattttccataaattacaacttcctgccatcttttattaaataataatcttgcttaaggcatatagacagacattattatgagtattccagtaaaaaaaatctacatcaacttgaccattctggctaaaaattaaaaagcacttttttatatctgtggttgtcatttgtttcaaagcatttctaaatttattgttcttaaaagtatgtctgcatgttctagcctttgacctaggtcatctatgaaccctctttgtgtctaataaacatatctgtaaaggcatat

SEQ ID NO: 558333 - DNA, 255 bp, Homo sapiens
aatcagtgtcatccaaggccgtaactatagactttagtagggataagtagcaacaattagaactacctcaaaaacgaactgtacagagaagtgtatgcttgaaaactatttcaacttgatctcagtggggatgtcaaggtcccaaaccagaagtcatctttcagcttggaacacagagagccatgtatgttggatgggtgagatacccagtcagagaccgtacacatgggggacaaatgtttttggagctcttac

SEQ ID NO: 558334 - DNA, 262 bp, Homo sapiens
ggtcgaccaaagccataggggaaaaaaaaaaaacatgaagacgttaaaaaaacaacaacaaaaaacacacacacaaataaaatgtctgctgtgggggccgttttttttttttttttgacagggtctcaccctgtcgcccaggctgggatgcagtggtgcaacctcagctcactgaaacctctgacccccgggctcaagcgattctcctgactccgcctcccaaaaataggtgggaaacaataaaaaagaaagtcgacgcggc

SEQ ID NO: 558335 - DNA, 86 bp, Homo sapiens
ggatttgctggtgcagtacaactaggcttaatagggacatggcgtctaaaatggatggcatacaatgcaaaattagcattcaattt

SEQ ID NO: 558336 - DNA, 302 bp, Homo sapiens
tctactacaaatacaaaaattagcagcggcgggtgcctgtaatcccagctactcaggaggctgaggcgggagaatcgcttgaacccgggaggcggaggatgcagtgagctgagcacgtaccattgcagtgcagcgtgagtgacagagtgagaatccttctaaaagcaaaaaaaggacatttcttcctccatttattgtggaacccctgtggaagcccttattagggtaccccctttgaatatttatacccgggaattgcaattctcaaagggttcaaaaacacatctttgagccaggttaac

SEQ ID NO: 558337 - DNA, 181 bp, Homo sapiens
tacctagcaggatccttaaaggcgagtcgggtattatacttgccatctccaaagcattagctctgaaggcataaccttttcttttttttttcttctgaaagagacagggtctctttgcatggctcaagctggagtgcagtagctatccacaggcatgatcatcaagcaccacagccccaaa

SEQ ID NO: 558338 - DNA, 141 bp, Homo sapiens
actaatccagcacatcccacagtcaaccaggctcaacgcacacaacagcgtcccgtgacagcaccaccacctacaggcctacagcacaggaacctacaaattcccacagacagccaagggctcaacgagaggcacacacgt

SEQ ID NO: 558339 - DNA, 419 bp, Homo sapiens
cgaaagagaaagaaagaaagaccttaaaactctaatacaatataatgggtttttaaataaaaaagaaaatagaaatcaccttttcctctagcccctcagttcagcattagtcaagctttttaacctactcttgaacgtatcaagagccttctttacttggcccaccctgggtagaactgggattctccccagttcctgaagtttccatggctctactctgtaacaaggaaaagggaaacatgcgtcctccgtccgctggagtttctccacaggtgagtcctttgctgccaaaggttgtacctgttctgccaccgccccctgctggtgactcttacaaggcgccctgtcttcactggcatccgagcaggttggaatttaagggaagtatctagatccacctagatggggcttggtgagga

SEQ ID NO: 558340 - DNA, 418 bp, Homo sapiens
  misc_feature (56)..(56): n is a, c, g, or t
catgagttcgagaccagtctgagtaacaataaaagactattctttcaaaccatccntcccacaaaacaaaacaaaacaaattgttaagatgctaaattttaagttatgtgtattttaccacaataaaaaaaaatgaggccgggtgcagtggctcatgcctgtaatcccagcaccttgggaggccgaggcgggtggaccacaaggtcaggagttcgagactggcctggtcaatatggtgaaaccctgtctctactaaaaatacaaaaaaactagccggacgtggtggctcacgcctatagtcccagctactcgggaggctaaggcaggagaatcacttgaacccaggaggctggggttgcagtgagccgagactgcaccactgcactccagcctggccaatagagggagactccgtctc

SEQ ID NO: 558341 - DNA, 218 bp, Homo sapiens
ggtgggccacttgaaggagcccgacgccggcgggtgatgctctctttcacccggccctcgctggtcaccttcacagagaaggggctgccaggcacgtgcgggtcggcaaacttgatgtggatgatgtagttgcctggctctgtggggcagtaggtgacccggcacgtcccgtcctccaggtcctcggggttgatgtccacccgtgaagggagcccaaa

SEQ ID NO: 558342 - DNA, 204 bp, Homo sapiens
gcgatggccggcccggctctcgtagatgattgatcctttgctgacatgatatccagccgtggaatgcagtactggagcatagtctcccactccagccagggtccctatttggcatttttgatgttgttctgatatctgctggctactttcttcatgtgctcccaacgctgaagtgaattgtgagactttggaagctttgttgaa

SEQ ID NO: 558343 - DNA, 738 bp, Homo sapiens
ctggctgggagtgatcgtcaataacaccgagagcatcctacatgtcctatgatcacgtggaactcacattgcaatgacatgaagtaacgtgccacgaatgccttctaagggaccaagaaaggcactgtctaccttaccccttaccgggtcatcttatcttgtaccaatgggcaagaggatgccatgcatgtccttcatttatgccacttttatctcatgaaacgactgtgagatcaacgcatgcccgtattttgcgtgcagaactacatcaactgggaacagtgaaggcggaagcgggaggtggctgggcaagggctctgcttcctagcaatgcttgacctttcaccggcagggtggtcgccagttgtatgcttcgtgaccatgcgtgctgctccatgcgtggcagtctcagatgccttccatgacggttgatagtccccagtgtgacgcctactggtgtaactcttatcattgctcctagtcgggcgcgctatgtctattcgccccgcccacggtcgcccctggtgcttgtgcccctggccttcctgggtcgaacccctgttcaaccgctccgcctaacctgtagttgcctagtcccagagattcggccctatgttgccagcgggctcatccgggagacggagtcaggcggcgaacaatggcgctatcctgttgggcctgggtgccccggtctgagtgccccatgtgctctccctccggatgcgtcccagtgggaag

SEQ ID NO: 558344 - DNA, 257 bp, Homo sapiens
cttagaggacaagagggggaccaggcgtacagtggcacagcagccaccagccccctgctgcctgtacttgtatctccctttccccaggcctgtgcttgaacctgaggcactgcacagccccacactcatgacacactggatcctgtaacccacaccctatagcttaacaatgtttatccaatcaataatcaatcttattttttggtaaacaaatgagagtttctgacaaacaacttggtatcagcccaccctctttc

SEQ ID NO: 558345 - DNA, 540 bp, Homo sapiens
tgccccgttcatagaggacccggtgtttatcgatagcattcactgctcgtcatctatccagacaggaccctacctcctgcggaaccaccaccgagttcctcatttcaatgcccttttctatatctataagtacttatatatatatttttttaactactgtcacccacggttgaatatgcagtggcagggatctcacactccgccgtcccaggctccacgtgattctccctgcctacagcctccgcgatgtacctggagactaccaggcatgtgccagacacacccatgctaattatataatcatttacgtggagacggggtttcaccactgtaggccaggctggtcttcaactcctgacctcaggtgatcctcccgcctcggactcccaaagtgctgggattacaggcgtgagccaccatgcctgggctcccagttggtaaaaatctatcacattctctgtgaggtataacttatatgcaaacccgcacatacttcaaagtataccactagataactttttacatatatacacatgcctg

SEQ ID NO: 558346 - DNA, 451 bp, Homo sapiens
aatcatgctgtgtgggatcgatattattcaaaaccaaaaccaccgaaaaaaatccatagcaatatcggtatcaatgatatcgacatattgcatcagtactcatgcatcaattcatcaactagtagttcgagctaacactatacagaagtatatgctgattgtctactatattgccgatttccagtcaggggttgatgcatctgtgatttgaatagtggagggacatcctgcaaccacttgcccctcatgactactgatgggtccatgatcaactgcgcaaccctttcaaatctgttggtcaggagatcgcagtgtggagctattgagcaaggactcaatctgatgttaaaggtacgtcctgtgatgtcttggtctaaatgctgagagcaaataattttatctaccctatagaaatatatcctatgctccttttctccctgtgtaccagtat

SEQ ID NO: 558347 - DNA, 639 bp, Homo sapiens
  misc_feature (416)..(416): n is a, c, g, or t
gggagatcttcaaagggattcatgaggcctgttcctgtgagaggggtccacttcactccacccccgtcccctttggaggggcctgtttcttgtgccttgtgttcagaactgtggacggtgcaggatggcggcctcgtgactctatcagacagccctagcctcctgtccagaatgataatctgcggggtgtttttccggtcgccattagcccacgtcacacacaccgtccgcgtctcatgtgcgtatggaccctgagtcaacggacagtggcagcaagttactgcaaatgcctcctggatctctggggtttgtggccaatgtagccagtacagagcctcaggagaacgtatgaccacgcgtcatttgctggagttatgacatggtccgagccagcctcgcaggttcattcggtgccntgtgttgcaactgcttcttgactgtccaggactgccagaacaggatagtacggggaagcacggaccgttggcccctttgagttgaccaagcacctttatagcctatatctaaccccatcgccgagtggtgactctcctgactctaacgggcacgtccacacccccaccttccttttcccccataggcgccgcgtgcccagtgggatgttggcccttttggttg

SEQ ID NO: 558348 - DNA, 187 bp, Homo sapiens
gtatacataggcatctcttttcttctcttctctgttactctctttctctttctctctttctttctttctcagagtctgactctgtcgcccacgctagagtgcagtcgcatgatctcagctcactgcaactgggttcaagcgattctcctgcctcagcctcctgagtagctgggattacagggatgca

SEQ ID NO: 558349 - DNA, 1265 bp, Homo sapiens
tccctgccggggctggttcctccctgtgtgttacctcgctgattgcttgtgttgcgcctgtggtgtgttgttatcccaactcgtgggttggtgtcgaatcgtgttggggtcgttttgttgtgcagtccctcgggtgcgtctcgttgttttgggttggtggtgatgtttttcccctctgtatattctggggtcttctcgttgaaggtttggctgtgtgtggttgtctctacaaagtggtgtgctccatttctgatgtgtcgtcacccttattttggtgtggtctgagggcacccgctgtgtctttttttctcctctgtggctcctccacatagggggtgtgtctgtgcccactgtagttgttgtgttgtatggttagtagctgcgccaccctgtgtgtgtccctcctactgggggtgggtgtgtgttgtctagtgcaggcagtggctctgtctgttgttccctggtatgtgcacttgtctgctcgttcagtaggttgtatcggcattgacagagcagtctgctttctcgtttggatgtaggggctgttcttctgtctctcttgctggtaggtgtgtattcctcctctctcttcttcggtgtgtggtggtcggcacctcggcacgttcatgatggttgtggtgggcggcacatcagatgtgggtgggttgtgtagtcttcttataatatggagtcctggccttatcacttcagtgggagtcacgagactgttcgtgattgaatatttgcctcgctgagccgcccaacaaactgtgtgttgaccgacacagatagcactccctgggtggggatagatacacccactcttgtagagaggggagtacccacggtgctgtgtcgcaaataatagattttgtctccgcgcgcatgagtcgcgcactcctcacgagtgtatcgcaccctttgtctacaaagtggggtgatctcctctggatgaacaatcttcttctagaagagagtaaatatccctcgctgcggttggtcgtgtccgccgaggtatctatagaagtttgggagaactggtttcgataagcccctcgtctcttgccctctatgtaaaagtgaatgtatatgtcggcaccacccgctattgtggtcctcatatacaccaccctctgctggtaattaatgctgttttagatttgggggtgagaaacaaggatttgttttattcccccttttttcccctttgggagccaaagacaccccacattttttttaaaaaaagggtgattttggtacaccca

SEQ ID NO: 558350 - DNA, 1295 bp, Homo sapiens
agcgggcgggtccgcgcgcggcttctcaaacatggcggcggctggtgtgaagctcggtgccggctcgcgcgatcgggtgggacagaattcctcgctctgtcttgtcaccgacgagactgtgaggaaacaatcaccacacagtagggactaccattgggacaaacagtgaaactgactgattccattggcagtgtcaacgcacacgagcaaactcaaccagaaaactccttacgctcaacgctacactctctctgctaccacaatgcggactgacttctccatcgtgcgcgagggatgctactttcgaacacgggagcactgcgtgtctagtacacggctgactcctctcacgcagtgcttatccgctcacgctctcacggattcgcaccatgttgcaactgactttcaacacgctctgcgttactggcacaaccttgcgcaattgcgccgatgacccctcgtccacattgcgcgacttcacctcactgttgattggcctacgcgtctactctggcaactctaccctgtggcggccaggggttctaccgcgctctacggacgtggaactggctagctgacacacaggcacacactgactctcctgcggagggcgtcgctccgaattcccgcagcaacataccaaccctgcgccgcgcccaccatgcttgcacaccacagcgcaacgcgcatgcaccttaacttttcaaactccttcccaactaaccgccctcaccaagcactgccacattaccacttcctcccctgccccgcacttctttccctcctctcaacagcaccccttaaattgccgctcctgccactcctgtgccaactcctgttgcaaccgaatctactcttcaccgacccgtgcaaccctcctccaatgaggtccccctcgatcttaacacgtcacattttcctacaacgctgcgcgcgcactgcacaccccctgggcaaaggcctactttgcaccaatcaccagcaagcgcccgttgatcgtcaattcctggtccccctgccgtaaccccacttctgcggacgcgacctgtcttccacacccggcgcgcctggacacgccttcccttactcccgctcgttcttgcactcgggccctgctgcagcttgggagccgccgctgccttcgtcctcttcccctggtcgctgcgcctctcggttactgagcatttccccgcaggacagttatttcttcctccagccgcgtggggtttggctggtctcgcccctggacccagcgcgcgattgtctctattacaagcccccccagggacctacgc

SEQ ID NO: 558351 - DNA, 136 bp, Homo sapiens
cgcttcgcggcgcgacatgaggcagacggtggccgtatgcggtcatcaagaacgtggagaagaagagcgcgcggcgccggtctaggtcaccatgtcggcgcaggaacgcgcggaacgcgggcgcattctgtgaggc

SEQ ID NO: 558352 - DNA, 325 bp, Homo sapiens
acatgtggctatttaaatgcaagtgaactaaaattataaaattagaaattgagagctgggcacagtgctcatgcctgttatctcagcactttgggaaccaaggcaggaggagcactttgagcccgggagtgtgaaaccagcctgggaaacacagtgaggcctggtatctaccaaaaaaaaaaaaaaaaaaaaaaaaaaaaaaaaaagaattagctgggtgtgatggtgcatgcctgtaatcccagctacttggatggctgaggcacaagaattgcttgaacctggaaggtagaggttgcagtgagcaaagatcatgccactgaac

SEQ ID NO: 558353 - DNA, 312 bp, Homo sapiens
gtatggtggtactggcgcagcaacttctctcgtccctggagagaggccacaatgtggcgtgacagattgtcgtaacggactggtgagggctctcgtgtgtgtatgggccatgttggcaccaaagcgtgggtgcctctcatgcttccctgttgctgggccagccttggttgacatggaagggagaggtatagcctaaaggtgggtctggctcaggccctgcttgcagtgactcaaaatcagggctgtctgaaggtgtgagcaagctgtcataagataggctcccattgcgtgtctcgagtcgtgggcacgaca

SEQ ID NO: 558354 - DNA, 759 bp, Homo sapiens
gttggttgtaagttgaagatttagcgttatgactttgaggtctggggttgtgtatttgtaaacttgctagtggctatatttgcaagggcaaatgtatttctttattaaagtaaagtacaataattggtgaagtgtacgcaataatggacagtcatcttaactcgtagtgagtagatctgcattatggaatctagtagtttaataggttttaatatttattgagatattcatatgttgatcatagatcaaacttgttgctagtttatacagatagagtgtagaagtgctgcatggaatatctttgagggtaggtgggaatacttctgtagtgaaatcggggaaccttgtttcagctgggttcttagatattgatggccagttcggagagtatgatttccgacaggtatcagtaggtgcacttagcacagtacttagcttactgacaatgtcagttctaatagtgactgattcgcattctgaacagcaagtgattttaggcatcatttcttaacatatatcaagcgaagtcctgttcacacgatctaacatgaggacatggacgacctcgagtgattaccagcatatatgttctgaccttgagcggatcgcttagctgttctcatagactataacgcaatatgtaccagagaattgaagatggtgatgaggacaggtgagatatatgtatatatatgtataaatgtgctagcatatactctgtgatagggtagaaatatccttagtcattgggaaaaagta

SEQ ID NO: 558355 - DNA, 230 bp, Homo sapiens
cagtcagtcatagcgaacagagttgtagatatggcagtgcagtgccgtgtgatctgtgtgccccagcagctcccaccaccatactgatctggccgtcctggtcgacgatgatcgtcgggcacatgacgagagcggctgctccctggctggatgagacttgcaggtgaggggggtaccccaaactcgattggtgatgctgagagagctgaagtcgtccatctcattattga

SEQ ID NO: 558356 - DNA, 618 bp, Homo sapiens
  misc_feature (536)..(536): n is a, c, g, or t
ggaaatttagaccagctgtttgttaatcttaactttagccaagacaaacaccaattcagttacttacctagggatgggtctcaggctgaggactgctctctaccaacctagaagcaggaaaaagtaaactgatcttccctgttggatgcgcgctcaaattccataaaggagttatttgtcttacatcgtcatggaggcaggaaaaacttgccttccttgtgttggaagcaagtaaaactccaaaaaaaaaagatcagggactttctggagggcgtgctctcagacctcagcaaattgtcctattggtttgagacataaagttagctcatgctggtaccaggcaccgataggagatttgtcaaaggcaggggcatctctactcagaatccctttgtggttaccaaaatgtgaacgctgtttgagacaggtctcagttaatttagaccatttattttgccaaggttaaggatgcatgcctgtgacacagcctcaggaagtcctgacaacatgttcccaaggtggtcagggcacagctngggtttatacattttagggagacatgagacatcaatcaatatatgtaagatggacaatggttccatccagggcagggcctct

SEQ ID NO: 558357 - DNA, 3291 bp, Homo sapiens
cgcccgggcaggttgagaagccaggggccaagatggatcttctcctcgacatcagctaagcctggaggactcttcccctcagagaccatggagagggacagccacgggaatgcatctccagcaagaacaccttcagctggagcatctccagcccaggcatctccagctgggacacctccaggccgggcatctccagcccaggcatctccagcccaggcatctccagctgggacacctccgggccgggcatctccagcccaggcatctccagctggtacacctccaggccgggcatctccaggccgggcatctccagcccaggcatctccagcccaggcatctccagcccaggcatctccagcccgggcatctccggctctggcatcactttccaggtcctcatccggcaggtcatcatccgccaggtcagcctcggtgacaacctccccaaccagagtgtaccttgttagagcaacaccagtgggggctgtacccatccgatcatctcctgccaggtcagcaccagcaaccagggccaccagggagagcccagtccagttctggcagggccacacagggatcaggtacaaggagcagagggagagctgtcccaagcacgctgttcgctgtgacggggtggtggactgcaagctgaagagtgacgagctgggctgcgtgaggtttgactgggacaagtctctgcttaaaatctactctgggtcctcccatcagtggcttcccatctgtagcagcaactggaatgactcctactcagagaagacctgccagcagctgggtttcgagagtgctcaccggacaaccgaggttgcccacagggattttgccaacagcttctcaatcttgagatacaactccaccatccaggaaagcctccacaggtctgaatgcccttcccagcggtatatctccctccagtgttcccactgcggactgagggccatgaccgggcggatcgtgggaggggcgctggcctcggatagcaagtggccttggcaagtgagtctgcacttcggcaccacccacatctgtggaggcacgctcattgacgcccagtgggtgctcactgccgcccactgcttcttcgtgacccgggagaaggtcctggagggctggaaggtgtacgcgggcaccagcaacctgcaccagttgcctgaggcagcctccattgccgagatcatcatcaacagcaattacaccgatgaggaggacgactatgacatcgccctcatgcggctgtccaagcccctgaccctgtccgctcacatccaccctgcttgcctccccatgcatggacagacctttagcctcaatgagacctgctggatcacaggctttggcaagaccagggagacagatgacaagacatcccccttcctccgggaggtgcaggtcaatctcatcgacttcaagaaatgcaatgactacttggtctatgacagttaccttaccccaaggatgatgtgtgctggggaccttcgtgggggcagagactcctgccagggagacagcggggggcctcttgtctgtgagcagaacaaccgctggtacctggcaggtgtcaccagctggggcacaggctgtggccagagaaacaaacctggtgtgtacaccaaagtgacagaagttcttccctggatttacagcaagatggagagcgaggtgcgattcagaaaatcctaaccagctggcctgctgctctgcacagcaccggctgctgtgaagactctggccatggtgactggccatgtgtggcatcatctgggctaatggccaccgggcaccatcagactcccacctccactgtctgctgcctctgtgtgtgtgtgtgtgtgtgtgtgtgtgcatatgtgtgcattgccactctcccaagtttttcagaaaccagcagagctgtcaactcttctcaaaatcccaggctggaaattacctggagacaagagttgagtaccgtggatgttcctacaggagtgtccatagatggatggaggaggtggagcccagagcccaaggaagagctgggaattcttgcttctctgaccctcacttacagactagcccagtgtgggcagatgccagcggcccaggtggcgccattgctgtcctgggatggatcgtgggttttggtggatgcagcttcccagggcctggaccgtcttcggtgaaaagctgctcccgttggctttatgagcatcaagtcctcacccagaccccctgctggtgccgtggatgtcaccagtcggactgtgctgtggctaaccaggctgacaactgagatgaggattcactgtactcatttggtcacaagctgctggggcgggttttattttattttatttttatatttaagaaatgaaaatacgggtatttttaaagattctccaaaaagtccagaagccttgagagctggcatcaatcagcccaagacccccaggggattcatgggaaatgtcgtattttagagtcctacagaatatttctggcctcaaggaactggatgaagagactggacaaagtccccaggatgggcatcccccaagtcactacagcatctggagcccctaggagatactcagggaagcaaatccttgtttgggctggcaagcaaatccgacacgacgaggtccacaaactgtttctgcatcccagggctctgacgaaggcgttaagaaacagatgctgttcccgcgtaggctcccaggggccccagggaggtccaggtggactgcctctctcattcccaggagctgtcctgggactttgggatttcttctcagctttctccacctttcagtttctcagttgtttcagaaacatagcaatgacataaaaactgctatggagagaaagctaacatggtcccatgccttccaggcagccctgctgaaggatctaagttggccctgttcctgcaaatcatcaacgtgcctggactcgccagctaaaagcctgggccttccccagccttttttctggggcacctattcctctgccagtcctgctcccctcaccttccttgggcccgtcagagtcttttgtggtgctgtgcttctcagaggcaggatccaagcagatcagcccagcctagcccagctcaggcaggccatggccgctcaagggaaagactgccccagaagagcaagctggagaggctgggcaggggctgatggggctgggtacactggggaatgttagcaagactgggaaggaggccacattcctgtctgcagcagcccccagcgatggtcttcagcaataaaagttgtgtgacct

SEQ ID NO: 558358 - DNA, 182 bp, Homo sapiens
  misc_feature (97)..(97): n is a, c, g, or t
gaattctcccaaggatgagaaattgcggagaaaagataaatgttctataaatagggtgggacaaggggtagcagttggaaaaaaaagatgggagctnattattccattctcacactgctataaagatactacctgaaatggggtaatgtataaacaaaagaggtttaattgacttacagttc

SEQ ID NO: 558359 - DNA, 906 bp, Homo sapiens
ggcagtacggcggtcccgagtgtctgtctcttgcttcaacagtgtctgcgacggaacagatccggggcactcgctgtaccagactcacagagctgtccatccgcatatctcgtacgtccgcgttgtaaacatccgggtgcaccatcttcgtcggcgatgctcctggctttcttgggacctcgcgagcaccaggactgtatggataggctcctttcttgctaaaaacccaaaccccatgaaggctacccctgagataacggtcagaaatttaatgtccagccgcaacgttgaatggtcacgcccggtcacatcaacgcctgggggcgaattgcagttacactaggcatgaggaattcacgtacacactaacatacttctctggggactctctgatttgcgaaacggcgattggaatgtgggagctgctgggaaagaggcaggtggagggagagtttcgtttacccgggagcaaagttgagcccgatgggaagaaaggtgggtaaggggttttaagaaggagattcaccttgaaagtaatgggttaaaattaggagttagagtggatcagagtggaatacgttatatagtgagcatcatagaaaagggcatgagtagaaagaactgcagttggcggttcaaatatgagcctcaataacgcccgatggtacaggtgggctcaataggcgcgcttgggacgaaacaaaggcttgaaaggtcagtgcaccccataagtgagacgttctgtaaggggaacctagggcgattactgggacctgcaatgtgaagctcgacactgcctacttgcagaacattactctgtaagtatgctgaggttacggaaaactaaatcgcacagtagaaagcttacattcatgaaaaaaatgcgggtgtaaaaaccaatggtga

SEQ ID NO: 558360 - DNA, 646 bp, Homo sapiens
ccccgggctgcaggattcggcacgagcaccaatgtaagtctgccttatgttcctacagccaattgcaaaggttctcaaaagtctatggtcctgtgttcaccgtgtattttggcatgaattccatagaggtgtttcatggatatgaggcagtgaacgaagccctgattgatgatggagagtaggtctttggaagaggcatttacccaatatctcaaagaattactaatggacttggtaggtgcacatatatctgtgtcagctttggtaactggagtgagggcgatggaaaacagagccctaaaaagctagtcatcagatcttatcctatctgcatggatgccgagtgttgcatcactttctaccttggctgtgaatatctcccagattctgcccctgaattttattaggaatgatttccagcaatggacagagatggaaggagatccggcgtttctccctcacaaccttgcggaattttgggatggggaagaggagcattgaggaccgttttcaagaggaagctcactgccttgtgcgggagttgcgaaaaaccaaggtaacgatctgattattaagatcagaattttctcaccctgatggattcaatgtactcattgattgatatccaggaacttaccgtgcttat

SEQ ID NO: 558361 - DNA, 559 bp, Homo sapiens
cacgagggggatgtcatccctaaacattacgacagcgctcgaaatctttcgttggagaatagcccagaaggcctcatcgcgcattgggtggcggtctcttagcacctcaagaatggtgaagtctttggtggtcagttggcagctatcggtagtggacatgaaatgtctccagccggaccagtgaaaggcgatccggcaacaagaattgatcgggtggtatggaaagatcccctgcgccggaccggcccggcccaggggtcagactcccgcgatcagactgcctgcgtgattgaggagacggacggagacgcccatgtctagaggctcgccgcgaccgctggagtggcaggcgccaggcggccggagctattgtcttgcggggcgggatggctcacgccaagcaccaacagttcgtgcctgcgcccgtctcgggcggtccacatgatcgactgtccagccgagaggccgatcagggcggtgccgatcggggtcaggattgaaaccttgcctgcagaaatgtcggcttcacctggataaaccagcgtgaccgttttgcgat

SEQ ID NO: 558362 - DNA, 220 bp, Homo sapiens
agactcttaccgcaggtcttattatgggcgtcttagtgacgcattctctgacagacacgggaaagtgtcattattttgctgttttaactgatcattttttagacaagcggtaaatggtcaatttaatgaccattgctcgataaatgcatgcgaacgctcagcgctcggcataacgcactcacatcctgggagccgccgctgttcaacgcagagtctcacg

SEQ ID NO: 558363 - DNA, 350 bp, Homo sapiens
acgccgctggaggtacgatcctggtcggcactgtcgaaggcaaggcgcacgacctgttggggcgctgccaggcgtttccggaggaggcggccggcgcgttcaagcgagaggtggaggacagcatcaggagcctgtgccgcccaccgccgcgcgtggacgtgatcccgctcgtcgtcgacgcaggcttcgtcgtcgccatcaacgtccatccgtacccggggcaactcgtcggcctgcaggtgaaggccgcagcgaccagcagccaggggtacgcgggagacgctttcgtgtttcctcgccgtctcggcagccagtgcgagtacattccagctgacatcgtccccctgttc

SEQ ID NO: 558364 - DNA, 397 bp, Homo sapiens
  misc_feature (303)..(303): n is a, c, g, or t
cactctggaccctggctgccaccactatgaaaactcattactttctcctggtgatgatatgttttcttttctcccagatggagccaggtgttggcattctcacaagtcttggacgaagaacagatcaatacaaatgccttcaacatggaggattctgtctccgctccagctgcccatctaataccaaactacagggaacctgtaaaccagataagcccaactgttgtaagagctgacagtagtttgaagaatgagcataaaggacgagcgatggattgtaaaattagtgttttaataaatgangtgtttttgaagtttatttacatcatatcagaataaattttatttctctgtttagaagagcaatttttttttaaaaaagtattgggcttaggaa

SEQ ID NO: 558365 - DNA, 175 bp, Homo sapiens
  misc_feature (131)..(131): n is a, c, g, or t
  misc_feature (168)..(168): n is a, c, g, or t
  misc_feature (175)..(175): n is a, c, g, or t
catcttgtactatccatgtgacactgagcaggttacttagcctctctgtgcttcagtttcctcctctgtaaaattgagataatggtaccatcatcacagggttattgtgaggaagaaatgtattaatacanggaacacaatacggggctggataaatagttagctcanagttcan

SEQ ID NO: 558366 - DNA, 160 bp, Homo sapiens
atccttccctctctacgatccttcctccggtgtaacaaaattccctgctggggattcaaaaggacagccgatcactaaatgtcagtgtggcatcatcaagaagacttgaagcagatgtaattttaactgaaccttgattagcaaatacgtgctgtttcac

SEQ ID NO: 558367 - DNA, 1031 bp, Homo sapiens
aaggcatagtggccgggttaatcggcgagggaggcagtcagtacttgagccggtggtcctccctcgctgcagtggtggctctgcggcgtggagtaaacactgcctttgttccctagcgcctcgtctttcgtcgccccgtgccctcacgccgccgggctctggccggccgccctcggtccttgaaccccatttcggctcgtgccgtgcggatgcagctgccgggcctgggtttgggcattgagcgggaggaggaggaggagcggctggctgcctgggctggcatgcgatggggaactgctgctggacgcagttgcttcggactgttcgcaaggaagcggggctggtgcagcgagtaggcggcggggaggatccaagtattttagaacatgctcaagaggtgagcacttaacaatagagttttgagaatctagtagaaagtgatgaagggtgagagcccaggaagcagtcataggcctcttactgaggaagaaattgttgacctaaagagaaaggcataatgattccatatgcgaaaaaaaaaaagatcttgataagaaaagttcaaaaagagcacgaaaggagagaattgtgcagaatatcatccttccaacaaggagaatatcaaagttcaggacagaagatgacttcgaatcttgttgagaaatatgaagtcaagatgaagtaacgaagaaatagactctcatcagatgctacagttttgacaacaatacagaaagcagttgggattaaatgaccaaaataaatcatagtggaatgacgaagggacatcttagatctagagtggaagatgaaaaggattgatagatgttccatggaaagttccaaagagaagaattagggagggttagatagaaagagaatggagaaactaatagatggagcaagtgcgatggaagattgaggcaaggaaaggaaggattgagtagaagaaaaggagtgaaaaaacaaaaagagatggagacaaaaaacacaaagaggagggaagaaataaacggaaaacaacagtaata

SEQ ID NO: 558368 - DNA, 86 bp, Homo sapiens
agcttctaacgatgtacggggacatgtttggtctttttttgttttggtttgtcaccctcgataaattaagtatattcatccaaaaa

SEQ ID NO: 558369 - DNA, 763 bp, Homo sapiens
ggacgcgtgggtggacgatatcgctgggaattccggaggggaccagctgcgtgtttgtaaacggttgtattgtatgtgtagctacatgtggggacccgggttgtagcgatgttcgagaaccgcgcatataggagttttcctatagaaaatcgtccttgaggagatcatggtgtccaggttgtggttcttccgttttgttcatttaacacttgtctcccctcatacaccaaaagtacgatatgaagccttcagtttaatctctgcagttcatctcatttcaaatgtttatggaagaagcacttcattgaaagtagtgctgtaaatattctgccataggaatacgtgtcgtacatgctttctcgattcaagaattcgtcatcacgcagtcacaggccgcgtctttgacggtgggtgtcccatatttaatccgctactctttattatcatggagtcgtatcaacgctatgaacgcaaggctgtgatatggaaccagaagggctgtctgaacttttgaaaccttgtgtgggatatgatggtggtgccgagcgcatgaaaggctagtatgaggcgagaaaaggctgagagcgctgtgcagagacttggtggtgcatagtggatattagtaaacttgcggagatgtgtctctcaatactgtggctttggtgagagagtgtgctgagagcatgatagcaaataatgtagaatgttttgcattcaaagacatccgattgtaggagacttaagtgaggttagttctaatacc

SEQ ID NO: 558370 - DNA, 189 bp, Homo sapiens
  misc_feature (8)..(8): n is a, c, g, or t
aggagtantcacagacaactgcagaatgtggaacactgagcaggacagctgacctgtctccttcacatagtccatgtcaccacaaatcacacaacagaaaggagaggagatattttgggttcaaaaaaagtaacaaagataatgtacgctgcatttacttttggttcattttgcagccccacactatta

SEQ ID NO: 558371 - DNA, 1402 bp, Homo sapiens
  misc_feature (37)..(37): n is a, c, g, or t
  misc_feature (1067)..(1067): n is a, c, g, or t
gctgagtctacaccatgatgtgtaggctagacatatntaaggctccgtacccattgggcatggtgtcatggtcgaccggcaggtagatgaacgtggttgatccattattcctaagaagatgattggtatgatgtgaaacgcacctgctatgttcaatataagaaatattgtgacatacgacgtctgcgtcaccaggagccctaaggaaccgaaaattgcatacatgaatggatctacaacggcgctccgtgtggtttcgacaagctgaggtcttgactagagtctatgccacgacagtgaccttgacactgttcgcactattacgacccaaactctcaacgctcgaatctaacatcgaacgaactgtgtcaagaggataaacaatacctggtccattgatcgtacaccattacgcacttgagcccatgtgcacctcgtactagcgcctgagtgtaccagacacacgagttggtgttcgcactgagctccaaaaaagaaaattggccaagaccacacattgcactcatagacaggctaccaaccgtaggagttgttcagaccgtaccggttaaggccgaaagtgggcttatcaacgtgtgcagctaatacgcatacttgggtgtgcctagaatgcttagacgatctatctaaccttctaactcagacacgcagacaaaagccaaattccaagtaattcactgagcgcacaggcaccccttctttgttactaggagcttccaagatcaacccataagcaagagattgcccgaacccgaaaccactacccccggcgcacaatccgccactgcactcggactagtgacacacatttcacattcaggaaccgcccccggacagacaccgcgttcgccacctgaacgcatcacttgtggaaccgtttttgcgacaacgacggcacagcgctcggcagttaccctaatttacaatacaactctcttggactttcacgccatcggtaaacaacggcccctgtattggggcgatataataggcacgcttaattgaaagacaactgcgggcattagaccccaacattccctcactgnctaatttccccttgcctaacccgagtgcgacttgagtagctaagacagcatgtgccgtaaggccaacgttcacaactagcaattcggcttcgctacatcgaatacggcacccgcgaaacgagttcttagcgcaacttctgggaggagacaagagcgcctttccccttcggcgacagccactatagcaaataggacctatggcagacgagcgcaagtgacaatgctagtcctcccgagacacaaacacggtgccacacgtcggttcagaaccgcaacgacatcgggtgcgtcctcaccccgctgtggactacgacacgctcggcatagacgcaata

SEQ ID NO: 558372 - DNA, 495 bp, Homo sapiens
gtgcaatgtagctctaggcctccaactccattctgatggacaggtgtccccatggcaacgctgttaaatatttcgaataatatcttagatgtaactgccacttgttttaacctctctcttgatatataacagatgcttgttataggtctagcactgtgctaagtcgtgtatgatacattagcatacatttcaaagtcaagctaactaagttctaagtgggtctgacaaatacagtactcggtaggctgtaattagcatgaacgagaagcatgaactgactgaggtttacgatgactaaagtttagttgggaggcgagaaagcatagcgacacacccactgtgatagggagctgtcccaagagggctatggtgagccaaccctatgactgctgtctactggtaagagagtagctggcatgaagtgtcttatcgaggctcttggtacccatcattgcctgtacttcgcagccatatgtgcatatgcccgactgtcat

SEQ ID NO: 558373 - DNA, 781 bp, Homo sapiens
ggttgctctacatggccgttcctgatgctggtggaccctctgatccgaaagccggatgcatacactgagcaagctgcacaatgaggaggagaatgaggatgctcgcgtctatggcagcagctgctgcatccctcggtgggaccccgatgcaaacacagtcctggagcgtgtggaaggtgcccatgcagcggtggaagctgcaggtgcaggagcagtcggaagacatgtcttcgatcggcacaagatgctctagctagatgggctggtgtggttgggtcaacggccccaacaccatgtgctgccagcttccaggtctgtgacatcatgctagggggctagcttctcccttccctcggttccagtcttccctttaaggagcctgtggcagtttttcctccgttctcccgtaatgtttagaaaatgttgtagcttgggtactggttgattagggaagagggatgtggtctctgatcgtccgattgatcgtatcttgaggtactacgggagttgaaagggagggggaaaggcgaggccagaatgggaatgggagaccattgcgacggcggccttctggagtgtgatgcgagctcgtctctcctggttccaagtcttgccgccttccatgctctgagtctttgggacatgtagtaaagcctatgggacgtagtaaacgctggggtcttcagcgaactcatgtgttctggggcagggaaaggccatggcccagacattcagcgatgtgtacctttcctgcagtggtactttatcaccagctccctca

SEQ ID NO: 558374 - DNA, 1229 bp, Homo sapiens
aaaataagtaaatgaagagagtaagattcttaagaacggctcagaaagatggatttttgcatgagacgcttctggtacaggccgaagctggactgtactgactgccatctcgggctcactgcaacctccctgcctgattctcctgcctcagcctgccgagtgcctgccattgcaggcacactggccaccacgcctgactggtcttcgtatttttttggtggcgacggggtttctgctgtgttggccgggctggtctccagctcctaaccgcgagtgatctgccagcctcggcctccggaggtgccgggattgcagacggtgtctggttcactcagtgctcaatggtgcccaggctggagtgcagtggcgtgatctcggctcgctacaacctccacctcccagccacctgccttggctcccaaagtgctgagagtgcagcctctgcccggacggcaacccgtctgggacgtgaggagcgtctctgactggctgcccatcgcctgggacgtgacggagtaccctctgcctggatgcccagtctggcaagtgaggaccgtatctgaccggacggcaatcccatctaggaagtgaggagcgaacaacaggccggacgcccagtcaaatgagatgagacgcacagccaagagcccaaagaacacgctgggaacgcgaggaaacgacacaagaacaaaacgagaacaagaaaggcacaggtcaaggacaacgccactggccaagaataccagaaccgacagagactagagagaaccacataggagagaacagaccgaacagacaggagagaaacacaaaaacaccccagcaacagagaccacaaacgagaacgaaacgagaagaacacacctcccacgcacgaaacaccaacagaaacaacgaagcaaaaacaagagagaccgcccgccaacgaacccatcccgttacgaaagaagaggcagacgacacacaagaggctcgagcgggcgacgccaaagtgcaagagaggggacgaagttcccacagaaactgctgagacgcaccgcagccaagtgtgaacgtcagaaaacacagcaagtacaaaaacactacaggccgagaaccaagaggcacagcacaagcagatccgggatgacagcgacgtaagacaagcagagcatctagcgcaaaaggagaggaaggagcacacaagcaaaacagcaatgatagagattaggacacagtaacagagtaac

SEQ ID NO: 558375 - DNA, 294 bp, Homo sapiens
aatgctttgatcgcgtagtccgttatcacacaggacaacagttattactaggaacatctcattaacgcgcaggaaatgaactccgtctgaacaatcctgcacgccatcatcctattcctcatcgccctcccatccctacgtatcctttacatcacagacgaggtcaatgatccctcccttaccatcaaatcaatggagcaccaatggtacgtggaacctacgagtacaccgaaaacggtggactaatctacaactcctacatacttcccccattattacctagaaccaggagga

SEQ ID NO: 558376 - DNA, 325 bp, Homo sapiens
gtcaggcagcactgcatctcttcatcactcagtcatccttccatccatttttcattgccacaatcaactcctcggcatcctcgctccatccatttcacaccaacccacccaactcatctcataacactcagcccatggcccatcccccttcatgcagcgggcgccagtgcattcatcaggctttccgctctcacagcattccccacatgcctcagccccacttcttcaccaccacaggccacacctcacaaccccttcataccccatcactcagttcattcatccgacaacccatccagagctcactccattccaacccaatcag

SEQ ID NO: 558377 - DNA, 489 bp, Homo sapiens
  misc_feature (123)..(123): n is a, c, g, or t
  misc_feature (134)..(134): n is a, c, g, or t
  misc_feature (201)..(201): n is a, c, g, or t
  misc_feature (204)..(204): n is a, c, g, or t
  misc_feature (282)..(282): n is a, c, g, or t
  misc_feature (390)..(390): n is a, c, g, or t
  misc_feature (400)..(400): n is a, c, g, or t
  misc_feature (408)..(408): n is a, c, g, or t
  misc_feature (437)..(437): n is a, c, g, or t
cctttttgtccagccctgggcttccccaaaacttgggttagggtgagattccgcctacacacgattctggccctccacctgcctccaggccccgaaatgggaattccagcattaagccaggcnccgggcaaaanttgggccttccccctcccttggatggggtcaaaaggccaggcctggcacattttgaagtgttttggntanaagttttcacctacacccacgcacccccccacccattatgttttttcaaaaatgtaatttattggggcccccccaagntgttttcctcacctgcccctgccctaccttacacccccagcttgatttttttccagtccacgtgtgtatataataatatttatatttttgcccaggtttgggtattgntcctgcccanaccctganatccctttcccctgtgtgtgtgaccatgntgggggagggggactttgcttggaattaaaaggttgcattgggtccctaaca

SEQ ID NO: 558378 - DNA, 391 bp, Homo sapiens
  misc_feature (53)..(53): n is a, c, g, or t
  misc_feature (93)..(93): n is a, c, g, or t
tgcattccattccattcctttccattccattacaattccattccgtaacattnccattccattacattcggattgattctattcaactccccntactctccattacattccattgcactcgggttgattccattccattccattccattccattccggatgattccaatccattgcgttccgttccattacattcccctgcactcgcgttgattccattccattccattccattccattccattccattacattacaattcgttccattccattctattccgtaccattccattccattccataccattccattccattccattccattccgttccattccgttccattgtcgacgcggccgcgaatttagtagtagtagtaggcggccgc

SEQ ID NO: 558379 - DNA, 316 bp, Homo sapiens
atgcagttaatcagacctcagacgataagggtgacgattaggacagaagtaaatgagactagaagtgagcatacatggcaataggattggcatggaggtaggactgtcatgagatcgatgagtgatgcaatgggcttgaggaaggggcctggcaaaatgatgagtgatggaataggactgaggaagaggcacgggcaaaatgatgagtgtaggtgatggaaatgtgaggactcatcacaatattccctataccctcatacatgttttgcaaatccccctgatcgagtgtgtgagtctgtattaactgcttggggtc

SEQ ID NO: 558380 - DNA, 101 bp, Homo sapiens
atcgagctcggtaccagatctgagttgtgaaagtctgtttatgctgctataataccaaaactgggaaatttataaacaatagaaatttatttctcacagtt

SEQ ID NO: 558381 - DNA, 1071 bp, Homo sapiens
atcattgatcctacttccttctaactctatgcagaagaactgctgaagactcgcagatggtagttcgacccagaccacaaggtgcgcagccacagacatcaacgagggaagattgcgcttgggtgccttgaacccatgtgttaacagttcgaccaagtgcgatgcgtgcatatgtgataatgggtcaaaagttccggcacattattggtgattgtcgtcgggctatgctgggacaagaaggcgtgtgtgcatctgccgagccgtcgcactgttccccgtcgtgaaatagtaaggtacaaaggtttgtgctccaatatgtctatacctctaaactcatcacaatcttcagagcatgagtctcgagtgctctgctatacagagtgtgttattagtgctctctgttttaggatgcgtatgtcctggtggactgcttcttgtaggcatgtgcctattgcttggatcttgaagaaaagtctaccagttgcctgtaattgtcctgaacgacaaataaagtgggtggctcgctttttctgatctctcctaatgtacatgaatacacatctatgtggtagtcatgttcgtgtcttactcatttactattgggggtaggtgtagataatcgttcaggtgatataagagacataactgaagttggttggtacacgggggctttaagaaatgcgtttgaattatgtgttgtcatggtactagcctctgttagattcgccttggatgtctgtgtcgagttgaaaacgcttggccaggctatgatcgtgaagttggactcgtgtcacttggctctggcctgcgtacttattgtgcgctgtggcttgcgttttgttcccaaaggcaaggctaggggaaaggacgacttggaggaggcggcctggaggatcatttgtgggttccaaacctctgagccaaaacttgcttgggggcccgcggcgggaccccattttagattcccggtccccgggtgggggcgcctggggccagcccccgtgttcaggccattccacgtgcctctctgggcctcggccaccccggggtttgttttccctcagcgggggg

SEQ ID NO: 558382 - DNA, 149 bp, Homo sapiens
agaacaggatgtcttccctgttggtgatcacacaacacgaccgaggttggctccaccaatcaccatacacaaattgcctgtatcaaatttgataaagttgattatcttgccagtccactatctcacctgtgcagaatctctgcacctcg

SEQ ID NO: 558383 - DNA, 367 bp, Homo sapiens
ctccaggtcggcatcttcatgagccatggccttgtctccagctcggccctgcaacctacagctgttccctgtggccccagagcaactgttctcgtggggtctcagggctctttcccagtcttagagatcattcagttcatatgtgggagctggaaaacagtggaacttatggagatggagactagaatgatggagatattcccagaggctgggaagggcggtggggagtaggggggtgctgaggggatggttaataggtacaaacataattacatggaaggaataagatcagatattcggtagcacaatagggtgactattgttaacaagaatttattgcatattttaaaataactgaaaagtggac

SEQ ID NO: 558384 - DNA, 200 bp, Homo sapiens
gtaccctcctccaccagctcgagtcaatgttcacagatgaacacgtgtcttgtcctccatgttgatggtggggatgctgtgcttcggaggaactagggtagcccagccatttagccggactcggtcaaagtctctgtaatcctcgatgaaggtgctgtaccacactcgtgccttcacagtcacgttggtgacaacggggg

SEQ ID NO: 558385 - DNA, 305 bp, Homo sapiens
gccagccttaacgacttagcccgaggagaggcttaggaggaatcaaaacagagtagcagttcagatgcccagagatcgaaagaaggctcgaatgagtcagctggaacagcaagtggtagatttagaggaggagacccaaaacttttgctagaaaatagcttttcgagagcaactaatgccttatgttgagaccaggagtaagcaccgatgggattgattccttggtgctgaatgggggagcgctagtgggttatgttcgcagtccgtgtttgtggtcaacgttatatctggaacattcgagaggt

SEQ ID NO: 558386 - DNA, 192 bp, Homo sapiens
tctctatcgactcgctggctccatcggtgggctcagtgtccaccttccagcgcatatggcttagcaagcggagtacgacgcgtcgggcccctccatcgtccgccgcaatgcttctaaacggcctctgcagctgcgtagcatctgctgcatgggttcattgagaatagaagatttgcccctagaaaatgctga

SEQ ID NO: 558387 - DNA, 142 bp, Homo sapiens
cttcgtataacctgcaggaaaacatgcctaaaaattttgagggcccatctaaaactttaatcagtaaaggcttctgaatacatcgtaaaagaaaacaaagcatttctgaggcgtcctttcaataaccgcggaagtatgtagt

SEQ ID NO: 558388 - DNA, 163 bp, Homo sapiens
tttgacggtcccccagctctccttgcctcacaagtttcggctccattaattcgccgtcagctctcacatgaccacgaatcttgttgtgccctcctagcctgtgatgctcagcccaactcagagactcgacagatcatcatcatataatgatgggtctggactg

SEQ ID NO: 558389 - DNA, 1345 bp, Homo sapiens
  misc_feature (1168)..(1168): n is a, c, g, or t
  misc_feature (1345)..(1345): n is a, c, g, or t
gcgattagtactcatactatcataaggtcgtcccgcaatctccgcgaggcgcacacggaaccgaaggactatataagcgatgagagagtaatgcgaagagcggtcgagcgagatcgaacagcgaaggacttcactcgttgctactactatcaatcatagcttccaacaatcactttgtgccttgcgctcgtacaatatgacgcgacccaccctgcgttttgttctcacgatgcatacaatggcaagaggacggatacgcacccgatatgggtagcaaactctggggctgtaatccgtagcgggcaatcctcagggtgcttggccgcagagcttccatgtcatgggagatatatgcctgcaccatttgccgttgcggttgacaattctcgtgcagcgttgtatacatgttcagttcggtacgaactccccatgttacatacgagaaacccaattcgtccaagatattggccaaagggacacagacacaaccacggtcagtcaaaggagaggaccgtacctcgtaagccttgaattttcccaaaccactataaattggggataggaacggcattgggtcctttaaaatttcaattattgaccgaatttgcacttcattgtctctggaaactatatttcgcatgataccttaaaactataaacattcagcaactatactcatcacaacgacgatcgcaacaacaataaacatcattttactcgcaacacaaagaatgctctttctcggttacaactttccccatttacccgcccgagcacgataatcctataaccggccaccccaccttttttgaaaagccaccaacaccgaattttccttggaattagcctgtgcacacacaacacatcaaggacgcttccactttcttgccacccaagttcaggaacaaacaacctttcgaagatttcccccgcaatttgagaggtttggccccgacaacagagtacaaccgatgggttactcagcggagacaacactttcggacactctgggccgatctaaacattcaatttgctatggaaaccaagcatgcagaagcttattatagtacgaaacgagcattaggtatcatgacatactttcggacgcgcgcatcaacaacacgcggcccagattaaccagcgacttatataagcgcgccacctcccncggtggagccaacttgtcgaagatatggcttgattacgcctcagctcacagcacacacctctgtgtgtaaaaagtgttatcccccacaaggcaatcaacccgttctatgagaggacggatacgcacgcctataggaaaggtgtggccgaacactggagggaaaatacattaccgacn

SEQ ID NO: 558390 - DNA, 523 bp, Homo sapiens
acagagcaagacaagtgtgtacttaggcttctttacttcagtcttctaggctctcctagtagctgtccatttagaattcttatatttctccttgagagctctttgaacttccatggaattagagagcaactttagtgagttgcacatttgcatggcatagtttaggagtctcagcactgcatgcacttacaaccaaagccctgttctgatcaaataatccatagttgaccagatttctggcatgtggctggaagataatggggccagctggcagtcttcttgtggtttaagtgccatattggaccacacagtacctttcatcccaggctattaatcttagaaattcaacttctaatcttagacgtcggaaatttctttggtggagcagaaagtggaaaattgattcttgtagatgctgggcaaagattgccaggaataactagagaactggtcattcactttgcctgctcttctggttggtcaactgggtggtcgtgagcccctatttaggcatctatcctat

SEQ ID NO: 558391 - DNA, 123 bp, Homo sapiens
tcacgggtactaggctaggagagcagcgggtaggggagcataccgggccagccgaggggctaagtagccacaaagcccacaggtagcacgcgtataccctagaagcagcaggtagcggttaag

SEQ ID NO: 558392 - DNA, 271 bp, Homo sapiens
gatcccactctgcaaggcgcctacccaccagattatctttaaaaactctgatcccacccagcatggtggctcacgcctgtaatcccagcactctggaggctgaggcgggtggatcacaaggtcaggagatcaagaccatccccactaacacagtgaaaccccatctctaccaaaaatacaaaaaataagccaggcgtggtgtcgaacacctgtagtaccagctactcgggaggctaaggcaggagaatcacttgaatctgggaggcagaga

SEQ ID NO: 558393 - DNA, 354 bp, Homo sapiens
  misc_feature (158)..(158): n is a, c, g, or t
gtttggaaaaggataaggagtgggctccacaccccttggatctccctttgtggaaaaaaccccggggtcctcctgccccccccaggggaggcccaggatttttattttaaggatgtaaatgtgattccagcccccccctggccctccccccttccggntggtaaaaaggaatgtagtcaggcccctttcattctgtgagaccccctggaaccctggcattttttagccccccaaaggggttttgggcctagttgtcccccctctggagccccgtcctgtggtttgccccagtttccccccctaaaaaaaaagggtgttttccccccccataaaataacccgggtttgggcccca

SEQ ID NO: 558394 - DNA, 183 bp, Homo sapiens
gtggcactgcatgtgtatttagattctccttctatattattattattattaattatcattattattgagacaggttctcactctgtcacacaggctggagtgcagctggtatgatcacagtctcactgctagtcctcaaccatccctgggattcaggttgatccttctcacccggatcgggga

SEQ ID NO: 558395 - DNA, 129 bp, Homo sapiens
agtaggggagagaggcgaatctacttaagcgttgcaaacgtagtaagtgctctacttgctgtaggaacaaagtgctgtagtgagggaatcactcccaagtaagtcggcgtgattaagtctatctagggg

SEQ ID NO: 558396 - DNA, 193 bp, Homo sapiens
ttgtggtgtgcaattcgggtggatttgatggaggaaaaagcattgcgcactggtttaacaatgtggggttgatgtgagacaaaaaaatggttgaccagatgaattgtatgtgcatcagtgttgaatcctgtgattgttcatacattcacagcaaaatgcttctggaacttcattaatataatggaaatgtgta

SEQ ID NO: 558397 - DNA, 112 bp, Homo sapiens
tcgaagctccagcctacttatgtcatcgtcctcgtccagcaagacggccttctcccgggcctcgtgcatgccgatggtggcccgcatcgctgtgctccgtcggggtgtcggc

SEQ ID NO: 558398 - DNA, 129 bp, Homo sapiens
gtatatttctatatacatatactaggtaaaaccattacagatcaagatatagaccattcccatatactctaggatcccattccacctcttctagttaatatccctcctatcaataaagtagccacagtt

SEQ ID NO: 558399 - DNA, 249 bp, Homo sapiens
tggtcgagagaattaggcgtacccgtcgcagatactgatcattctatttccccctcattttgatccccacactccaatatgtctcatcatgcatccgacgtaatcagccagtccaatcaagtgtctatacttaaactatcctctagatataaatgataaccatacacaacactaaaggacgaacctgatctcttatactagtatccttaatcatttttattgccacaactaatttctctcggaccaatg

SEQ ID NO: 558400 - DNA, 963 bp, Homo sapiens
tacccttctgcgtccttgtgcatcatgcactggaaagtccgtggaggcttggcaaagtcagggacaagctgagcgacatatcatattccgcttgtcgcaagtaaagccgtgatgatcccagagtgacctctgttgatgtactgccctgggcctcctcagcattcgcgcgacggtgcacgctagcggtgtgcccaagtgtgatcacggctggtaactcagaaatggagggctagttgcgcgggagagacgctgatggtgccgcctagggcacgttgctcgtcgcgcatcctcgcgaagcgctcgcgcaggcattggtaggtcccgttggcaaggtgcgcgaagttcccgttcagagtgctgtatctatctctgtgtcgttacactttctctgtttggacagagtctagtatgtgggatagcgttgggaaagcacacatgtgtccgctaaatgggtcctggtaccaacaaagacaggcgcggctgtgagactttgtgttaggcacgtcaacgtagctagggaagtgatctgttgatgagatatgtgcagcgtcttgttgagttcagaacattccttcttttactggatcacagaccacagtgctcgattccatttctttcctttttttgtaaggacttttgggccccaccgtgtttttcctgggccattgataccatatataaaatatactacgatatacaactactattatgcagtacgtattgctccgagggtctcgtacacccatggagcgggttcggatggccttgtaaccaccccggcgctttactggacatactgtcctcgcgaggactcctctgcagtgccaaacagcttccccgacatcagcgtaggcactaacggcctccggaccgcccgtacatggagcccgcctcacatagagagtacggccgcatcccacacaactgagaacttgacctcgaggcgcaatccgcctgaatgcc

SEQ ID NO: 558401 - DNA, 104 bp, Homo sapiens
tgcaggaccatttcaaaggcacaaagcaaagatggcacgatgctcagataggacatccagggtggctgctccagcaggtgcaagcgcgatggtcactgagtatg

SEQ ID NO: 558402 - DNA, 889 bp, Homo sapiens
  misc_feature (3)..(3): n is a, c, g, or t
  misc_feature (180)..(180): n is a, c, g, or t
  misc_feature (182)..(182): n is a, c, g, or t
  misc_feature (184)..(184): n is a, c, g, or t
  misc_feature (187)..(187): n is a, c, g, or t
  misc_feature (193)..(193): n is a, c, g, or t
  misc_feature (205)..(206): n is a, c, g, or t
  misc_feature (208)..(212): n is a, c, g, or t
  misc_feature (233)..(233): n is a, c, g, or t
  misc_feature (248)..(248): n is a, c, g, or t
  misc_feature (256)..(256): n is a, c, g, or t
  misc_feature (263)..(263): n is a, c, g, or t
  misc_feature (265)..(266): n is a, c, g, or t
  misc_feature (270)..(271): n is a, c, g, or t
  misc_feature (273)..(273): n is a, c, g, or t
  misc_feature (275)..(275): n is a, c, g, or t
  misc_feature (284)..(284): n is a, c, g, or t
  misc_feature (288)..(288): n is a, c, g, or t
  misc_feature (297)..(297): n is a, c, g, or t
  misc_feature (305)..(305): n is a, c, g, or t
  misc_feature (309)..(309): n is a, c, g, or t
  misc_feature (311)..(311): n is a, c, g, or t
  misc_feature (315)..(315): n is a, c, g, or t
  misc_feature (321)..(321): n is a, c, g, or t
  misc_feature (332)..(332): n is a, c, g, or t
  misc_feature (335)..(335): n is a, c, g, or t
  misc_feature (354)..(354): n is a, c, g, or t
  misc_feature (363)..(363): n is a, c, g, or t
  misc_feature (382)..(382): n is a, c, g, or t
  misc_feature (389)..(390): n is a, c, g, or t
  misc_feature (393)..(394): n is a, c, g, or t
  misc_feature (411)..(411): n is a, c, g, or t
  misc_feature (433)..(434): n is a, c, g, or t
  misc_feature (439)..(439): n is a, c, g, or t
  misc_feature (447)..(447): n is a, c, g, or t
  misc_feature (465)..(465): n is a, c, g, or t
  misc_feature (501)..(501): n is a, c, g, or t
  misc_feature (508)..(509): n is a, c, g, or t
  misc_feature (541)..(541): n is a, c, g, or t
  misc_feature (543)..(543): n is a, c, g, or t
  misc_feature (651)..(651): n is a, c, g, or t
tcnagaacaaaggctaagggaagcaagtttctttcattttattttaagaaggacaaaaattgttattaaaacatctacattattatcaagatactagaaccttatgaatatttaatattaaagtgtggtattcttaaatttttaatacacagacattttaaaggaccattaaattgattncngnccngcgtgngaaatgcagcanncnnnnncgcccaccccgaccccatgantgaaatgaaatctanaacctgcntgcaggncnncccnngngngccgggttnggtnctctgggcntcccggcntggngntctngggggntctctgctggnttngttgccctcgtctttgggngggtcttcntgtccctcctccccatctngctctgnntcnngctctctcttcctttcnctgtggggggtccggctctggnnagggnagggggcnccaggtcccgggggtccntgggcaggtgacggggtgggggtgggggctctgggnttgggtnntgttcttttcggcgggggggcggattcgggtngncttctttccctgggcgctcccgctctgtccgcactcggtgggggtggtctgggaggctagcggagttgggcctggggagggtggctcctgtccctggctgcgcgggtnacctctgagccatggctccagtccctgtcaccttgcaaatagtccagtggcccctgaaaccctcctaatcacacaaggatggctgcattttctggccaaattctttatctttagccctcataaaagtgattccttggataccacacacatatataatattatatagagcgatatatttaatacctgtgtatatatgcatcacgggggcgacatatatacacactagaaacaaggctgg

SEQ ID NO: 558403 - DNA, 448 bp, Homo sapiens
cacacacatatatgtatgtatataacattttttatccactcattgattgatgggcatttgggcaattgtactgctatatacatgcatgtaacaagtgtcttttttgtataatgacttctttacttctgagcagatacatagcagtggggttgctaggtcaaatggtaggtctacttttagttctttaaggagtctccatactgttttctatagtggttgtgctagtttacattcccaccaacccagtaaaagtgttcccttttcaccatatccatgccaacatctatttatttattattattttttgattatgaccattattgcagaagttacatggtatcgcactgtggttttgatttgtatttccctgataattagtgatgttgaacatttttccatatgccctcgctggccattgagacaaataaacttaaatagtttataaaaa

SEQ ID NO: 558404 - DNA, 95 bp, Homo sapiens
tctggccttatagttttctttaataccaaatgggccccttatagttttctttaataccaaatgggcccctttttataaagaaatttggcctttga

SEQ ID NO: 558405 - DNA, 285 bp, Homo sapiens
  misc_feature (46)..(46): n is a, c, g, or t
  misc_feature (77)..(77): n is a, c, g, or t
gttaggagtagaatattgattactattcataattcagcacttaaantatgagcaggcatcataactaaaccttccanctacatattcacttagtcctttatcatccttaaaacaattctggtgacataccaattatctcattttacacaaagggaagtcgggcatggtggctcatgcctgtaatctcagcactttgggaggctgaggcagaaggattacctgaggcaaggagtttgagaccagcttagccaacatagtaagacccccatctctttaaaaaaaaaa

SEQ ID NO: 558406 - DNA, 648 bp, Homo sapiens
catacaccagcgggacaagacatatcggaggtctgcaatgcgactgatggctcgcttccccctcacctccacaacctccccctttccaatctggcaatcccaggctcacatgattcattcagctactgggtggatgaaaagtccccagtggggcctgaccaaacccaagctatcaaacgcctcgccaggatctccttggtgaagaagctaatgaagaagtggtctgtgactcagaacctgacatttcgagaacagctggaagctgggatccgctactttgacctgcgtgtgtcttccaaaccaggggatgccgaccaggagatctacttcatccatgggctttttggcatcaaggtctgggatgggctgatggaaatggactcgtttcttacacagcacccccaggagattatcttcctggatttcaaccacttctatgccatggatgagacccatcacaaatgcctggttctgcggatccaggaggcctttgtaaacaagctgtgcccagcctgcagtgtggaaaggtttgacgctgcgaactctgtgggagaagaactgccaggttcttattttctaccactgtcccttctacaagcagtaccccttcctgtggccaggaaggaagatccagcgcctgggcaacac

SEQ ID NO: 558407 - DNA, 337 bp, Homo sapiens
gcgaaagcatcagagatacacagaagacttggtttctcgctcctttatctctgtacggtacagtacgttttggtttacaaccagtgagtacatactattaacaaaatccctcatgcaacttgtagagaaaattttctttccttgaagctggcagtgaaaaatgaagattcatgtcattttctttgtgcacacccctatgcgcttcttcctgtcagattcttccctaagtattaagagaaataggggaaagccacagagcacgctggatttcaacaagtggtcttgtctttttaaagtacaacacttcttgaacaattagctcctggctgtagagacc

SEQ ID NO: 558408 - DNA, 385 bp, Homo sapiens
attgatgttctgtagcaagcatgatggctcactcatggtcagtatacacatatggttttcactcatgtacccttgtaaccaaatttctaacacttgtttccttaaaaactagtggtggtaccattaaaccataacctaatcagggtgttcactatgcttccacactagccagtcttctcacacttcttctggttccaagtctcaaggcctgcacagacagcaagggctgggcacgattttctctcttacacaattcagccttcagcaacttgcagcagcttccttcaggtggtcaagcaccagagctgtatctgcaggtccgtacgcctcgagcagattggaatatctccccgtgatctcggatctacctgtcaaagatgggtca

SEQ ID NO: 558409 - DNA, 112 bp, Homo sapiens
ccgtggtcgtggcttgtggttgaccggtggttgggttgacgtgcttgtgggttgacgtggttgtgggttgacgtggcttgtgggttgacgtggcttgtgggttgacgtggtt

SEQ ID NO: 558410 - DNA, 858 bp, Homo sapiens
gagattctctgtgggaaaatgactgtcaataagaatgcgggtttctgggccaagaaaaaaaaaaaaaaacaaaaaaaaaaaaaaaagaagaaaaaacaaaagaaaaacaaaaaaaaaaaaacaaaagaaaaaagaaaaaaaaaaaaaaaaaaaacaaaataggagggggacgcaggcggcgcggcagagacaatgaaggatatatgaattccgaggagggcagggagacagcgacatacacatatgaagggtaagggaaggaggtagagccaacagggatacctcgaacatacaaggcaaatagggggaggtccaagagaacaaaagagaggtgaggagctgccgaacaccacatgacataaacatcagatgcgcggcgggcgcgaggaaagcacaacaagtgatagaatccgaaagacaacaagaaacaatacaccgtgacaagaccccaaggaagagagagaatgaaaagtgcgacggtagggaaaaacataaaaaagaaagcacgagatggaacaacaggctcaaaaaacaacaaaacaccacaaagtcatgagaaaagaccatcgaacacctgcacgcactgtgacgacgcagtgaaaggtcacaagaaaacgacaatactaggcaaaaaagagaatacacaaccgcagcaaccacaagaggccaaactaaagttgagagcacagaaacaaactttaaacccacggagaagaagaaaagccccagccaaaaagtagaagacaccaataagcaaaatacttactcacatacacagaaaaacaatcggacacaaaatagagcaatacaaggaagccagagtacaacgaacgaacaataacaaaaggagtagacgga

SEQ ID NO: 558411 - DNA, 135 bp, Homo sapiens
  misc_feature (6)..(6): n is a, c, g, or t
  misc_feature (14)..(14): n is a, c, g, or t
ttgcgntccatagntggtggacatggtgaatgacggcgtggagacctccgctgcaaatacatctccctcatctacaccaactatgaggcgggccaggatgactacttgaaggcactgcccgggcaactgaagcct

SEQ ID NO: 558412 - DNA, 119 bp, Homo sapiens
tcagtatttcgtcagtacatttaaaaacttacagtacagtgaattcgggtgatcagcattgtgccaacttaactaccacttgtgtagaaactggcagtcaatttctgtgcccatttcaa

SEQ ID NO: 558413 - DNA, 416 bp, Homo sapiens
aaaagttcaagtgctcatataacacaccacactgttccccctttcctacagcaatatgttcactatgttaccttaaagcaacttgtgcttcaatagtggaatctactttcattgttaacactgagctaaagaaagaaaaaaagccgtgtgttttatgaatgaccttatctgtttcctggataatacctttaagaataatgtcctgagtcaggcgtggtggtgcgtgcactctagtccaactatttggaggctgaggcaggaggatcgcttgagtttaggagtttaaagctgacgtgccctgtggttgcactgtgaataactgcactccagctggcaacatagcagactcatctcaaaaagaaacaaaacaaaaaggaattgatgtctgtagagattggcctttaccttaggatcca

SEQ ID NO: 558414 - DNA, 667 bp, Homo sapiens
  misc_feature (667)..(667): n is a, c, g, or t
gatatctatgaggaccggcacgatggtgtcccgagccacagctcgcggctctcccagctgggctcggtgtcccaaggaccctactcgagcgccccgccgctgtcccacaccccgtcgtcggacttccagcgctgcccttatcgttcccacgcccccgtagccaggccgctcccctactcgaccagagtcaaggacctctatctctcagggtcaatgatccctagtccctgatcccactgtggcaggcccagtctaagcatcccatgggggcgaactggcatcgtggcctcgaatgttggcgcttcgggaacgccggggcctctcgtcctgcaccctgttcccttctgtggctcgccctttggccccgccagtgctcctcgggggccctttggattccaccctgtgaatgctttgagcgtgaactcacctgcggggttcaccgtctcgggccgcagcgaaccgcgttggccttggccttggccgacttctcccgcggcccgccgaaccctaccgtgggagccctttgttgtcatcgcgaccagccgcgggcgacttggggcggttgagaacacgtgggcccttccgtaccgtcgctaggccctcggcggcccttttcccgcgggcccaatttccccctggggtatgcattgggtaataggggcacccn

SEQ ID NO: 558415 - DNA, 130 bp, Homo sapiens
gattagaagagaatggaaaactcaacgtagtggtcttaggtcaagaaacaaatgtagtgggaataaataaataaataaataaataaataaaagaaatacagcctgggcaataagagtgaaatccatctca

SEQ ID NO: 558416 - DNA, 363 bp, Homo sapiens
  misc_feature (1)..(1): n is a, c, g, or t
  misc_feature (4)..(4): n is a, c, g, or t
  misc_feature (10)..(10): n is a, c, g, or t
  misc_feature (67)..(67): n is a, c, g, or t
  misc_feature (81)..(81): n is a, c, g, or t
  misc_feature (91)..(91): n is a, c, g, or t
  misc_feature (101)..(101): n is a, c, g, or t
  misc_feature (114)..(114): n is a, c, g, or t
  misc_feature (117)..(117): n is a, c, g, or t
  misc_feature (119)..(119): n is a, c, g, or t
  misc_feature (145)..(145): n is a, c, g, or t
  misc_feature (156)..(156): n is a, c, g, or t
  misc_feature (201)..(201): n is a, c, g, or t
  misc_feature (229)..(229): n is a, c, g, or t
  misc_feature (232)..(232): n is a, c, g, or t
  misc_feature (237)..(238): n is a, c, g, or t
  misc_feature (254)..(254): n is a, c, g, or t
  misc_feature (287)..(287): n is a, c, g, or t
  misc_feature (293)..(293): n is a, c, g, or t
  misc_feature (321)..(321): n is a, c, g, or t
  misc_feature (348)..(348): n is a, c, g, or t
  misc_feature (361)..(361): n is a, c, g, or t
  misc_feature (363)..(363): n is a, c, g, or t
naantcactntcccgtgtgtcaagacatttctctaactcctgccattcttctggtgctactccgtgncaggggtccgtgcngcagaggacngtctggaganggtattagcaaancgnanggctgagaaggaacagggaacattgnagctgactgtncttggtaactgattacctgctaattgctaccgagaaggttgaagntggggaagcctttgtataatcccacccnccncacgnnaacgatgaagttatgntgtcatggtccgttctggaagtttctggtgccntttctnaactgttacaacttgtatttccaaaccnggttcatatttatactttgcaatccgnataaagataaccngn

SEQ ID NO: 558417 - DNA, 256 bp, Homo sapiens
tataacactatcatgatcattatccaccagcccccaacctttttggccatcaagggctggtttcgtggaagacaatttttccatgggcatggttgggggtagtttcatcaggcattagattctcataaggagcataaaacctagatccctggcatgcgcagttcacaatacacttgactcttctatgatactagtgccaccactgatctgacagaaggcagagctcaagcagtaatgctgtcttgcccgccactca

SEQ ID NO: 558418 - DNA, 456 bp, Homo sapiens
agaccatgaactcaccaacctgctgggagggatgaacaactccggacgcgccacgtttatgaactgtaacaccacgaaggtctgcagcttcgctcctgaggccagcacgaccatgaacccattagaaggaatgaacaactccagacgcgctgcccttaggagccgtaacactcactgtgaagctttcacaggatcactctggctgctgtgttgatcctggactgtcagagtacaaaggtagaggagacattgcggtgatcccagggccctggagagaggagtggcagtggaactgatgagaggtgctcagatgctggagagaactagagtgacttgcccaaggtcacgcagctagtcagcaggagagccagggaaaaccccagctgacatcttttcttctggagacagtagaagatgacgtctttggagggctcttcaaataaagtatgatgcaaa

SEQ ID NO: 558419 - DNA, 162 bp, Homo sapiens
tctttacaaattttttttattggaaatgtgccaaataaaatataaaaaaagaacgggtgactcactttatacccaaactgtatactttacaaattattaaaaattatacccaaaacttgtggtttctttatatacattgtggccaataaagcttaatatacc

SEQ ID NO: 558420 - DNA, 363 bp, Homo sapiens
  misc_feature (84)..(84): n is a, c, g, or t
  misc_feature (209)..(209): n is a, c, g, or t
  misc_feature (239)..(239): n is a, c, g, or t
  misc_feature (286)..(286): n is a, c, g, or t
  misc_feature (302)..(302): n is a, c, g, or t
  misc_feature (318)..(318): n is a, c, g, or t
  misc_feature (332)..(332): n is a, c, g, or t
  misc_feature (355)..(355): n is a, c, g, or t
  misc_feature (362)..(362): n is a, c, g, or t
tttttatatttttagtagagattgggttttaccatattggccaggctggtctcaaactcctgaccgcagtgaatccacctgccntcagcttccccaagggctgggattacaggtgtgagccaccatgcccagcctatttgtcacattatttgtcacatttattttacttttatttattttttgagatgaaatttcgctcttgttgcccngggtgggagtgcaatgggtgcagccttggnttcacttgcaacctccgcctcccagggggtcaaggcaattcttcctngccttcaggcctcctngaggtaggctgggggnattaacagggcatngcaaccacccacaaccccagttnaattttng

SEQ ID NO: 558421 - DNA, 1732 bp, Homo sapiens
  misc_feature (1588)..(1588): n is a, c, g, or t
tgtttctgcgggggagagagagagaaaaaaacctctctttttccacgcggggggggggcgggcgcgcgcgcggcccgccccccccaaaaccggcgggagacgcaggcttcgcgggggggcgcgcgcgcgaccctggggcgacctcgggcggcgcgagggtgagagacagcccgcgggtggctggggagcgagagagggcgcgcggccgctcccgccgcgcggggagagagagagagtgtatcgccacagagcagcgggcggcgcgtcccgcgcgcgaagcagccgagggggaagaaggggtgtccaacacacaagtgtgtgacgcgagagcgagcgcgtctctctctcgcgagagagagcgcggagtgacacgcgcagcgcgcgagcagagagagcgagagagagaaccacaatatgatcactcgcgcgcgagcgacgagcccaaaaaagagagagggcgcccgcgcgagcgactctctctcctcgcgcgcgggtcggccccaccgcgcgcgcgacgagagaagagagagacgacgaccacgcgcccccgcagagagagagagcagaagcaactatcaccgcaccgccgagcggcgagagcgcgctgcgctatcctgctggtgccgagagagagagagagcgcgcgcgcgcctgcagaaaacaccactcgcgcgtgagggcgcgcgtctctgctgagcgccgacccccgccgaccagaagagacggggagaagatgctcaagtgtggagagggagcagcactcccgccgcggaggaggagaggaagcagcacctacccacacgtcgtgatggaggacgaaaacgaggaaggctactccaccacaacaagaagaagaagagcagcaccactcctcctcgtactctagggtggaggatgaagtgaggacgacaaaaaaaagagaggagcgcgcgaagcaacgaagaagatcacaagcggggacgagacacgacaacccaacacgatcacaccgaccctgagagagagagaagacgacgccgcacaccacagaagaacaacacgagctgcgtataacacgacggccgcaaaccaaacgagataagagaccccccacccaaacaaaaaccacactgcgcacctacgaggccgacgcagcaaacaagacatacaaaaaggaagaaaaaaacaccgggcgggcacgacaacgaaaagacaaacatcacatgagcgaaccaccgcccgagagagaaatggaaataacaagatcatcgacacaaaacacactacaaacacgcacacagcggcgaaccactcacatcaggcagcagcgagcggcgaacaccacacgcccagcagaaagaacgaaccctacgagtggaaacgcactaagggaagcagtacgtccacaaacaaagaacaccaacagcagctggcggacgaggaggcagagacaagacaacataagtaaaaaaacaacaccgcgcgaatgggtaggaggcaagagctgtcgccaaacacaacagaccaaacagagctatagtaggacaaaccacccacgagtgtataagttgcgatatctcgcgtggctggctcgcctagctctctctancgacgggaggccgagacaacacagatacacgcaccaggcatggactagctagagcaggcgactaacacacacaacaagatctgtgacctaaatctagtcagggtgatcggcggcaagtacagcacagccagagctgagtaacgc

SEQ ID NO: 558422 - DNA, 1185 bp, Homo sapiens
taaagggaaggtagagctagccaacatatcacattctggaatggaataaataactatggccacaattatggtttcttatagctatggtgtgggtttctggggtcgactggaaaacctaccattggcgttttctattcatctttataatgggactttcagaagtggctattagacaaggcccctaaccacttggggatcctttctggtgttggcgtggcaaccataattccttaaaaaaaaaaaaaaaaaaaaaaaaaaaaaaaaatcccccacggggcctctgggagacacaacgaaacaaacaagaggggagcaaataaaaaaaatccacaaaggtcgcggcgcccatgttgggcgaaagagaaaacaacacgagggggcgaccgggggggcaaaaagggagaggacacaaaaaggtgttacaacacaacaccggggagaaccacacacaccagtggggggccacctggggtgggggggagcaccacccccctccaaagcgggaagagcctctcgggggcaccaaaaaagagggaggggcaaggggaagagaacacaaggggggtgcaggaggggagagagggggggggacaaaggggaggggccttgtgacaaaaaaaagggtcgaagggcctcaaaaaaaaaccggggggcaccaaatgagaacacccacaagggcaaaggcgctaaaaaaaacccagacagaggcgacccaaaaaagctacctctttcaacaaacggggggcgcccaaaaagggtcaaagtagagaaacacacaaaaacttgcgagcaacccccggggagagaaccccattttcccaaagcgagaaacatatgtgagacacacccaaaacggggggcatacaccgagtgggccacacgacggtcggcgtaaacccgataaaaacaagtgacccaccaggggggtatgttcaagagacgaaaaaatgtaaacaacggctaactaacaacacagtcagaaaaagggagacagaaacacgagcagggggcaccaaaaaaaacaaccgtcttatacaaccaaaacggggggccaaacggagacccccgttacaaagagcaattgccacgagacacaacgaaaaaacaaagtgccgtggggaggacacaaaccagaagaaaacagcagctacaagcacgataagaagatacacaacaacaggagat

SEQ ID NO: 558423 - DNA, 136 bp, Homo sapiens
ataatatagacttagagtatagtaatcaacgagtggcaaatatttcttgtctctgacattattatttgtagacaagacaaatccatgagaacaggatactacactaaacttagatgaacaattgtgtaaactataa

SEQ ID NO: 558424 - DNA, 957 bp, Homo sapiens
gaggaggtggtggctgcgttgggctccgggaagccgttcgggctggggctgtcggcgcggggcggaggcactcgcgcggggggatggccactgcgatgaccttggttcagctgtccatttcctgtgaccatctcattgacaaggacatcggctccaagtctgacccactctgcgtccctttaacgaacgatgtgggagggggcagctggcgctgagcttggccggactgaacggggtgcaggaactgctcaagaccctgagttcatccaagactctacatgcttgaggtacctgctttgagaacgagtccagaagctacgcttttggaatctatgacatagacgaacaagacgccagagctgaggggatgatgacattcctagcggggtgctgagtgttccctagcgtacagaattgtgtccaagcccaggtactgactctccccttgcatgctgataggcctggatgaacactgctggcgctggggggaccatctacggtctcagctcacggaattaacggacaactcgtgtagttaaccatggaggtagaagggcacgaagacctagatataggaattggccttcctgggaaaactctggagtccactttcatgggagcttctccccggaacacggatgatgggaccaatgggcaccgtggtgtaccatgaatctggaggtcatcaagaacaagctgaaacccattcatggaaggcgttctcaagtccccgggcacggatttatgtggtgggaacccccaggacatcagtacagtgtgacaagcgcccgagattacagtgcgcggtacaaatgacatatcggtacgttcaaacagggtggcaacgcttgcgtgtggaccggcgggagttgaatgattcacatgaacttgcggacggcacacacagtacccagcgttgcaccacggccagatgtgggtacagaaggctctttgaca

SEQ ID NO: 558425 - DNA, 117 bp, Homo sapiens
cgagctcggcccttgtaattgggcacagaaattgtgagtcagactggtagtgtgataattaataataagaaggcaatcataaatttataattttatcattgcccttctcactagggt

SEQ ID NO: 558426 - DNA, 644 bp, Homo sapiens
cggcacgagcatagaatggctaccagttgacgccatgattgagaactctcgtcctccctctcattgccatccgtcctggtactgcagtcaaccatagatggcaatgacttacctgcaccgattaggaagcataggacttagagagatggctcagttatatggtacaactaacgctacacctacgggtgatgtatacagatgactatgatgcatgtatagaagctacttgtactagatgatgacatacatcagtgtcaatgtactgaattcaagaatgagttctagcaaggcattcatgatgcacatattagcgggcaggtgaccataaacttgcatgcacgcatagctgctatagtacggagaatttgtgggtcgacttcgatggtgacatagtaccacgcctagataaagaggaattattgagccattgctcacctctaatggaatcaatcatgtgctgtagttaaacgtagaaagatcctgtagagaatgatagtagtgagtacttagacattcttaaattaggacacgtacgatgcatatgtactagctggagatatgagttatgtaccatgctgatgctgtgaacaggatgcagcccgtatgaatcagatgtcaggtggaagcacagtatcgatgatcag

SEQ ID NO: 558427 - DNA, 366 bp, Homo sapiens
agagtgtctatattggataccgaggcgtattggtatccagcctctagcagatggtcgacgacgccggatccaagcagagcagtgtagatgtcttcgtgacccggaggacaccactcgagggaggagtccttcggccactcaaccggggcgagggtctcagcgtcgagcttaggctcctgatcctgcaggaagtcgagctctaggccgtcgacagccaactctggatatttctcgagggccttgagggtgtcctcgcgggtattgaaggaattcatgaacatcagcggcaatcgagcgccgaaagtcttgcgagccgagagcacctgtgtagcgatgatgtcgaggaaggacttgccgtcacgaact

SEQ ID NO: 558428 - DNA, 171 bp, Homo sapiens
ttggctcggccccctcgggggtacagttgtccttcggagaccgagtggtacacgtggcccgcttcacatcctcacaccctgccacctctagcggattcttctgggcgtccgactgccggtcatcactgctacctccttggactactgctcgaatcagctcgttaagagccg

SEQ ID NO: 558429 - DNA, 1964 bp, Homo sapiens
  misc_feature (1272)..(1272): n is a, c, g, or t
ctcgagctccagcgtcggctgaccagatgtcatcaacaccaagtgcatcggcggtgcgcactcgtcaggccctctgctgcaagatgtccgctggagtatgacaagattcacttgagctccgggcgcaacgtggctttctgccacgctggactgactgcacacaattactgctgaatcgacaagagagcactccatgacaccctagcctcatcacagactcatcatcaccctctagccaaggacccgtcttacgcctggagagccggtcacacaatgccatggtaatactagacacacattttgaagtgaccaaccggaagacgtggtgttcccaagcggactggagccaagaacaacctaggttgaacccaacacaccgtatcaaacacttccactggggatatactccgcacatacacccttgctcaattgtgatacagctccccaaggtgagagtcaaattaacatctgtggacacccatatcacatcgcttccacacaaatacagcacccactattgtgacacaacgaaatacacagatataacacactgtaaaggaaccaacacaatgtgatgacgatgcgccccacacagacacctatttagtcgcagaacaacacgtgacctgtatacacataatggaacatgaacagaaaccgcgtagttgtaaacgcagcaagcgagaattgtcaccagcacatactaaccaccacggaaaaaattgaaacacacaattaccaaaacacacataaataacaattagtaactgcatataacacttaactatatataacatccctgttaatcacaatacaatatacagaaccatataaccatattgacaccaaatcaaccaaaacctaaaacatacaaatgtagactaatcacataatacaaaacatgccaacatccacccacatatcacattatcacataacaccaatcattttcattaacacataaatcattcgcactctacaaccagccatcacaatcgtcgatacacaacgatacatagacatcatcaataaatacaccaccactatcacacactactataacactatcaaccacacttcgttcagataacatccttaaatctacgacataccacaatcattaatatacacccatccgtatagtcagcactacctcactaatcattacgtagaacagctaacacacccactctctactataacaaataccactacaccatcaagacataaatatcataaaaactaacttcctataggttacagatacaccanacacactatagtctgactcaatcatataaactacgagaactaacatacatacatcacacaaatatcacaaatttttatcaatactcataaacaccatctacaatacaaacaagagtgaactattataaataattaatacatattcattatcacaaacaacataattaacaatcctaaatctacttgcacctaaaccacaatcaatcaatctcatacatcataaatactactaagattgtgacgtcaccacaatcaacaatcactacataaaaaaaataagattataaatccacacaacacaagaatacagacaccatcaaaccatctagatacactcaatcacacattatatcatacacacacacacccaacaactaataaaacatcttatgaataaatcataatatacttaatactacaattgactactatcaatactagatctacactacaagaagctaaaatcatataaccaacagtaacctcgacaatacaatatcatgacgtactatcacaagtagtaggactgattgcacgcatagtacttactcatacttctcatactaataatatagactcaacaatcctactcaccattatcaatattttaagatactcaatgtccacctcactactcgaaatcactacataactactagttgactctctaatcaactaatcacaaccacaca

SEQ ID NO: 558430 - DNA, 428 bp, Homo sapiens
  misc_feature (260)..(260): n is a, c, g, or t
  misc_feature (331)..(331): n is a, c, g, or t
  misc_feature (338)..(338): n is a, c, g, or t
  misc_feature (359)..(359): n is a, c, g, or t
  misc_feature (374)..(374): n is a, c, g, or t
  misc_feature (385)..(385): n is a, c, g, or t
  misc_feature (401)..(401): n is a, c, g, or t
  misc_feature (414)..(414): n is a, c, g, or t
gcacctgttcccctgcccctctgctatccacagtgcctccctcagctcctgaccactgcaaagcctcttccccacttccctgtgcctgaaaaccttctttccccagctccccaacccacgttttgcctggctaatccatttgttaaacctcaactcagcttatatctcctgtcctcagggggcccttcctgggatgctcccccgcccccttacatttcaatgtggccggttgctgcttttttagtgttctggcactcttntaccaggggacccctgggcagggcaggggaccgttttttccgggtggttattcccaggaggcatggggggnattccanttcatttcatttcaagggtanttcaaaggtttccantgttgtttttnggggggaattgggggncagggggggaaancagggggaatgggg

SEQ ID NO: 558431 - DNA, 103 bp, Homo sapiens
tataaccatcttggccgtcgtttacactaacagctataccactcactgggccgtcgttgtccactaacagttataaccatgcactgggccgtcgtttaacatt

SEQ ID NO: 558432 - DNA, 938 bp, Homo sapiens
  misc_feature (52)..(52): n is a, c, g, or t
  misc_feature (119)..(119): n is a, c, g, or t
  misc_feature (219)..(219): n is a, c, g, or t
  misc_feature (248)..(248): n is a, c, g, or t
  misc_feature (254)..(254): n is a, c, g, or t
  misc_feature (279)..(279): n is a, c, g, or t
  misc_feature (282)..(282): n is a, c, g, or t
  misc_feature (299)..(299): n is a, c, g, or t
  misc_feature (307)..(307): n is a, c, g, or t
  misc_feature (315)..(315): n is a, c, g, or t
  misc_feature (324)..(324): n is a, c, g, or t
  misc_feature (336)..(336): n is a, c, g, or t
  misc_feature (352)..(354): n is a, c, g, or t
  misc_feature (363)..(363): n is a, c, g, or t
  misc_feature (369)..(369): n is a, c, g, or t
  misc_feature (386)..(386): n is a, c, g, or t
  misc_feature (418)..(418): n is a, c, g, or t
  misc_feature (421)..(421): n is a, c, g, or t
  misc_feature (441)..(441): n is a, c, g, or t
  misc_feature (631)..(631): n is a, c, g, or t
  misc_feature (824)..(824): n is a, c, g, or t
  misc_feature (858)..(858): n is a, c, g, or t
  misc_feature (862)..(862): n is a, c, g, or t
  misc_feature (899)..(899): n is a, c, g, or t
gcattgaactcgcctgcagcctcttgggttattgtggctctccttcgttatntggagccaggcctacacccagcaaccatgtccaagggactgcagttggtattgatcttggcaccacnctactcttgtgtgggtgttttccagcacggaaaagtcgagataattgccaatgatcagggaaaccgaaccactccaagctatgtcgcctttacggacacngaacggttgatcggtgatgccgcaaagantcaagntgcaatgaaccccaccaacacagtnttngatgccaaacgtctgantggacgcngatttgangatgctgtngtccagtctganatgaaacattggcccnnnatggggggnaatgangcgggcaggcccaaggnccaagtagaatacaagggagagaccaaaagcntcnacccagaggaggtgtctccnatggttccgacaaagatgaaggaaattgcagaagcctaccccgggaagactgtgaccaatgccgtggtcacagtgccagcctacctcaatgactcccagcgtcaggcgaccaaagatgccggaaccattgccggtctcaatgtacccagaatcatcaacgagccaacggccgcggccatggcctacggcntagacaaaaaggttggagcagaaagaaacgtgctcatctttgacctgggaggtggcacttttgatgtgtcaatcctcactattgaggatggaatctttgaggtcaagtctacagctaggagacacccacttgggtggagaagattttgacaaccgaatggtcaaccattttattgctgagtttaagcgcaacntaagaaggacatcagtgagaacaagagagctgtnagangcctccgtactgcttgtgaacgtgctaagcgtacccnctcttccagcacccaggccagttttgagatcgattctct

SEQ ID NO: 558433 - DNA, 360 bp, Homo sapiens
ttgtactaaggctactactgtaaaatgtttttgttactgctagcagaagctagaataacaagtttaaaagccattgctattatgtttacagcaaaattccacttgaaacttcttgcgactactaaactggtacatctattttgcgcccattagcacaaatggaatgttatttcagttaagaagagttaagacattctcatcataacccacaatatacatacaccttactatgtgactcacaataatttaaaataaataaaaaacaaacgggggcagggaagaaggcaagatttatgacatccttcactactgactggcaaaaaggagtagccatccccaacgtttttgacgggtaccgag

SEQ ID NO: 558434 - DNA, 171 bp, Homo sapiens
acttctgggttcaagtgattctcatgtctccagcctcccgagtcagatgggattgcaagcacctgcaaacaggacatggacataaaaaaaagtattcacatagtagagatgggattccaacatcttggacaggctagtcttgaactcctgacctcatgatccacctgcctc

SEQ ID NO: 558435 - DNA, 661 bp, Homo sapiens
tggatgatagtgtatgcgaagcatggcacttgtgtgtttcacgcaagaagtaagaaagtgctcaggcctgagacttgtggagagccaaatatatctaatcaggtataggagcttggatctaaagttaggttgcgtatgtcatagatgtacatgctagaggggaaatgtatagcactgatgtgagtggttataatgatagctggtagtttcacatgaaattccccagtggctatgattaaatgaggagaaagatgattgaagtcgaataatgaaataattatgaacgtaaggttaggagcaacagtgtgtcacagagtgataactcaccagccacttagtgaaatggttgaggatgggcaaatcagttgagggtcaggagtggagatgaacagacctgtgacctcagaatgggtggaaaccgcctgctctaccaatacatgtacaaaacattggcctgagagtaggtggctcatgcctgtaatctgcagactgctcaggaagggctgaaggccccgggtggaatcacttggaacactggagcagatggtaagattgtttgcgagctgacatgtacggcactgcatttccagtcctaagacaacgataggaagaatcagtctccaaatcaagagtcaaacaccgtaacagcctcttttagcta

SEQ ID NO: 558436 - DNA, 1767 bp, Homo sapiens
agcggcagcgcgatcatcacgaggtacagcgcgccatgggccgcatgcgcgccgatgcgttcgagccggccgtagctgccgggcatggccggcggccggtgggtggcgcgccacaggatgcgcaggatcaccagccccagcacggtgatgccgatcgacttgtgggtgtcgatggccgggcgcacccagtcgtcgggaaagcggtcgaccgagaggatcagcgcgatgttgacgatcatcagcagtgcgatgatccagtgcagcgcgatggcggtgcgtgtgtagcgatggtgagggggcatgcgggaattttcggcgggagtccgactcagcctgtcaggcgcgcgattgtccggtcttcggcctcggacattcgaaaccgccggcccgttccgtgcgtacaccttcccatcgccctggcgcccctgtcttgaacgacctgctccgctccgccttcgtcgccgcatcgccgcgactctcgccccccgccacgccgctgcgaagctggctcatccatggcggcgtgctgctgctgtggggcctgctgttcgccatggccttccgcctgggcaacgtgcaggcctggtcggtgggcgtggcctacgtgctctacgacaccgtgctgctgctgttcgtgggctggcagacgctcgcgatcctgcgcccgcgcggcatcgcgctggcctcggcgccgctgccgcatcccgccgtggccccgcaccgcgccacgctgggcgtgatcgtcgccgcgcacgacgaggccgcggtgctgcccgtgacgctggccgcgctgctgggccagaccgatgcgcccgaccgcatcgtgatcgccgacgacggctcgaccgacggcacggccgagctgctgaccacgcgctacgggctcgaggcgcccgagccggggcagctcagcgccgccagcaccctgcatcccaacctgcactggctgcggctgccgcacggcggcaaggcggtggcgctgaacgccgcggtgctgtgcatagacaccgagaccgtgctcaccgtcgacggcgacaccctgctcgacgcgcgcgccatcgccgcggtgcgccgcgccttctcggacgagcccgcgctggtggcggccaccggcgtcatcacgccggtgtgcagccgcacgctgggcggtcggctgctgcagtggttccagacttacgagtacatccgcaacttcctctcgcgctatgcctggatgcgcgtcgacggcttgctgctgatctcgggcgccttcgcgggcttccggcgcgacgcggtgcgcgccgtgggcggcttcgacaccgactgcctggtcgaggactacgagctcatccaccggctgcaccgccatgcccaggcgcacggcctcgactggcgcgtgcgcgtgctcggcgacgcgcaggcgcgcaccgacgcgcccagcagcgtgggcgccttcctgcgccagcgccggcgctggttcggcggcttcctgcagacccagtactggtaccgcgcgatggtgggcgaccgccgctacggctggctcggcaccgcgatgctgccggtcaaggccatcgataccctgcaaccgctgtacggcctcgcggccttcggcctgctcgtgatgtacctggtgcgcggcgacttcggcgtactgttgcccgcggccggcgtgatcgccgccaagatcgtgctcgacctcgtcttccacctgtggtcggtgcacctgtaccggcgctgggtcggccacggcggcgaggccggcatgctgcaggccttcgcggccgc

SEQ ID NO: 558437 - DNA, 187 bp, Homo sapiens
aatacactaaggagcccttcttggagttgtgttgctcctcattaaatacttgttcagctggctgctacgtgtcagcttcgatcaaaggcctaaatgctaggatgtgagtcagtgtgctgcaggccagttgctgggatgacgagagtattagctgctgtgtcacaagggcctgacagacgctacgcta

SEQ ID NO: 558438 - DNA, 507 bp, Homo sapiens
cttgccaaacctcagtggtggtagacacctggctataggcctggatctgccctgtcgtgtctgaggagaacctgatgtagtagaggctgcagggtttgggaaaccaccatttgttattctgtgcttcccctcctggcctggaagctggcccacttcatggggtgactcacggccctgcctctgtgccccaaggcagcctccgccctcctgtaaacaggcccacagggctccaaggggaggacatttgtgggtaaatcaccctcacacccccccaccacccacagctcatctggaaatcagctttccgaagcttccacatgtgtgccctccccctctctccactgcagacacctgcacaggctgagctgccctggccacacactactcagccagggctgggggcccttcccccatcaacacctccaaacccagcttccagcaaagctcatcctcccaggcagtctctcatctgagaaccgtgcccctgtcatgtgccatgtgctggaa

SEQ ID NO: 558439 - DNA, 204 bp, Homo sapiens
  misc_feature (82)..(82): n is a, c, g, or t
  misc_feature (97)..(97): n is a, c, g, or t
  misc_feature (118)..(118): n is a, c, g, or t
  misc_feature (185)..(185): n is a, c, g, or t
ggatgaagaaattattcatctgcataagcttgacagttgagtaaagaagcagcaaagatgatatatatgtgagacaattgtnagctagatgatacanagtgaaaaatagcaaatggtncttcccttacattgtccattatacactagagatgcaattaaagcctgtcaaatggtatgaactgatntagggttcccagcacttat

SEQ ID NO: 558440 - DNA, 155 bp, Homo sapiens
atcacagaacattgtcctccttcctgtaaaagcccaccccctttcttgtttgagcttctttttctgtgacactattatacctctaatcataattgttctacttttgtcacctataattatcactagacttacaggggatccttctgcattctcac

SEQ ID NO: 558441 - DNA, 336 bp, Homo sapiens
tcttctcctgtctacactgggtccaggtggaggtggggcagggtctcctcctgtctacactcggtccaggtggatgtggactagggacacctctttgtctacactgggtccaggtggagatggggcagggtctcctcccatctacactgggtccaggtagatatggagtagaaacacctctttgtctacgctgggtccaggtggaggtggggcagggtctcctcctgtctacactgggtccaggtaaatgtggagtagggacacctctttgtctactctgtgtagggaaaagaaagagagatcagggggctgggcgcggtggctcacgcctgtaat

SEQ ID NO: 558442 - DNA, 193 bp, Homo sapiens
cctactgcaagtacagtaatgccgatgtcaaccggctccgggtgcatgccatgacgcagcactcggctgcaacccatgcttcgtgccccctgtgtcaggcacatgctcaacaaccaggattccacctccagcctgcacctacccaccatccacagcgtggccaccttactgggtggagaagttattatgacgg

SEQ ID NO: 558443 - DNA, 595 bp, Homo sapiens
tatgttttttcatttttttttttaaatacaaaattagtgattttttttcgctcgctgcagatgcgctaacgagaattttcaccacggaggggggaaaaataaccactagggccttgaaaaacaggccatatggtggggatagaagactgtccatatggaaactggggggactccctacctataaaatttcacagtccacggaaagccactagatttactaacatgaaaaggagggggattttctgagggatccaacaggcatggacacatttctacgcctgaggaatgttgaatatggggggatgttaaaaagatccatcaatcactacgtgtcatttttaaacaaaagggccacacctaaacaccttaaaaaaaaagaattgcctgggcatccatttgctgatactcttaaagagaggactggtggacccgttatatcttaagacctcaccttgcctatttagacccttgacgactcagtagtccttgcccttaacggacgaatttacgttgcccccttacagtcaagggctaccatcaagccaatcctcttaggccttagacttgaaagccttataccaggaaagagcccggg

SEQ ID NO: 558444 - DNA, 477 bp, Homo sapiens
tacggcctgcaaaactgaaaccattgactgtcaaccacttctctacaacatactcaactgttgcagattacagggactcaggaaccgaattagacaattttcatggcgaggagaagcccagttagctttcctaaacgggcaggaagtgtgaaggagggaatctcctgatgccctgctccaggggtggcacacacctgcaagaggctgtcggctgtctgctgctgctgaggtttctgacctgcaatcgtagatcctgtcaccacagactaatcacttagtccactggctccttcctgtgggataaaggtttaaattcatgcaaaagaatctttctgggcttctgcccacactagagtccctatacaatggagttccaggaaaccaccttcaaaaatctcctgggttttcttgcctccaaattttcttcagctaaaaaacaataaagatgagctggaaagaaaaggtctgctaaaggga

SEQ ID NO: 558445 - DNA, 1121 bp, Homo sapiens
agcgggggctagctgtgtgtttttttttttcccccgggcggcccggtggtgcgtactggctgtgggatgggaagtgaagccccagagagcggctgcagcgggacccgtgatgtagcagccagcgggagtgcggaggcgagatcggtgagcagctgggaagaccagaaccggggcggaagacaccttgcaaaggcgcgggttggggccccaaacacatggcgaatcgcatgaaaatgtccccaagaagctccccaagttgcttgtgcccgagcgaattgcgatctgtgcaggaaatcagcgcggaaaattccgtctcccatgtgttgggcggatggatcatatcccttgactgggggactcaatgtggggacgaataactggcaaacagcgttctaatcaattttgggtaaactcctttccagttacaaattgttcaccctttcgccagagtaaaacagaaaagatcacggaacgggctaactgtgatttcaggtgtgtcccctttttatttaaactttatggggcatttcaaagaagaatttgggggctcaacgtgtattatatattatcatagacggtggcataaggtggggcgcaatataatttacttccacatgccgggttaatttccacaggagataatatggttggggattgaacaagtatttaaaccagggtcggatgattgacaattttgttcccaaagaagagatagaaaaccacaggcgagaggtttatcaattgtgagattagtgggattgaagacgtttgaggaaggcggtttccataacaagttgattgtgggcctgtgggatgttattgaggggggccaaccaattgaagatttgtcgtcaattctgtttgttgagagagattaacaatttctcgaggaacccgaaactaaatcattagatggggagggggcattaaattgcccgagataagagactgggatggaaaatttttcagacagagtgtgaagagtatttgtcgactaggagttttatcaagaaggtgtggagtttaaatggggagattacagtgtccattatttccgcttgaaagagttcatagcattgtgcgatcgtagaagaggcaaagagagagaggagaacgaaata

SEQ ID NO: 558446 - DNA, 934 bp, Homo sapiens
  misc_feature (385)..(385): n is a, c, g, or t
gttcgacagtcagccgcatcttcttttgcgttgccagccggagccacatcgctcagtacaccatgggtgaacgtgaatcgtcggagttcaatcggatttcggatcgtattcgggcatcctgtgtctacctatgggtctgtcttattaatcgtcttgagtacaatgtggaatcattgttagtccatcatatgaaccgcctatcacttgaccatcgaaactactgtgtgtttatcattgttaccaaataatgtattcacacaccaattggaccaatattcccactggctacacagtctaacggactgacgatagcgggagaagcttaggtcatcagagtgtgaatattcctcactcagcacactcgtatccgagtgcatgcgaggantcaccgtcgcagagacattcatagctggcggtccgactcgctgagctgcctgatggtacgctcggtaggagctccagcgtgggcggtcgtgtcgaactcaactccatgggaagcaaagggctaggcgtggctcaatttgtagcatgggtgcgtgacgtctcagaagaagggattcactcagtactactgtacccccacttcgtgactagaattgcaccactcatcgttccgttcattggcgttgttgaaagcccagtggagcaaggttatcgatcgaatccaggcctgcatagtattcgagtacagcgaaattgccttcctgttgcatcgcgagcccaatctagtcttacgataccccgtgtgcccagatggctcattccaatgaccaacctttgcgtatctgtgtgaacggcactccattgaaccactatgtcgcatatgccagatcatcctgtcacaccattaacgagctgttgtgattggccctctcacggtagaactgtggcagtgactggccgctgtgggctctccagaactatcgatcccttg

SEQ ID NO: 558447 - DNA, 161 bp, Homo sapiens
ggtcgctctgacggatcccctccagctggcccccaggaggcaggcatgcattcagagtgcatgcaggcaccgcagttccttccagcagtgtcctcagcagcaactcccaggtgtggcatccccaaccacatgcacagcccattcggtggtcactgcagctc

SEQ ID NO: 558448 - DNA, 114 bp, Homo sapiens
gtctgagcaagcttgggaatccaggcggaccaatgaaggacgggatgttcaccacctgcttgcggaacctgatatggcgctgggggatcagcacagcgagcgtggtggatggac

SEQ ID NO: 558449 - DNA, 476 bp, Homo sapiens
ctccccaagtgagaaacctaccgcgccaagacaacactatttgtttatttttcttattaatataagaaggcaggaatgtcaggcctctgagcccaagccaaggcatcgcatcccctgtgacttgcacgtatacatccacgtggcctgaagtaactgaagatccacaaaagaagtaaacatagccttaactgatgacattccaccattgtgatttgttcccgccccaccctaactaatcaatgtactttgtaatctcccccacccttaagaaggttctttgtaattctccccacccttgagaatgtactttgtgagatccacccctgcccacaaaacattgctcttaacttcactgcctaacccaaaacctataagaactaataataatccaccactccttgctgactctctttttggactcagcccacctgcaccccggtgaaataaacagccatgttgctcactgtggggaaggg

SEQ ID NO: 558450 - DNA, 428 bp, Homo sapiens
gaattcccccccccccccccccccccgaaagaagattgtttagaacacccatttatggaccatttccaaacctgaagaatcgcattacatagagtggggccaattttaaaaagcgatccgtaagctcattaaagcttgagtgataatgcttaggtaagtggttataagatcaggctcctaattagattcacatggccaatttgaagaactctctttactggtgccctttacacagtttctgtcctgggtgaaggcgtctattggttttaattaagtgcctcatgtgactctcaggtgccagcatcaaatttgaggagtccacgatacatccattgagtaaagtcccacttcgggactaaagatgttctaggaatctgtcctgttggagttgggtaaggataggacagtgtggccaattttctttcctt

SEQ ID NO: 558451 - DNA, 545 bp, Homo sapiens
  misc_feature (4)..(4): n is a, c, g, or t
  misc_feature (106)..(106): n is a, c, g, or t
aganagttacgggacccggcagcagacgccgcggggcgcccggacgcggacgcccagcccgcaggggccaaggccgccgccctcgtggggctgcaggaggcagggnacgccctgtccccccatgggggtccaaggcgcctgcggtggccacagtctttggggaggtcagtgcgctccctggcgggtcgccgcacaggtgggggtgcatcacagcggccccggggatgatctgagatcccgagagggccccggcatcacgaaggattcacagccttccgggtatcccagtgcccctgggacagggccgacagccagagggcgggagaccatggggtcctccgggtgtgccatatcatctgcctctgtgcggggcgggctgtcgctgcgccggtcacatccccccagggccagacgggaggtaccgagggagctgccggcggggacggggcggcggcccaggtggcgacacgcgcgacgcgagcaaggactccttggcaggcgaaggcacagggtgaacgtgcgcctagatgtgggagcgcggccgc

SEQ ID NO: 558452 - DNA, 417 bp, Homo sapiens
gcacccagctgtttctaaaattctgctgaaagaatatgtacgcaaatactacaatgcttacagccaaaatggtaattccctactcagtccacctcttaggccagctttccagaagcaaccactttcaactcttgtgatatttacttatatttaaataatagacttaccactatttcttgtctctggcatttttttaaaaatgatgctgctaaatatcctatctggcaatattaatttttaggatcattaattttttgaggcggggtcttgccttgtcatcaggctaggtcagtggtgtatcatggctactgcagtctgccctcctgggctcgtctgatcctcaacctagcttcgagagctggctcaaggcgtgtctccagccagctggttttgaatttatgggcttggttgcacatg

SEQ ID NO: 558453 - DNA, 586 bp, Homo sapiens
ggcggggcgcggtggctcacgcctgtaatcccagctctcagggaggctaagaggcgggaggatagcttgagcccaggagttcgagacctgcctgggcaatatagcgagaccccgtctccagaaaacgggacacaccaaaaaaaaaaccaaagggcaaaaacaaaaaaaaacaaaaaacaaaaaaaaatgtgtgtggggcgggcaccgggcccgtggagaacgtttaataagacacaattgggtgtgggggcgcggtgtgcccatatgtgtgtttaatgtgagagaccgtggtgtcaataagggtggttccacagagagggaaaacctggtggagacaagagaaataggggggggtggtgttcttcctcacagatatataaaaacacgcggcggggggggggcaacaccccggacggcgtggcatttgaagaaacaaaagaacccacaaagaggcggcagccactccaggaggcgccaaaaaacagggggggagagcatatcacaccggggggggctctcaccaaagagccacgagccgcgcgaatttcacaaaagaaaacagccccgacggccgggtcgggggggc

SEQ ID NO: 558454 - DNA, 179 bp, Homo sapiens
tcatggcccggaagatcaggccctcgtacggagagaaggtcatcaagctgcgtacgatgcggggcttggtaaagaagaagtgaggcctacggtgtcgcaggctgaagggcaggtcgtgataggtatcctgcagctcccgagtgaagaacctgtcctggaagagctcgtctatgatgctg

SEQ ID NO: 558455 - DNA, 1861 bp, Homo sapiens
tattttttatttttcacggcattgcgaactcttggttggagtcagatgctcgtcaagtgtctgacttgtatgatgcttgctcgagggtccgttcatttataccgaggtctctctgtctcgcttcttgcttttcttgcgccgtatgccatagtctttgttctcactgactctttggtgtgctctcgtgctcgttcgccgctggtgtttgttcaacatctccctgtttcgtgttgctcgacttggcagatacaatttggttcgtcccggagggtgacgccggcggcctactcttctctgcgcccggtgggattgctggcgccctccacgaggtgacctgttgtcgtcgtgtctggcgtgggagatccgcaccttcggtggttttgttttgtttgtcggtcttgtcgggtggtgcactgttctgttcgtccgacatgtttctgcggcgggtctcgtgagtggttgttgcttctcgggcgcgctacgtcgggttttctgagtcctcacgctgtttagctccggtggcccggcgctgtcgtgtaacttctttgtgtcgtcttcgacccattactagtctctacgctgactcagcttcttttcttcctcgtggacgtagtcgttttgttgtactacagtcgcctagtagagtaagttgttgtaggatagtaaggtagtagtagtgcctagctcgtgggctcgatttctagtgactcttcttcggtggttggtggtctctcctccgctccccttctcaccgagtgtgttgcttcgatctatctgttgacggctctcctatgtcaccccgttgttactgtgtccgtttgattctgcttgacctgtttgtgggtgcgccctccgctgggtgggtggttatctcgctttagtttatggtgtagtgtatgtggcgcgccgctgttttctctccggcggtggtgttctgcaccacctctacgcttttgtgaggttttgttgtcgttgttgggtgtcgtccattctcttcctcatcgtagtattgtgctgcgggggttaccctctgcttcatttatggttccctgctcttctcatctgatcactgggtggtgatgttatatgttttatcgcccccccaacagtatattgtccgcctaggctttatcgccggggtgcttggagatgatatgaaggggaggtgattatttagtacaccacacgtcttgttataagatggttctagctactacgcacgtctgtggtggccaccacacagtggatacaactctgggcgacagcaagatgagtttgtgtatatatattgttgtctccccagaacattgtgtacagtccgcgctgtctgtcgctggtttgcccgcggttgtgtttaactctcgcccgcgcccccctcgcgggtggtaattgttgacgcgcctcgctctctccacgcacaccgtcgcgccccctcgtggacctcggggagtactctctctctctggcgcgctgttagcacactctatgctcttgtatgtataggccgccgcggtcacgcgcgggtgtacacagtcctcttcctctcgcgaggaggagctcttataagcgccgctgagtgggttttccgcgcagagtgtgttttctccccccgcccctggggcgcatttttctcccgcgatctctcttttttttatcacctctgaggcaccttgcgcctcgttgggacttctataggcaccgaggtggtgtttctggtcctccccccttttctcacgccctcacttctgtttttgggctcttttcttgtttttccctctttttctccccctctcctcccctccccctttgcccctccctcttttgggggagattaaaaacttgatatttgttcccgacaaca

SEQ ID NO: 558456 - DNA, 613 bp, Homo sapiens
cacggtgggtggaagcctagcaatcccaggactttgagatggccaaggacggcagagctttaagccctggagatttgtgacccatggctggggcaacccatgatggaaactctatctctacaaaaaatacaaaaattagctggggcacatgttgtgtgcacaccctgtagtcgcagctagttagggaggcctgacgtggttgggaggcatcacctacagcccagaagggtcgaggctgtaagtgacgccataattatgccacataatgcatctaagcctggggtgaccagagtgcggaccctgttctcaaacaacaaacacacacagaaaatttcacaaccaatcacaaaaaaaacctctaaaattgcggctccttggcacttgttgtacccccttgttggaaaagaacacacaacgctcgcaacaccataaaacacacaacgttaaccatcacttacttctagatcagctacaactagatcactagccttccccccagcgcgaaggatcgccactaactactcatttagccggttagaaacagcttcaccaagggggataataccaccaaggtgaggggcacacaactttttaaaaaaacaagcagccccca

SEQ ID NO: 558457 - DNA, 180 bp, Homo sapiens
  misc_feature (92)..(92): n is a, c, g, or t
  misc_feature (105)..(105): n is a, c, g, or t
  misc_feature (114)..(114): n is a, c, g, or t
  misc_feature (133)..(133): n is a, c, g, or t
gcggccgcctactactactactactgctcgaattcaagcttctaacgatgtacggggacatggaatgaggacaaggtgatactctgagctgnggactgaactggnagtcacaanctgtacagattgaaatctnactttgtcaggaggaagtgaatgaaataaaggattgttttaaggatt

SEQ ID NO: 558458 - DNA, 468 bp, Homo sapiens
tcttttttttttttgtcccattcctcaagtgatttatacaagaacatttgcgtaatggaaggtaattttaatgtatgctaatttccatgaggcctgcactttcagattgttctttttgctggaggaatgactgaagtgtcccaagcattggacttttcgacatccagtgtgaacttaccgttggaaagtcagatagaaatagccacgcttcaaatgttctgtggccattagaagagacctgttgtatgcatagcatcattctgctttccaagtaatttctatgcagatggtatccagcaaaattagtatgccatgcataacaatatgcatcatccaataagaatgatttgctcctgagcagacacaaatgaaggattattgtgtgggaggagaagtacaagtacaaagtggatcaggacagcaggtgggaccaaaggaggatacaggtccttttaaaattcttaatta

SEQ ID NO: 558459 - DNA, 605 bp, Homo sapiens
gcctgcacttactcaggccaccttccaagagccagaaaagactctgctgaaaacctaattccgttgcacctgaagcatgaatacctgcattattttaactgctatacccttagcacttccccaacacagcctccctttcatcctcacgactgcccggtgaggtagatacagcaggtaacagctacagtggtttgcatttatcaagcacttacaatgtaccacgttctatgttaagcattttcatatgtgatcccatttaaactcatgaaaactctatgaagatgatgtctgccacaatcatcaatcagtgccaccactttacagaagagaaaaatggagtggttcgtaacttgcctcaaatcaaagaggtggtaagtaatggagccaggattcaaacctcagactgactacagagccacactcttaaccctcctacaatattgcctcaaaaagcaagcattgactccccacacattattctatccattaaattgaagctcagagagggaaagtgacttgcccaaggccttgccaccaggaacctgcagagctaggatccatacttggattctttggctctgaggccccctgaaaccaaaaaggca

SEQ ID NO: 558460 - DNA, 978 bp, Homo sapiens
  misc_feature (181)..(181): n is a, c, g, or t
  misc_feature (289)..(289): n is a, c, g, or t
tagtcgaagtggactcggctgcggatgatgacagggacgctctagggatgcgacgtgagtgtcgctcggatgcgatgcggtagcctatcgctcagcatgcggctctagtattcctctcgagcgcgtgggtgccgctgaaggcaccgatggccgcctctctgacgcgagcggggccctgctngagcgaatgcgaggcaagccgggggccgatcgggctgcgcgcagaggctagtacggtgtggaaagaccagcgcggcaggtgtgtatgtagtccttttgggtggctgcncaagatgtgcgtcgaatcgtgcggtgcgcctgggttccgagccatgtcgtccgcagtatactggtccatgcgtgatagtggctctcgcaagaggagtgcgcggatgatgtgttggcatcgcttggcatcctctgggctcagcaagtctcctcgtcgccgcggaccagtctaggagtgtgaccgtcaattcgttctgctgagttctccgactacgagagagcgtgctctgctaacgaaggccgtggagctctgctttcagggcccacggagtgacggtggatcttggctgatgggctcaaggagggttctgtggacagcagtcctggaaaagctggtcgttgcaggcgtctacagtctccaggactagggcaggcacaggtcacattcactttcagccgtttcaggtccctcgtcgtctgctgccatgtgggaatctggagcacaattttgggaggcctccgcaagggcgtgtgggatcgtgcgttgctgctggcagcctgctagggttcgctgtgcatggcctgccctggtgagcagaggggcggccacggcgggcggtggctctagagacccaggacctgggagcctgggaaaatggaatgcaacccacattgtaaagccactggcatctgattatctccatttgaacacacagcacagaattaccactgtaaatgttattttgggaa

SEQ ID NO: 558461 - DNA, 340 bp, Homo sapiens
cgaatataggcgatgtacagaactgaatcgatgggaggatggcagaaaagctggcattctatgtactgcagaaccaattgggttgtcatcagaatcagagtataatgggtgagccaagttcgaaagggtgcagcttcttcgccttcgtcaaatcttcatggaactttgtgaagctcaacaaggcttcgattaacatgctgagggattgtagagccatatattgcatgggggtaccccaatctgaagtcagtaaattgaactaatctacaagcgtggttatggcaaaatcaataagaagcgaattgcttttgacaagataacagctttgattgctcgatct

SEQ ID NO: 558462 - DNA, 244 bp, Homo sapiens
  misc_feature (27)..(27): n is a, c, g, or t
  misc_feature (53)..(53): n is a, c, g, or t
  misc_feature (89)..(89): n is a, c, g, or t
  misc_feature (203)..(203): n is a, c, g, or t
ggcaaatatcacgtttaagcctgattntcttatgttgcagttaaataaaaganctatgtaagatgattttaaaaattcaagcaaatggnccgggtgcggtggctcatacctgtaatcccagcactttgggaggccaaggcaggcggatcacctgaggtcaggagttcgagaccagcctgaccaacatagagaaaccccatctntactaaaattacaaaattagccgggtgtggtggcgggcgcc

SEQ ID NO: 558463 - DNA, 162 bp, Homo sapiens
gccttaatgtataaatttaaaagcaccatgacatctcttaagagcacaatcagaagttttataaaatttagcaacaggaaagtgcaggaccatgcctaacttaaacagtaaaacacacccagttatttcaccaccaggtggcgactggactgggctggattt

SEQ ID NO: 558464 - DNA, 179 bp, Homo sapiens
  misc_feature (164)..(164): n is a, c, g, or t
atcagacaaagccagtggtgaggactgaataaaacaaacatctggtacaaaaaacaaatgcaaagatggaggtaaaaagggagccaacatgaaggaatatatcgctatctttaacctatattcaacacagagaaaacgtactggacagagaagaatgttctgantaagcagagagtgaa

SEQ ID NO: 558465 - DNA, 797 bp, Homo sapiens
tagaacggattgcaggttcagccatgtcatctgagcctgcccgcaccaccacagagcaccccagccatcaagcttcagtcgggctgctggaaacccctcgtgatgccgtgagcggctcaccatccgcctctgcggggcaacgtggtcccaagcccattgcccactcgccggacgaggaccttctcgggcgacgtgtgcgggcttcacagggaccccgttctacaaaggagttctgcacatatgcgtaacgtgcgcggttccaagggcgcattggcatatcaagatacacccagcatgatggcagggcctcgacatctgtcgcctgcaacatcgcatgactggtggacaggggagatagtgtcccagtgggaaggcgatgaggatcaccataataaaactgatgcatcctagtcccaacccgaagaatgagaagctgcaggccggtggaggatcgtacatctacctcagactggtcgaccatggctaccaatggcatgagagctggtctggacatgtcatcagatcctaggagatggtggagagcaccccttgtcgctgtgcattgtgggagactaatgcgtgggaggaggcagcacgacaaactggagcaatgacaattctatcacaacaacgaacgaagcggcggccattcacgcccgggacataggcacgcctctacaacggtatctacctggaaggacagggggatacagggagggcaagatgagcaggaggtaaaaggagtacccggaccatcaggacagcctatggaccagttgcgacaaccaacacaacca

SEQ ID NO: 558466 - DNA, 894 bp, Homo sapiens
ccaaaagttaatatttttattatgtgtgcagaactggtttaccaaaaaaaaaaaaaaaaaattttttaaataatcggtttttccccaataacctaggaggtgggaaacacttataaatatccctattgcacaggggggatactggagtgtacacacgcagcacatcactggccaacacacctaataaatggatataagcgggaggctaaaacccagctctggtaagagtaatggcagacaatctctctggaatgggatacctaaagacacgggaactcgcggaagagattcgccggatgatccatcaatatctcccagaaaacctccttcaaaattggatccctaggctggaaggggataaccaaggtagggacgtggaaccccggtacctcttagccaaccacattataggggtggggtcaccaacccgtgactgggaatacagcaccaacttaggggctactactcgcgggtggagaacgtctattataaaaggaacaacacccccacttaccatggttcccctgttggccatggcatctgtggcggaattcacacccagggttttggggaaattttttttccttctacctatgtgggtttccaaagtaactaaattgattagaaaaaggagccgggtgtatcaagggcattaacggccaatttgtgatacattgccaaaggcgaagaaagggacccaggggttgcgggtggcgaccacgaatgctcccaatgggacttggaaactcatgtgggtccccggcgtacccaaacacaccaggtgctagaagcaaaaagctggcgaaatcagaggaggaggcaccagatgaccggggtcgccagtgcggccaagcgggtgagaaccacaggcctgacacaggggcaacgcagaga

SEQ ID NO: 558467 - DNA, 696 bp, Homo sapiens
  misc_feature (564)..(564): n is a, c, g, or t
cctcttcttcgcttcttttttccctctttctcttttctcccttttgcgtttgcggtcttctttttcttcctcctcccccccccctccccttcgcggccgcccccctcctcttatccaccctccccccccctcctcccttctccgcgcgccgggcgcccctctcccttttctcctcccccctccccccctctccccctctcctgccttcccccctctcccccctcctccctccctccccccctccccccccttccgtctcctcctacccctcccctctcgccccttccccccccccctcttccctctccccccccccccccctccgcctgccccttcctccctccctccccctccctccctccctctccccccctccccccccttccctccctctccctccctcccccctctctcctgctctctccctctcccccccttctctccccttctcccctccctcccccctctccctccttctcctcccctcgcccccctccctcctctccctctctccctcgttctctccccctctctcctcctttcccccctcgttcctcccttttntgcccctcccctcccttccctctctcctccttcctcccctccttcccgtgtccccctcttcctcctctctccccccttgtcctccgtcccacaccccctctccccccttcccctcctcttctccctcccccg

SEQ ID NO: 558468 - DNA, 1607 bp, Homo sapiens
  misc_feature (672)..(672): n is a, c, g, or t
  misc_feature (802)..(802): n is a, c, g, or t
  misc_feature (1045)..(1045): n is a, c, g, or t
  misc_feature (1294)..(1294): n is a, c, g, or t
ggctttcttgtttgttgtttttttgttgtttgtttcgtcttggttgcttggttgtgtcgtgtgttgttgtttgtgcttgttcgttttgtttgttattgatgtctatggtattattgtgtgttgttgatctgtttgatggctattgatagtacatagataatagtaaagcagctgctatataaaaacagtgtggacatagatcgagggctcaattttgacaaagcgcgggttagcccgccccttgtatttgtccgctttaagggtaacggcagctctggtgggtctatgttcaacacccagactagggcggggggaacaaaaccgaccgccgcttttgtaatgccgcgcccataatgggggccacacagaaagaagaggaggggcagcgaccacgcttgtgcgaaaagacagatggggggtgatgatggagtgaggcaacgaccacccccctggttggtggtgccccaatataataagaacgaatagattgtggggagaagaccagcgtcgtgtgttcccccccgtgggccccacggtggaccacccaccaacggtggccatattcgacgaaaggggtttctcacacaagaggtctcccggtgttttattgaaagaacgaggagtgtccttgtcctcgtagatgtgtagcacgagaaattgtatgtggagaantctgccacgtttttgagcagaagattgttcttcacatccttgtgttttttcccctgtgaagaaagtatgatttctacaggggggtgattaagatagtcgtcgtcctgctcgtctgctgtaagactttctnccatcatgagcacacatcgggagttgttttatcccgccgcgcgggcgacaccccaagaaaggggggggtccccaccaggggtgctcccaagacaaattgggccaccgcagccacaacagggagttttggtaagcttctcacctcgcttgttgagatgtgtcacacagaagaccttaagccgccgactggggtgttagcatctcggctcgtgtccgtgtctgcgtgtgtctcatgtgctgtgtngggtggtttgtgataacttctgaagagaggatccgcgcacccgacaagcacgagttatcgcgggaggaacctcttctgtaaagaggtgtcacagccacccccacacacgcgtgtctcccccacaatttccgcgagaagagaagagtgagtggagaattcacatgggacccgcagagagaggtggcacagagccacagacgagactctgagaaagagaagtgggtgcacacaaaaaatggagagttcccngagcacgcacttgggaaagagcacttggaaaaggcttgcccacttctaagttattcctcctccactgagagtttttcggtatgagaaaagttaaaatgctcgagaagaagccccacgtttgaaattggggaaagctccactggaggctttcactggtgagaaggcacctaagtttctgggaaagacccctcggggacgagaaccgggggcttaaattggacgagactgatggatatggacccccccgcccagagatttgttttaagattccagacttccaattagtggcccaattaaaagggctatttgtgga

SEQ ID NO: 558469 - DNA, 1483 bp, Homo sapiens
  misc_feature (671)..(671): n is a, c, g, or t
  misc_feature (947)..(947): n is a, c, g, or t
  misc_feature (1011)..(1011): n is a, c, g, or t
  misc_feature (1093)..(1093): n is a, c, g, or t
ggaccggtgaggaactagagaatcatggcggtctgcgctgttcgttgctgcctgggattctgcgctgctgggcacccacgtgagcctccgtggggcatgcctggacaacaagctctttcatccatagcgcagttagaacgaccattggcctcgcaacgactatctccatcactcttgctgtcctttgaacatgagcatgcgcctaacagtacggtctacgatggcggcacaccgcttggactgagagcggcggaagtcccgatgagcgtgccatgacacagaggcagagcgacagccgtccgtgtcccccagagtccctcgagtgaaacacaccgtgggagttctcaaaaagcgactgtgaaacttccactgtgacctggtgaacttctgaagtgtgccgggcgacagctaaagtgtgaccgttcctccagtttgagatcttgtgtttcattattatccgcccatacccttcccacgtgaaaaggaggtcccccacccaacttatgtggaagacccaacccctggtgggccactccaatgaaaacacagtttgtcctcccaattgggtctgtttgcccccaaaagcaaaggggctggaaccccccatttttcaccacaccagaaaatggaaaagagcttttgggcaaacaactgtggtgcggccctttttngggtgtttgagaacgaaaccgaacggggtttctcccggggagtttcacacgtcaatgatttaaaaagacactcgcatcacacaatttttcctaggaaagaaacccctgcgatcagaggcacgggcagcgagctgtccggatctataaacggaacaaacactctggaatatgacccgccccaacaaaagtgtttggtggcccccctttctggggtgggcttttaccacctattttcgggcgcgactaaagacgccgttggaattgttcacacctatntgaggaacaaccgctggagtttcttccccaaccacggggagttatgtgttcgcgcgcgcaaatnaacaacccccgatggtttatggcttttttcgacaaaaaccgctgtattggttatgagaaatatccgcccttgtttcaggagngagaatcgggtacccccaccccaatatttgtcggcggccgcgcgagtatatgagtcgcgccaatattatagagactgggtggtgcatgaacaaaacgtttctcatcccaaaagaacgcagcgtgtgtgtaggggagtagcaccgactcgctgttttttccccccatttttgtgtgcaacaacggaggttggggtgataaagccccccttatagaagacagtaggtgcggtgcgtggcctcaccaacatcacctagtgtgtttttattctccaccgaaaaactgtttttctgcttgcgggcgagcaaactactcactcaccctacgactagggagaggtgggtggagtgcacacccctcgtttttttttttctctcacaaaccatcactat

SEQ ID NO: 558470 - DNA, 108 bp, Homo sapiens
gagaagacctcactgctggggagtccctgccacactaagtcccccaacacactgaatctcccctcctcacaagtttccaatgtatacccctctaagaggggaggggct

SEQ ID NO: 558471 - DNA, 126 bp, Homo sapiens
acgataccccacacttcgatcgcggagaaggaaggagaaggtgaagaagtcagagtctgacctgtggtgatcgcggatagcctacttgtcattccacgttttcaagctactagccaaatgctgcca

SEQ ID NO: 558472 - DNA, 296 bp, Homo sapiens
ggaagagctgatttttaaaatatgattaaagtaaatatatccctatgaatatcaaaagtcgtctccctgagcctgtagttggaagtgccgcctgtaatggaatgatgtcttgtataaaaatgcccttttttgaaataaaaagaactcctgggctttttaaaaaggttgcgggaagccatcctcccctccccctgtgtgtaaaaacagtgtttttgatcctgctgtccccccgacctttggcaggagccggcgccagtaggaaagccctccttcctaaataaaaaaagtgtttccca

SEQ ID NO: 558473 - DNA, 181 bp, Homo sapiens
agtctgccagggacctttctacttcatctcccgcgttgatactgtgggacaggcagacagaagcgctagcataggcgtgtgtgccgccaaacaggatggctctgcctctctgcagcgggctcaagctgtgtgcattagtacaaatggtaagagataacataactgtcattctcttggaaat

SEQ ID NO: 558474 - DNA, 195 bp, Homo sapiens
cgggagcgggagaaagttgattacgccgatacatatatagctgaaatggacttttggctgtaagtttggtctagggtgtagcctgatagtatgggaaatcagtgaatgaagcctcctatgatggctaatacagctccttatttgatagtgacactagtggaacgtgggctacaacgtatgtacgtgtcgtgtagt

SEQ ID NO: 558475 - DNA, 362 bp, Homo sapiens
gtcttgtttttcttattagggccccctttccctgaatgcccattgcaatgaggcataggaaaaaaaagggaaatgaaattgcttgctgaagtcctcctatgttttgggccctatgctgtttgcctaaaacataattgccctgtgctggggcccctggagcagggccctacatagtgaatatatccatagttgttcccaaaaaaagccatatcccccttagaagctcccaaacttaaaaatggccccttataccccctagaagatatagtaaataataaaaaaaaaaaatgaaatggctaaaacccttttgttttccaatggggctgtttttccatgttaattaaaattttatgttttaccca

SEQ ID NO: 558476 - DNA, 1019 bp, Homo sapiens
  misc_feature (204)..(204): n is a, c, g, or t
  misc_feature (1019)..(1019): n is a, c, g, or t
tcatgaggtcaggagttcaagaccagcctagccaagatggtgaaaccccgtctctagtaaagataacaaaaaattagctgggcttgatggcatgcgcctgtaatcccagctactcgggaggttgaggcaggagaatcgcttaaacccaggcggcagaggttgcagtgagccaagatcgcgccactgcactccagcctcagcaantagaggtgagacctgtctcaaaaaaaaaaaaaaaaaaaaaaccgtgccaattttctcaaacattaccggataaagatttatttccagggtcccaatttaaattagtttaataagccagcagggcttttaacttcgtggtgttttgcccagaattccagctcgggggccattgggttgggtgggtccgggaactttctcaagtgggccatcaatcagtatttgcttatggattttgatgacgggcatagcctggggcttatcacctcattgggtaaaaggcgctaaagcctttctttttaatgggcacttcttttttggagataggggtcttactctggtcacccgggtagagtacccgggtcccaatcacggtcaatgtaggcttaacctccgtggggctcaggtgtatgtcactatgcccgggtaacttggtatttggtagagacgggcttcgccacgttgcccaggctgaagcggaaatttgcctaagggcaagcgatttgctccaccttcaattccggaattgcgagatacgggtttagcccttgccccagctttgttttatatctcattttgaaggaagaaccttccaagaattcgcccaggcgaccataaatacgaggcgcgtggcactatacaatctcgggttactcaccgtacccatgataaaatttccaataaaggggggataacacaagggggctaaaattctaggcgatgatccttgtaaggccacaaggtgtaaaacgcgcgctactgagcaaggctggaccgcgctgaccaccgcaatttatggtgattatagacgcccgcgn

SEQ ID NO: 558477 - DNA, 470 bp, Homo sapiens
  misc_feature (410)..(410): n is a, c, g, or t
  misc_feature (417)..(417): n is a, c, g, or t
  misc_feature (420)..(420): n is a, c, g, or t
acccacgcgtcgcgaccacgcgtcgcccacgcgttcgctgtccggccaggtggttggtggtaaggattcaggctccgtcctaacgaggccgtggcctgaggctcagtggccccccgccctccctcccagaaccaacagcgtcacctcccaggcccagactggaccgcacaccttgggacacggttttcccacttcctaaggacgagccccagactggaggagaggtccgaggaggtgggcgatggactctttgcgaggaccccggcggctggcccgggggaggcggcgaggcggcggcgggcggcggccgggggcgacatggcggaggagcaggacctatcggaggtggagctgagccccgtggactcagaggagccccgctgactgtccccgggggagcgcgccctcgngtagggnccngacggacggccggctggcaggatcagggccctgcggagcacagcccgggg

SEQ ID NO: 558478 - DNA, 254 bp, Homo sapiens
gcacgagtattaactttttcttattattctttaggtaagactgattgatgttggctgatattggagcgctcattcacatgaagtggatagatacttctcaagacatcacacagcgtgagtcaatcaaggagggaagccacaagcagactgacaacgtttctaggatcaggtgagctgtgcccagaaaaccaacgagaaggagtggaaggaggaatgaacgtctcattctcgttaataaaggcattatcctaatt

SEQ ID NO: 558479 - DNA, 239 bp, Homo sapiens
aacagttggactgcagtgacgcaatcatacctcactgagactatgccttacttgggctgcaatgatcctcccacctcagcctacctgagttcctgggtctacaggcaccagccatcacacccagttcattttattagtattattattagtatactcactaatgttgcccagtttttgtttagctttttacgctgtgtcaaccctggatcgaccagtgtcaatcctgcgtcgaccagtat

SEQ ID NO: 558480 - DNA, 95 bp, Homo sapiens
  misc_feature (7)..(7): n is a, c, g, or t
  misc_feature (13)..(13): n is a, c, g, or t
  misc_feature (20)..(20): n is a, c, g, or t
  misc_feature (22)..(22): n is a, c, g, or t
  misc_feature (40)..(40): n is a, c, g, or t
  misc_feature (61)..(61): n is a, c, g, or t
  misc_feature (69)..(69): n is a, c, g, or t
ggtagangaggantctttgntnagaaacgatcttcgtccngctaacaaacttgctaaaggnaactaggntattccatgacgatttgctactaaca

SEQ ID NO: 558481 - DNA, 979 bp, Homo sapiens
cgaaggcggaggaggctccgagcccccctccccgtgctacccccttcccccgttgggtgctggctccatgtctgtgtgtacggcctcaggggtagagtccaagcccgacgcggggcgaggccaagcagcggtggtgcagcgtgaggtgaagagcacggcgagtcgagtcagagtcagcgaggtcacctcagtgacgccaccagctggggaggcatgaagcgcgtgggtatacgccgtacatgctagttaagcctctcggcgagccctcttaatagcgaggaaccggaatcaccgacgggcatttaccaggcaggtacagtttttatagcccttgaaacttcctttgagttgcgtagttggagcaccttgtccctccgtagcacgacttttgggtccgtgagaaagtctcaagaacttctcgaagtaaccttgatagggcacaaattttcgtaggggccttttttacaattccacgaacacggccggtcggtaattggaatttccccgtttccagggaatttaagcacaaagagggtaaccgtggggccccgtttcagtccacgcgtactttctgcacaagggaataagcgagataggtagggcaatttccacgcaggttcaacgagaattactttagacatacattggcccctttggcccgttggatttccagttacgccccacaatttaacccaccgatggccgccattttgtacaccatcgtgtggacatgggccatatacgtccgagccgacgtctaagttggcatacgttgggggagtttcgccgatgattacaccgcttaattaggggcccaaacaacaagcgaaaccacgcagcgacacaaggcttggatagcttatagagggccccagataaccagaggatctggctccatacgtaccttgggcgaacattcccttgcccctgaggaggatccactaactaacttttaggaaaacaccgccaacgggcccat

SEQ ID NO: 558482 - DNA, 410 bp, Homo sapiens
aaaaacccagggtctttctccaaagaagagagggtgtggtaaggtcccacgcaggcaaaccacagatgaccccaggcccgacgcagctgaggctgaggctgcggcctttggtggctcacccccttctcagatccacactttctgggccaggcctgagctgagccacgtgggggtgagagaaccaggagcagggggaagatgtgggggaagggcaggcggagtgctgaccccgaggacctgtttcactggaaaggcagcagtttttacctatcttatcgccaactcggatgaattcttgtaccagctgcatagctgtgctcccaggatccagtttctctctagcttcgggcatccacgttttcctgccatggactcttgtaacaaacctctttcctaatagtaaataggta

SEQ ID NO: 558483 - DNA, 176 bp, Homo sapiens
atgctgaggtcatctaaggatccgtgacgggatacaggtgtgcggcacgcacccagcggtacaaggttttatttcttcacttgctagctaacacgttattttcttgcttttggtttttgtcttttaaaattaccaagcccatccttagtaaactgtgaaagtagtaattctcaact

SEQ ID NO: 558484 - DNA, 201 bp, Homo sapiens
ccggtccgaacgtggcacgtcctcctcgctggaagtgtcagtgctttgcctcacaggcaggttcacaatcgtgggggcaagttggccactttcagcggcgtctcgcctttcctgttgctctgcgtgcgggttccctcctgtaccgcagctagcagcttcaccacccttgtagtgccctgttgatggaagcgtcgcgcatgt

SEQ ID NO: 558485 - DNA, 556 bp, Homo sapiens
cactattactcataagcacacatcaaaagggaaacaagggttttctttgaacttacttttgttttgcagatcagggaaaccttgcctcattaaacagaaaaaggaaaacattttaaataaaaaacatcttattacctgtatctgtgacaagaggaggcatgacaacctaaaaaaaaatttgtgaccagaaaaatgtcctgagcagtgatactatctataccttggaaggagcacaggttagagaaatgtggggatgaaaattggggaaggtgagcaggcagtttaatcttgccttcaggatcaggctgtcagtgtgactttattactttgtatgaagtattatgaattgcccaaatgataaatacacccccatctaaatgttccagaatgcattccacagaggaatttgagtgactgaaatttttcctctttcttcattggtgtggttaaacaaaaattagctggggattaagggaaaattgtggctatgtctgatcattctaaataatcatgaccacaaataaattgccctgagtaggtctgaaacctggaaaaa

SEQ ID NO: 558486 - DNA, 224 bp, Homo sapiens
cggatctaaaaggcacacatagacaacagtcttgaaaacttgacggaccctgcccaccccgaccacgtccgactaggcgtctcccgattcctctcccggagcctcctcagctactccatccttgcacccctgggggcccagcccacccgcatgcacagagcaggggcaaggtgtctcctgagaggcatgacgggggccaggtccgtcctcctaggtgcctctgg

SEQ ID NO: 558487 - DNA, 813 bp, Homo sapiens
ggacttcagggctgcccgctcccagtgtcttcctgtgggggaagagcacagccctcccgccccttccccgatgggatgatgccacaccaagctgtgccacacctgtggctctgtgcgctgcacatctgtgcccatggagcactgctgggtggcccatcaaccacacctcaccaggggcaggcacagcacagggatccgacgttgaattttccacacatgcaacccctcctgctgcagaggggcaggccactgcactgtcctgctccacagtgttgagcgatgaggaggggcccgtagtactccctggacctcaaggcctccacagagtagacctcgggcatcctgtgcacacttattcaggaaaagcctcatgtgtcactggcatagcataccaactcacactataacctgacactgcaggggcattgggaccttgacgacagacgtggccatttgggcgagacaagtagtgcctggcataacgccgttcacttgctagtacacctccttgccccccaacacccacaggaaccccgaggaccttccaggggaaaccacgaggcaaagggcaacatgacagagactagagagccacaactacacatgggaccacacggcaccaaggagcccaattgacgggctcctccgccaagacgatagacaataggaacataggaccatgacagaaagcccccaaagaggtgggcccccacaaagaaccgatggacgaccagggacccaccgcagcaagggagagagagcaacagcgcaacagagaaagaacagcgaatagagccaggccggccctacaaa

SEQ ID NO: 558488 - DNA, 713 bp, Homo sapiens
attgaattagaaacataaataaaatgaccagtaattgtgaaaaaaaaaaaaagaaaaaaaaaaaaaaaaaaaaaaaaaaaaaaccaaaaaaaaaaaaaaaaaaaaaaaaaaaaaaaaaaaaaaaaaaataaaaaaaaaaaaaaaaaaaaaaaaaaaaaaaaaaaaaaaaaaaaaatataaaaaaaaaaataacaataaaattgaaaaaaaaataaaaaaaaaaaaaaaaaaataaaaaaaaaaacttttcccaacttaatcccccatgtatttttaacccctttaaacatttttctttattccccaaaatgccttatcttgtcaaactttccaataattgggcatttttaatattcaaggggaatttttaacaaaaatattttttaaaaaaccccgttgaaaccctcatttaataacgcttatgtttaaaccaatttttttcaacattggcaaaatcccttataaactccaataatataccttttaaaaaattttgcgacacttcaaattggaaacaaaaatttcgctttaaaaaattttgtactcaaaacctcataaaatttttaaccccaacatcacgtttttttccccaaattgttgaacattttacaattccctctttttaatattcagaaaactcccccctaaaatctcttaaattggtcccctaaatggaaaaaacgctctttttatttaacaaatggaacccccca

SEQ ID NO: 558489 - DNA, 642 bp, Homo sapiens
  misc_feature (642)..(642): n is a, c, g, or t
ccgatgacgcaggcctgatttaggcgagattggcgataattagtcaatcaccgtcagcgagatggaccgattgcacaaggacatgaagatcaagatactgttggacaactgtatctggtccgtgactatgaaggaattcgcgagcattgctagctttctagtagactctataaagcttgacgcgactgctgatcatgcgagagcagactcagacacgagtcgatgagtggaacaagatcatattattacgttgatatcagcgtcaacagtgtacacgtgattataggtgacaagggctgaacacaggtgggcgtcaacatgctgctagacagtaacctggccatgcgcgatatgatctgctcgcatagtctacatagtcacagatcggcgtcctgacactaggccttgaaggagacgagcccaccgatttgcgtgcacgattagcatgtataatagaacagaattgttcagcaatagcctacaatgctatatactgtctgtacagagtctgattactaagatgaagtactacatgaggcaagttgcatcgcactttgaatcttgctaaactactttacccctactattgaagagactgtgtacaattgttcgatactagtactgacactgcttagaggcccn

SEQ ID NO: 558490 - DNA, 306 bp, Homo sapiens
aattgcttgctttgtgtgtgaggagaaaccctcacacatctagtgtcagaagcattgtgttgaggagtgtgtgagagtagagagtaggagagacattctgagttctggatatggtgcagtgttttactgcatcctggacattttgattcttctgtgaggagactgtttggtgttttttgttgtgttagattttttgttttttgagatggagtcgtcactctgttgccaggctggagtgcagtggcgcgatcttggctcactgcaacctccgcctcccgggttcaagcgatcctcctgcctcagtct

SEQ ID NO: 558491 - DNA, 236 bp, Homo sapiens
  misc_feature (214)..(214): n is a, c, g, or t
  misc_feature (223)..(223): n is a, c, g, or t
tataaccctttttacgaagcttcaaaggtaattttacatttatctttgcatttatgacattggtggtcatgatgaccacttgatgcctagtccttataaatggaggcaactcctccatcctggtattgatgctatggaaaaatgagaaccattttacaacggcccacaggatgatacaatttgcaacattagaacaccggaacggctggcattnattaaagcncaagaatgcaagc

SEQ ID NO: 558492 - DNA, 118 bp, Homo sapiens
aggctgctgatgattatgggctgattagtagtagttactgggtggaacatggttggtgggggtatatatggtaatggagaagggcttagaagaaaaccccacaaaccccattactaaa

SEQ ID NO: 558493 - DNA, 455 bp, Homo sapiens
  misc_feature (21)..(21): n is a, c, g, or t
  misc_feature (166)..(167): n is a, c, g, or t
  misc_feature (169)..(169): n is a, c, g, or t
  misc_feature (172)..(172): n is a, c, g, or t
  misc_feature (181)..(182): n is a, c, g, or t
  misc_feature (189)..(189): n is a, c, g, or t
  misc_feature (191)..(191): n is a, c, g, or t
  misc_feature (195)..(195): n is a, c, g, or t
  misc_feature (197)..(197): n is a, c, g, or t
  misc_feature (202)..(203): n is a, c, g, or t
  misc_feature (206)..(206): n is a, c, g, or t
  misc_feature (208)..(208): n is a, c, g, or t
  misc_feature (212)..(212): n is a, c, g, or t
  misc_feature (376)..(376): n is a, c, g, or t
tgtaggttagggttatagggncccttgtcagaacattgatacgaaaggggctcccaaacgccgggcacaaatgtgtctgcaaacagatggaagtaaacagtgcactggcccaaatgcttcatgagtcagtttgattttgcaatgcaatttgcatccttgaaactgnnantcncccgggggnnggggtanancccngntttgnngtngnaagngcctcctattagctcaccctttcaacattaaacagagaccaagagagaaatggttccaacatttcaccacatatatttcttcttacgcagtctaagctgagaatgccatgtaaatgggtcactgcgaaatgcagcaatttaatttttctccaatcaaaataagnaacaaaccagtatgatctcacttctattaacttttgaaggtttacagcagttaaagtatttttgcttctatgtatgaag

SEQ ID NO: 558494 - DNA, 785 bp, Homo sapiens
cttgaactacaggtcagtgctacccaatcagaattccagtaggtttttttgtgtgtggaaattgacaaactgattctaaaattaatatggaaatgcaaaggaccaagagcagctgaaacaaccttgaacaaagaaaagtgaattgaggggacgtccaccatctgacttgaagggctgttgcaagtctattgtaatcaagacagcgaggtattgatattaacacagaaatatagatcaaccgagtccagaaatagacccatgcatctattgtcatttgattttaacgtacaaggtacagaagaacttcagtgaaaaaataatgatcttttcaccatctatatgcaaaaaattaatctcacaccatgtgcaaaaaattatcccaaaatggatcacaactggaatctaaaatgataaaccatctaaccggaccaatgtaagagaaaaatctttgtcatttttgagttatatttctgaacatataacactaaaattatgatctatagaagaacagagatcgataacattggacttcatcaaaattaggaacttatgccctttacaaatacactgttacgacaatacacaagacaagccacagactgggaataatacttgtaaatcacataactgataacggacttgtatccagaatatacaaagaacccccagcactcaataaacagaaattatccaatgtagaaaatagaccaaagatttcaacagacctttcaccagtgaagatatattggatgggcgaagcagcacctacaaagatgcaagaacac

SEQ ID NO: 558495 - DNA, 240 bp, Homo sapiens
gggggaacaagatggcggcgcgaaaggggagcctctcggtgaggaccaacttggggctccggccgctgctgctgctgaccatggccttggccggaggttcggggaccgttcgcttgaggcatttgactcggtcttgggtgatacggcgttttgccaccgggcctgtcagttgacctccctcttggacacacctaccctagggaagaggagttgtacgcatgtcagagaggttgcagtctg

SEQ ID NO: 558496 - DNA, 375 bp, Homo sapiens
cccctgtgtgttgaactatgcaggagggtgacgcggacacatttcaggtggactttgcaaggactgatggatagctacctcagggaccagaatccgtgggaagggatggacctggtgttcccgttcccatctgacaggctctcttttgtcaaggtggtatttttcgtaataaaaggggaagagtaaagactgtccaagcaacagtagctgccaaagagaaaatacgaaatagaaggggaagagtaaagactgtccaagcaacagtagctgccaaagagaaaatacgaaatagacactttttttttttgagtcagagtctcactctgtcacccaggacagagtgcagtggtacgatctcaagctcactgcggccgc

SEQ ID NO: 558497 - DNA, 152 bp, Homo sapiens
ccactcaggcggggtagagggattggtgatcccagccacgaacacatgctatataatctatgatttttgtcctccatttttctgttatctcccacagccctcacagatggatgctggcataggcgtcatgaagatcattcaggcttagaatc

SEQ ID NO: 558498 - DNA, 387 bp, Homo sapiens
gccggtgagcatccatatgcagagacaagatattgcccggtggccttcctggctcagtctcacttccacattcagcccaggccattaccagtgtgggaagccccatgctccccctcactggaaattatcactgggtggtgtgcatccaatcctgaaagtgtaggggaggagggagggcaacagaaggaacagagcctggcctccccacccctgcccgcccagctgggcagcaggtccttctcagaacgacagcctcttctgctgctggatgcagtcacagcgaaccctctggcccttaatagcaactccacgtgcatcaggaacctcaactagacccctaacaaatactctctctctgaatagacaacctcccgtagcactgccaaa

SEQ ID NO: 558499 - DNA, 334 bp, Homo sapiens
ggggccatggagcggatcaaggaggaccggcccatcaccatcaggacgacaagggcaacctttaacccttttattcgagaacgtgggtttcgtttttcatacacggtccataggacaagcttgcgcctttgagattccgccgccataggatgagatccaggcccgacctcgcgagaactggatgggagaccatgcaccgcatggagccacctcccacccgactttgaggggcgccagacggtaagacaattgtgcagaccctgtaccgccatgtgggccttagaatgagctggacggctcaaagagcgtcaaaattctgtgtggggctcgagtc

SEQ ID NO: 558500 - DNA, 1350 bp, Homo sapiens
  misc_feature (844)..(844): n is a, c, g, or t
  misc_feature (913)..(913): n is a, c, g, or t
  misc_feature (919)..(919): n is a, c, g, or t
tggacagtgtttttttcaacaggtgtggcaaacaaattgggcccttaataactatgttgtcgggggaccctcctggggcataactcttttcccttgggcggtgtcttttcgcacttggggccggtttccgggacacaagcggccctgtcgcgtgaacaaaaacccacatgaagttgggattaaaacgctgtataggtagatttgggggttcacaaccaccacttgggctcttgggtagacctcgttagttgccggagagaggaaagtttccccgaaaccgggcctcttttatgatagcctcctcctctctcgggattttacccgtgggaaaacaaaaaaccaattgggagaatatatttggggcccccggagatttaaagaggtggagatagggagattttcaattaataagttctcgtgggcccccgcgtcccacactttttatgaaaagaaggatatttataagggaataccttttttggccccccaggaaaaaatagtaggggtcaacaaatactgtgggtccctcgtaatacgcgtataatttctcacactcccggtttgtgtccccacactggtgcccacgctcccgcgctttgtcctcgcgagaagaccactcggagtgtgtggggaaaaagaccaatggggggacctatgcgcgcccggccacacagagttgggatagccgctctctcataacactctcccccagagaagagaagagttacactttgtgcgcccagagaagacccccttggggacacactctctcacacagaggtgagactttgggcgacacactctcaacacacagatgttgtcgtttctttaatgatatatttgngggtgatataaacaccctatctccactctcgacatattacatcacaccacagatgtgcgcagagatatntgttanaagaatagcgccccttgcccacgagagatatatatatagggagatgtatataaccccaaaatacccagggccgcttctccacccaagacccagaggatggagaggaaaatcaccagagacaacatatggggtccagaataagaaacatgtgccctccacattaagccaagagcccacaccagactgccaaaaacatgccaccggagaccgggggagccacccgtctcccccagaccaggataatcttggctggccaaatggggcccccgagagaccggggtcttgagagatcttgttgtaagaatggccccaatctttttatctcccccacaccttaaaagacccagccattgatgccccagactttggaaataattctgttttaaaaagcccagagaaattccccaactgcgagccttttttaaaaacca

SEQ ID NO: 558501 - DNA, 332 bp, Homo sapiens
  misc_feature (197)..(197): n is a, c, g, or t
  misc_feature (291)..(291): n is a, c, g, or t
  misc_feature (313)..(313): n is a, c, g, or t
  misc_feature (325)..(325): n is a, c, g, or t
ggtcttactcttaccctgatgcccaggctggagtacagtggtgcaattatagctcattgcagccttgtactcctggggttcaagtgatcctcccacctcagcctcccaagtagctaggactacaagcacgcaccaccatgcccagctacatttgtttctttttttttgtagagataggggtcttgctatgttgcccnggtggtctcagactgcctaaagcagtccttcccacctagggccgcccaaagcactgggaattatagggcatgagccacttgcactggggcctgntttgcctttcttaaatgacctnaggtcaattgtnccaatta

SEQ ID NO: 558502 - DNA, 429 bp, Homo sapiens
tcctggagaacacgatgctcatgtaggctttcagaatacaggcaaaagccacttctctgcgaggaagacacgcctgaccgtgtataagatacttgagtttacttgtgggagctattgtcatctatagaagacctgaaagatcatctaacgataaataatacatagatctttgtggattatgggtggtctcatgataggaatttatgccatagaactgagagtggggagtggcaggtgcaggtttaataagattttccaggatgagttccaaaaatcagaattgccgagatctcagggtataatgagagaacatgatatttaagaggtggtttaaaagataataaggaggatccagttaaacaggataaaaataaggacagggttgttcatcagaaagaactggattattgtgcaaatgttattcgttac

SEQ ID NO: 558503 - DNA, 333 bp, Homo sapiens
taaaaacagacctttctcggtggtgcaggcgggagcgcaggggcacaatcatagctcatggggacctcaaattctggggttcaagcgatcttcccacctcagcctctgtgagtagcgggaactacgggtgtgccccaccacgccgggcgtgaataatggcattttgggtatgggtgtccgccaggtggccggtgcgggtctggaactcagcccaagtgatcggccggctggggcctcccgaagggcggggataataggcgtgagcaacagtgccgggtccggctgtattttttttaaaacagattggccctgggtgggtttgtgacttggggg

SEQ ID NO: 558504 - DNA, 108 bp, Homo sapiens
gcggccgcctactactactactactgctcgaattcaagcttctaacgatgtacggggacatgttcttgaacaatcaggtttctaaataaacaactggaccaccaaaaa

SEQ ID NO: 558505 - DNA, 115 bp, Homo sapiens
gtcgctagaggatcccctggcaaagatgtgtatgaacatgacggttagaagctctactccacttccaggctgcttcagaaatccattctcttgacatggccatcaacactaagcg

SEQ ID NO: 558506 - DNA, 750 bp, Homo sapiens
ttcatgttttaaaaagaaccgaagaagccacagggagggcctgagggagcccctgggctttcccctcagtcctcaggaaaggtggtcaggaaaactctggctggacaagggtcatgtcttcggggtcagcagcgagggattgctctgacggaggccaggtgagggagggtccccgcccaatgccggcgtggaatgaagaacctcgcatcttttggtgttgtatgcaccgttgtggcatgccatgtcatggaacatgcagctgaagagccctgcgcgccctctggccctcaacgggagcattttgcggatagaaaccagtaaggtagccttgcacgaagcccggtacgaaaaccggacgtgctacggctggattaggcggtgtaggggtacatcatttcccacaaccgtaataagcgaccgatggtcatttactccaagagcagagataggggagtccttgcagagctggacatagaggcgcccgcatgtcacttaggtctagcgctgacagaaatgaatgcgcaaggaagattttcagtccttgaacggtggattattagcaggtggacaccgtcgctcaataagtttcggccatcgtttataaatttccgtttgtctgcagcagaatgactacggaggaacgatctttcttacaataatctatttgtgtggataaaaaattaaaaaaggctttgtgtcctaaaagagttcatccggtgatcggggactcaatctgtgtgtctaccgaag

SEQ ID NO: 558507 - DNA, 243 bp, Homo sapiens
gttgaacttcttgtacagttttctaaggttgacactgctatagaagacactatgttatgttcctaaaatgtttatttattttaccctgaagatccttatcagcaattgtagaaagtcaagatttgttcatcagtacaatccaaagactccatttaccagatttttcttcttttctttaataaaatttgtctgtagggcttttaaaaatcatttataaacttagaaatgtattcagctgtcgac

SEQ ID NO: 558508 - DNA, 217 bp, Homo sapiens
ccttataacaggaaaacacgatggggatgcctgcaaaaagccatattagttaaagacttcatatagaagtcgtaagaattaagaaaattagaaggcccaggccaggcacagtggctcatgcctgtaatcctagcactttcggaggccgaagcaggcagatcacttgaggtcaggagttcgcagcctggtcaacacagctatctctactaaaaatacc

SEQ ID NO: 558509 - DNA, 184 bp, Homo sapiens
  misc_feature (66)..(66): n is a, c, g, or t
  misc_feature (114)..(114): n is a, c, g, or t
  misc_feature (125)..(125): n is a, c, g, or t
  misc_feature (149)..(149): n is a, c, g, or t
  misc_feature (164)..(164): n is a, c, g, or t
acacgccgctagaggtgcaacattcttggcaccggcgccaagcacggcacccagcagcgcaacagnatttgcccaagcaatgttttccattcaatccaagcaacgcaacagtcngcgcaggttcngcaagcacgcatccagcatcaccngctcgttcagttccngcacccatcaacacgcatcg

SEQ ID NO: 558510 - DNA, 363 bp, Homo sapiens
  misc_feature (47)..(47): n is a, c, g, or t
tgtccttacctaaattatatggaacaaaaaagaacctaaatagccanagataatctaagcaaaaagaacaacgacagaggtatgacattacctgacttcaaactatgctatcagactacaagaaccaaaagagcatggtacttgtacgaaaacagacacatagaccaatggaacagattagagagcccagaaataaagctgcacacctataaccatctgatctttgacaaagttgacaaaaataagcaatgggaaaaggactccctatgtaacaaatgatgttgggataactagctagccatatgcagatgaatgaaactgaaccccaacttttcaccatacataatacatttagggttgatg

SEQ ID NO: 558511 - DNA, 726 bp, Homo sapiens
  misc_feature (68)..(68): n is a, c, g, or t
  misc_feature (71)..(71): n is a, c, g, or t
  misc_feature (76)..(76): n is a, c, g, or t
  misc_feature (81)..(81): n is a, c, g, or t
  misc_feature (93)..(93): n is a, c, g, or t
  misc_feature (124)..(124): n is a, c, g, or t
  misc_feature (536)..(536): n is a, c, g, or t
  misc_feature (599)..(599): n is a, c, g, or t
  misc_feature (634)..(634): n is a, c, g, or t
gtcaagtgatataacctattgtaaactgactatcaaactcctgggaaaacaaatttggaaaatgcttnatnatatnaattngtcaacaatttntaagatatgacattaaaagctcaggcagtanaagcaaaaatatatcaaacctaaaaacttctgtaccacaaaggtcacaaccaacagggtaaaaggcaaactgtagaataaaagaaaataccagttgagtgtcccttatttgaaatgcttgggatgtgtttcagattttgtaatatttgcactattcttactggttgagcatctcgaattcaaacacctgagtctgcgatgctccaataagcatttcctttgagtgtcatgttggcactcaaaaagtttcagactttggagcatttgggatttcagatttttggatcagagacattcaacctatagttgcacatcatgtatctcataagaagtgaacattcagaatgcgtaaagaactcctacagagagactaccagaagcagagaggagcaaacacattttcacactagggnacctgctatctctcctggattccaattagggcagagtaagtgctagttctctgccaacccagnattaggccctgcagctgcagtgaaaataatcacanaagaaaactaagaaataaaaaatggagaaagtgagacatcaaactagaattactagaaacccccaggaagaaggaaaaaaaatccaaaaaaa

SEQ ID NO: 558512 - DNA, 710 bp, Homo sapiens
ctttctctttatgttcaccaaaacaatttgatatggacccacttcttttcatatacaatattgggtgggtaaaaaaaaaaccgcgcgcacccctctcataaagaaagaaccttccctttaatgagagtcctcgcagagcttctctttgcatgcgtggtagagaaacacacacccccctacagtaaggctgaggggaccttctcaaccaagaaaacccggttgttaaaaaggttgagtcaggcaaggactctgtaagtgaagcgttaattttcttagggactttgcttcgctgttcaaaaaaatatgcgcgtagaagccccagagcccgcgggtgatttttgtgaatagacctgttatgtgaagatgggcttcatccactgaactgcataaataaccgggccttctgtacatgcatgaagcagcccacttgtctgtgtagagtgttattctttggaatataaacagcgtagccgaacagtgctgtgtaggaagatatgcctcctatgcttctcacgggacttgttccaccagcaacagttagtaccctaacctcatggtgaggtaggataagataatcaacctttctcaataatttcttccgccaattattaatgaaattaagaattcttccgctggatctaacgatgacatttatgtacgatgttttctctggagtattctataagttaaatgttaagccaatcaagacc

SEQ ID NO: 558513 - DNA, 638 bp, Homo sapiens
atcaactttggcatggttccccaaggccctcaacagcaaatcagagactcaaggaatcccccacacagaactgataaaacaatataccacaatgaatcgacctgttaaataccacccctcgcttgccgtctgcctcaagaatactcccaagattactagaggcagggtagatctaactgtgggaagcaacccctatcacttcccgagggtagattgctggctcgtccaaagatgctccccctatgagggttccggagaaactagacgctggtacttattagtatcgacgacgtctgcgggcggcaattccacttcgaggagctgcatggttgattgcaggagtgtttcccactagttgccctatctccttcaattgtagcatcctgaccaaggcgtccagtcgttggtgcggtcaatccaaatgttccatccgtcatcatagtggcagtcctgaaggagctgtgttaccagctgccataggagcagggtgatggccctctgttttcacgccataggactccataacctctgacccatagaacttcctgtcctccatgaggaagtccctgaatctccggggggcgatattctctgggaagagattttaaagggaagggcacactgggaaacgtttttta

SEQ ID NO: 558514 - DNA, 996 bp, Homo sapiens
  misc_feature (201)..(201): n is a, c, g, or t
aggggtcatgtctgcgcatgtgtggcggatcttagccggacccctactcgctgcggggcgtcctgttgctagcagcgccgggctcgtggatcagctgttatggagaggcagaccgactcttctggcaactgatctacacatgtgaactacatattcgacatccgacattggtaggtggaggtcctacgcatgcgagtgtcnaggttgcgatacgcctgagcaatccaccagcataggtggtgacgttccctccatctctcataagtgtgtgcttggtcacagctcctcatgaccatgcgtctagaccaggcgttcacacgactgtgcccctgtgttaaccttgttgtctcacagaggaggcgcacagactctccgccaagctcacataaaagttgagacgcttgctacaaatcgagacaccaggtgtgactgaagcgcgtgtctcctcgctggatcatagaaggggatccctgtgggcgacgaggcccaggttgtccccattgggctcgtgtcttccctgtatcgttgtaggtcccgcaacagaagtcaagtgttgcctttcttttgcgtagtcctcgtttcatacgcacatagccttttctttgcccgtccgcttggcatcgagcctccctccccgtattgcactcttgggaaaccgtgttgcatgcgtagggcgtggtgtttgtggcctagcgagtcgtctcactgagtctttccttcttcccccgcaggcacgtcgccagggctgcgtgtgggcctggcacctgtttttgttctgggggccgtacggttgcgtcgtgtaccgggcatggggatgtggtggcgacgggaattgtgcaacacctatctctagtcgcccttgccgtccttatatctcccagagggaggagtagatttcccccttttcctccgtcggtgcattgctgggcttaatcctcttggatccccttaggctgcatttatcacgtgggccactggtatagccgggggctgacg

SEQ ID NO: 558515 - DNA, 368 bp, Homo sapiens
ctctatcaggaagtttttctattattagtttttgatttatttccttcaattattaatattctgtttttctggaaataataccaggactgatttcatagatgctgtattctcttgaatttgtctgaggatgttcttttgagttttttatttttattttttattttttttttattttttattttgaatgttttttttttttattatactctcaagtttaagggtcacatgtgcacttggtggcaggtaagttacttatgtttccttgtgccaggcgggtgcgctgcacccaattaaggtgtcatctagcataaggtatcatctcccaatggctctccctcccccttcccttgaagatggtgggtggggtc

SEQ ID NO: 558516 - DNA, 466 bp, Homo sapiens
  misc_feature (101)..(101): n is a, c, g, or t
  misc_feature (368)..(368): n is a, c, g, or t
ccggtgtggggatcgagtccacaactgtggcatcgttcagcatcatgcgctcaaccagttgagcttagctgactgccccgggacacttttcaatcaccccngaagagaaacccacgcccacccaggagtgccccctagctccgggaaccagtctcacggcatctctgtggagcggcctattcccaacacttcaatcactgcaatcacacatgaccctctacatttggcttttctccctgggcacaatgtcttcaagctccatccatggtgcagcctgcctcagagtctccttcttgtctttttagagccaggggtctcactctgtcaccaggctggagtgaagtgccacaatcatggctcactgctgnctccaactcctgggttcgagggatcctccgccccagcctctcgaggagctgggactacaggggtgtgccaccatgcccagatcatttttaagatactt

SEQ ID NO: 558517 - DNA, 307 bp, Homo sapiens
  misc_feature (1)..(1): n is a, c, g, or t
ncccatcacacctgctcaactacaaatgtcaatattgtatgaagcattaaaagacaaacataaagtatcttcagcttttatctatcacagcagaatgaatactaaaatcagtggcatataaacatacatcaaacatctatcaaaacaaaacatacaagcaaaaaatcccaccaatcttcatgggtaaactttcctgctcaggtatgttagcagactctagaccatcacgcggtttctgcggatagcacagctcatcgatcatactgaagatcatgccaaataccatgaccacggcaatgccgagcag

SEQ ID NO: 558518 - DNA, 590 bp, Homo sapiens
  misc_feature (2)..(2): n is a, c, g, or t
  misc_feature (74)..(77): n is a, c, g, or t
  misc_feature (111)..(111): n is a, c, g, or t
  misc_feature (116)..(117): n is a, c, g, or t
  misc_feature (135)..(135): n is a, c, g, or t
  misc_feature (156)..(156): n is a, c, g, or t
  misc_feature (175)..(175): n is a, c, g, or t
  misc_feature (178)..(178): n is a, c, g, or t
  misc_feature (181)..(181): n is a, c, g, or t
  misc_feature (193)..(193): n is a, c, g, or t
  misc_feature (206)..(206): n is a, c, g, or t
  misc_feature (214)..(214): n is a, c, g, or t
  misc_feature (224)..(226): n is a, c, g, or t
  misc_feature (232)..(232): n is a, c, g, or t
  misc_feature (250)..(250): n is a, c, g, or t
  misc_feature (259)..(259): n is a, c, g, or t
  misc_feature (345)..(345): n is a, c, g, or t
  misc_feature (350)..(350): n is a, c, g, or t
  misc_feature (379)..(380): n is a, c, g, or t
  misc_feature (382)..(382): n is a, c, g, or t
  misc_feature (387)..(387): n is a, c, g, or t
  misc_feature (395)..(395): n is a, c, g, or t
  misc_feature (399)..(400): n is a, c, g, or t
  misc_feature (403)..(404): n is a, c, g, or t
  misc_feature (406)..(406): n is a, c, g, or t
  misc_feature (411)..(411): n is a, c, g, or t
  misc_feature (416)..(416): n is a, c, g, or t
  misc_feature (435)..(435): n is a, c, g, or t
  misc_feature (444)..(446): n is a, c, g, or t
  misc_feature (450)..(452): n is a, c, g, or t
  misc_feature (458)..(458): n is a, c, g, or t
  misc_feature (487)..(487): n is a, c, g, or t
  misc_feature (490)..(492): n is a, c, g, or t
  misc_feature (499)..(499): n is a, c, g, or t
  misc_feature (514)..(514): n is a, c, g, or t
  misc_feature (549)..(549): n is a, c, g, or t
  misc_feature (557)..(557): n is a, c, g, or t
  misc_feature (571)..(571): n is a, c, g, or t
  misc_feature (577)..(577): n is a, c, g, or t
anaatcattatttattcaacacacttataccttatatcattttattaaaaaataatattcaattcattttaatnnnntaaaaacttataattcataactactccaaagatnttcannaaaccacaaaagacatgnaccttcttctactataaaaanaaaattaagcacttctctnggnttnctataccaactntttcagcccattntagttttncctctttcannnctttanccactatttcatttcatngaaaagcanatatctcctaacaaacagagtgacatttaccaaaataaagagggcttctcagttagaagcttaataaagaaaaatatttacctatnctttncacaattttcttttttttttttttatatnncntctcnctctttcnccannttnnanttcanttgcncgatctcttctcacttcancctccaccnnncccnnnttcacncaattttccttcctcaccctccttattanctnnnattacangcacgttccaccatntccagctaatttttgtatttttattagagacgggntttcaccnttttagccaggatngtcttnatctcttgacctc

SEQ ID NO: 558519 - DNA, 407 bp, Homo sapiens
  misc_feature (4)..(4): n is a, c, g, or t
ctgncccctcctaagtacggacactctgcaatcacttaagctctctgaccctcagttttcccctctttgcccacaggggtacccacaatctgtcccctgcccatcctacaggacagtgtcacactcaaccagagctctctgtacagaggcaagttgctggtacagtcatcccttggcatcagcaggggattggttccaagacaccctctccgcctcccaggataccaaaatctacaattgctcaagtccctgatataaaatagcatagtatttgcatataacctacgcacttcctccctatagactttaaaccatctctaggttacttatagtattgaatacaatgtaaatggtatgtaataatttttatactgtgtttttttatttgtattctttttaaccattat

SEQ ID NO: 558520 - DNA, 172 bp, Homo sapiens
ggtatcccacccaagcaagaacagcccctgaggttatgtgcccacggagaggtcaccacactctgttagagaaaaaggagctggaaaggtggtttatatattaaggagtgcatgcttggttcagcgccaaggtcagaaaacaatgtttccacaggtcacccaagaatggact

SEQ ID NO: 558521 - DNA, 195 bp, Homo sapiens
agcgcaacgattgacgttcttcgtctcggtacgggtgcctaatcgtctcgtctgccacgcggcatgatgggagacattggcgtcgcaacgtaggttgccgcgctccattctggcctcggaaaccccaagagcgatcatgatgtcccgtaactgagccatataggcacgcgcaacttgaggtgctttggctcccag

SEQ ID NO: 558522 - DNA, 799 bp, Homo sapiens
gtgcgcgtcgtggttgaacgcgtttctgtgccgcgtaatgcccggctatgggcagctgtgactcgatgagccggatataggcgcatggaaggttccctggaagtgggaaggcgccagtgggggcactggccgcgtgctaaagcagatgctcgtatgttggcgcgcgaaaagacaaccaggtccgggggctacagacttcaactcgcgtggtgtgaattaacgcgtcactgctggaggccttcgttcaccatccgggttccaagtaaccaaattcgggcgcgtctgtacagcaagtcaaatgccatgatcgagaagccaagctggaagtcacgtgtcacaggatgaatgctgcatcacgcggaactgacccatagacgccggccagtataccaggtgacagccatttttgctgggatatacatcacaacctcatcagatgcagtgaatccgtgagactcattcgctatcacttgtgcagcacaatatggttggacgtatggtgatcacagctggtcggcgtggaggaagacctcatcaagtgctggcgctcatgtacttggggcgagtttagcctcagtgtggaaggagctcctgggagaacgggatcaactaggatcggaaaccgtggcgtggtgccagtgatgaattacctggaaagtttgatggactggctgatgaccagttctggacagatggtgatggaggagaacacagagggtgttatgtggagcttttaagattgatcggctggctgggaagggatacagacggagtcgggtattagggccaaaagaaatac

SEQ ID NO: 558523 - DNA, 737 bp, Homo sapiens
  misc_feature (97)..(97): n is a, c, g, or t
  misc_feature (147)..(147): n is a, c, g, or t
tctattgtgtctgttgtctgtcgcattgtgttgtcatgatctgtgtcttggttggtgcttgggttgacaacaagcacccccatttctgtgatgaggngcccccacccccccgcctccacgatcgcggagagactctcgtccccaagnagcaatgcatgggtttattccaccgttctctcgttccgaccggccggtgtgttccaagcgccgcctgggtccacccacattgtttgtggcccagaccgcgcccctgctcacaccacctgggcgaaaccgagctgatcctctcatattttctgtctgggggcacaaccacatggagaatcttgggcgccccgagcaaaccccacaacgcaggctgcccacgggcctcggaaccgttctcctctggtgctgcaaccccgacggtaaataatgtgggagcccccctccccgggaaaagtttacccagccacacagtttcggtgtgggccttcccttagagggaggcaaagagattcacattcacgggggagattctggggagccctggtgttgccaaggcacgctcacaaggagatttgttcctcgggggacagctgtgacgccagacaaggacaacgcctgcggcgggtagcacgccacagcggtcgatacatagtcattgcaaacaggctgaagggagccaccaaggccccccccctaagccccccattatgttttggattcttaaacccaaaaaagaccccggaaataaa

SEQ ID NO: 558524 - DNA, 305 bp, Homo sapiens
  misc_feature (60)..(60): n is a, c, g, or t
  misc_feature (65)..(65): n is a, c, g, or t
  misc_feature (111)..(111): n is a, c, g, or t
  misc_feature (124)..(124): n is a, c, g, or t
  misc_feature (160)..(160): n is a, c, g, or t
  misc_feature (171)..(171): n is a, c, g, or t
  misc_feature (200)..(200): n is a, c, g, or t
ttgagcacgaatgtcaccgcccactcgcaggtgcgaaacaagcggtaagctgcgggtatngatcnggttgtcgctggatttggcttcactttcttggggtgaatgggctcnaggtttccacggntgggattcgttcgctcatggtcattcgctcatcagnctccatcaggncgacgaactatgggcgacagactgtttgnataacagactcaggtggggtgataaaaagcggatcagatcagcttgaagcgttcttgtgcgtcaatctggtgtgacacattcggtggtccagggtaccgagctcg

SEQ ID NO: 558525 - DNA, 654 bp, Homo sapiens
  misc_feature (611)..(611): n is a, c, g, or t
  misc_feature (654)..(654): n is a, c, g, or t
gatggcctggcccgggcctgtgctgccttaggagactggcaaaagtcagccacccatctacagaggagtctctgcgtggtggaggttcgccacgggccgtccagtgttgaaatgggccatgagctcttcaaattggcccagatctttttcaacgggtttgcagtacccgaagccctgagcacaatacagaaagctgaggaggttctgtcgctgcactgtggcccatgggacgatgaaatccaggagctccagaagatgaaatcctgtttgttggacttaccacacacccctgtagggcctgcattgtagggttccaggaggattttgacccacagaaaaggagcccatggaacacaagttaaagaggttttgctggccaggtatggtggctcacgcctgtaatcccagcactttgggaggctaaggtgggcggatcacctgatgtcaggagttcaagaccagcctggccagcatggtgaaaccccatctttactaaaaatacaaactagccaggcgtggtggtgggcacctgtaatcccagctacttgggaggctgaggcaggagaatctcttgcccaggaggcggaggttgcagtgagccgagatcgctncactgcacttcagcccaggtgacagtgtgagacttcatctcan

SEQ ID NO: 558526 - DNA, 156 bp, Homo sapiens
  misc_feature (138)..(138): n is a, c, g, or t
gttagtcacggtctggtcttcagctacccgcttcgtcttccagtttgcgactcgcggaccgcgttcccgcgcgcgaagagggctttgactctggatttcgtttgccctctagcaatggctgtccatacccggaagaanaactctgtatatgtttgg

SEQ ID NO: 558527 - DNA, 406 bp, Homo sapiens
  misc_feature (351)..(351): n is a, c, g, or t
gatggcctggcccgggcctgtgctgccttaggagactggcaaaagtcagccacccatctacagaggagtctctgcgtggtggaggttcgccacgggccgtccagtgttgaaatgggccatgagctcttcaaattggcccagatctttttcaacgggtgagtccctttcccacttcacagggcacacactgttcctttcctaggctcttctgggtattactttttttctatggtgtttttaaaagcatgttgaaacttctttatttcctctttaggagagatctttgccttctgttttgctaacaaacataacgctttagaatttcctcctgggaggcggagcttgcagtgngccaagatcgcgccactgcactgtagcctgggcgacagagcgagactccatctca

SEQ ID NO: 558528 - DNA, 600 bp, Homo sapiens
  misc_feature (557)..(557): n is a, c, g, or t
  misc_feature (600)..(600): n is a, c, g, or t
gatggcctggcccgggcctgtgctgccttaggagactggcaaaagtcagccacccatctacagaggagtctctgcgtggtggaggttcgccacgggccgtccagtgttgaaatgggccatgagctcttcaaattggcccagatctttttcaacgggtttgcagtacccgaagccctgagcacaatacagaaagctgaggaggttctgtcgctgcactgtggcccatgggacgatgaaatccaggagctccagaagatgaaatcctgtttgttggacttaccacacacccctgtagggcctgcattgtagggttccaggaggattttgacccacagctcacgcctgtaatcccagcactttgggaggctaaggtgggcggatcacctgatgtcaggagttcaagaccagcctggccagcatggtgaaaccccatctttactaaaaatacaaactagccaggcgtggtggtgggcacctgtaatcccagctacttgggaggctgaggcaggagaatctcttgcccaggaggcggaggttgcagtgagccgagatcgctncactgcacttcagcccaggtgacagtgtgagacttcatctcan

SEQ ID NO: 558529 - DNA, 110 bp, Homo sapiens
ctgggcgtatatactgagctggtggccactgaagcaccacagtgcagtgggaagaaacaatggagagacaagctgggtccccagcctaggaaacatgaggtgtggcagcc

SEQ ID NO: 558530 - DNA, 533 bp, Homo sapiens
agtgattctgctctatgaggtacgtgtactactgtataggggttagcaggagtaggcacccgatatatgttcttctaggcctttgtagattaacatggagttgttcctttggccactatatatgctgatatctataagaataggtgattattgtagacattaagggaatgggtactgttctaaaatggaatgcccctacaagtgttacctatggcttataactggaagagtctacaatgttacccagcatgctgttggcattgttgtaaacaatacaagttaagggcaacgattcttgccaagtagaattaatgtgcgtattgagcacattaagcactctaagagtccgtagatagcttcctgaaatcgtgtgataggaataatgtatctagtaaatatagatatagaagccataagagaataggtacctgggttctaactaatagcgccaagcctgcgtcctatcccagagaagcacactttgtgagtacctatgggaaggagcctgagctgctggaacctattccctatga

SEQ ID NO: 558531 - DNA, 205 bp, Homo sapiens
ggcgtactatgtatcgcccaacacacaatgattccatttatagcctggccatgaatcactgggaacaatcattgtatcaggatccactgaaaaggtgttggggagagggattttgcatgtcaacattaaggacacataaggattacgtaaaggccttagcatatgccaaggataaagaactagtagcatcagctgggttggggat

SEQ ID NO: 558532 - DNA, 155 bp, Homo sapiens
  misc_feature (12)..(12): n is a, c, g, or t
  misc_feature (96)..(96): n is a, c, g, or t
tcatataggttnctttctaaaaaaagtcttcttgctattcaaatgtacgtccgagatcatgagtgctgtcgttctgctgctgacttctggatgacnctctaagttggtttttgcattggctgggtagtaaggtagcaagggcttttggttttcat

SEQ ID NO: 558533 - DNA, 263 bp, Homo sapiens
gcggccgcctactactactactactgctcgaattcaagcttctaacgatgtacggggacatgcctgtaatcccagcactttgggaggccagggtggggagatcacttgaggccaggaatttgagaccagcctggccaatatggcaaaaccccgtctctactaaaaatacaaaattggctgggggtggtggtgcacgcctgtaatcccagctgctcgggcggctgaggcaggagaatcgcttgaactggggaggtggatgttgc

SEQ ID NO: 558534 - DNA, 100 bp, Homo sapiens
ccttgttgtatgttcccctacacacttataacctatggtaagagttctaatgcttgacaacagattttaaaggtcacagaacagttttaatttttctctt

SEQ ID NO: 558535 - DNA, 216 bp, Homo sapiens
ttacaaccccacgatcaccgggttggtgtacaataggcgttgattagtagtagttactggttgcacattgtttgtcggtgtctatcttgtcattcagattgctcggtgggactaggtcatgtgattaggagttgggttaggatgagtgggaagaagaaagagaggaagtcaagtttaattatgcctttctgggttgaggtgatcgtggggttgtga

SEQ ID NO: 558536 - DNA, 635 bp, Homo sapiens
  misc_feature (505)..(505): n is a, c, g, or t
gccgaatgtggatagcatgagtcatggtcctacgctaccttatggtcgtgtgccttaacatgggccacgaagtggccaaaaacgttagcaagcccaggcacagccgacgtcgtgtgcgtctgatcaaacacactaagttctagcgggacatgatttgataggtgtgtggctttgacctgtacgagcggcgcgccatggagctactgaaggtttttaaggacttacggggcctcaaatttgtcacgaaaagggtggatacgcacatttgagtcaagaggaaactttaggagcttagcaacgtactgatcggcatgaggaaagctgctgccaagaaagactgagccattgcgctggcctgtgactgtagtaatgaacagcttgaaaaaaaaaaaaaaaaaaaaaatgcggccgaaattagagctcattgggccaattcgccttataggggagtcgtttacaattaattggcgcgggttttacaacgtcgggactggaaaaaccttgnggttaccaaatttaatggcttggaagcaatatcccttttcgccagttggggtaataccaggccccgaaccgatggccttttcccagttgccaagcttgattggcgattggaatttggtacgcgttttttt

SEQ ID NO: 558537 - DNA, 469 bp, Homo sapiens
tctcgtgctcctgggttgcagtgattcacccggcttggcgttccaaagtgttgggtttacacatgcgaaccattgtgcctggccaccttgtattgttttaaatagcatacgttaaaaagagtgcagaacactgtttgagcattgtcatttaatgaatcagcagtgcatcagactttcataggcaacaaatttggtgattaaaaacatgtcactgtcagcatctctggactgcatttcaatagtggtatgtgtaccatgtgtcccaaccattcacacagttctctgtatcatctttcatcttgagcttctctccatgtgcatcatctgtacgttaggatcatgtttctggtgaacgtggtatagctataggtaattgtatattgcaaacatttagcaaagggccttctgcagctgaaggcttctgagggagccatgcagaaattgaagtatgcaacttctccttttccca

SEQ ID NO: 558538 - DNA, 517 bp, Homo sapiens
  misc_feature (13)..(14): n is a, c, g, or t
  misc_feature (18)..(18): n is a, c, g, or t
  misc_feature (24)..(24): n is a, c, g, or t
  misc_feature (333)..(333): n is a, c, g, or t
  misc_feature (337)..(337): n is a, c, g, or t
  misc_feature (356)..(356): n is a, c, g, or t
  misc_feature (412)..(412): n is a, c, g, or t
  misc_feature (447)..(447): n is a, c, g, or t
  misc_feature (473)..(473): n is a, c, g, or t
  misc_feature (479)..(479): n is a, c, g, or t
  misc_feature (498)..(498): n is a, c, g, or t
ccattcgaatcgnnctcngtaccntgcagattccttccactcgtatgggttggatacgcgggtgaatcataggaatcatttgcgtggttcgcgtaggacataaccaactccgcgcagggtgtgcaggtatttcacgtcaccagtgtcaatttttttccgcagatacgaaatgtaggactccactacattggcatcaccattaaagtcgtagtcccacacgttatccaggatgcgtgccttagacagcacaacccccgcgttcaccatgaaatatcgtaatagggcgaactcagttggggtcagctcaactaattcccctgccttccacacctngtgngtgtcgtcatctagctcantatcggcgaacgtgaggtgattactgggttgaccaaaagactgcgatcactacgcncgcaaaattggtccgtagcccggcaatacttcttncaagctaaaaggctttggtgacgtantcatcnggccccaaggtcaatccgnggacgcgggcttctatggg

SEQ ID NO: 558539 - DNA, 287 bp, Homo sapiens
gacccaagggcaggagcttgagaccagcctggcaaacccccaaaaccccatctctacaaaatacaaaaattagctgagcatggtggcaggtgcctgtagtcccagctactccggaggctgaggcaggagaattgcttgaacccaggaggtggaggttgcagtgagttgagattgtcccactgcactccagcctgggtgacagagtgagactgtctcatatacaatacaaaacaaatgaatgtaaaacatttagtgaagtgactggtagctagtgagggctcattaag

SEQ ID NO: 558540 - DNA, 311 bp, Homo sapiens
gagacaagatctcactctgttgcccaggctggagtgcagtggcacgatcctctagcctcgatctgctggactcaacgatcctcccacctcagcctctcaagtagctgggaccacaggcatgcgctactgtgctgggctgattttttaattttttagagatgttatcccactatgttgcttaagttggtcttgaattcctggactcaagtgttcctactgcctcagcctcccaaagtgttggaattacagatgtaagccaccgtgcccagctctgatttacgtgtatttctgtccccttctgtcgtcttctc

SEQ ID NO: 558541 - DNA, 1496 bp, Homo sapiens
  misc_feature (337)..(337): n is a, c, g, or t
  misc_feature (339)..(339): n is a, c, g, or t
  misc_feature (409)..(409): n is a, c, g, or t
  misc_feature (426)..(426): n is a, c, g, or t
  misc_feature (841)..(841): n is a, c, g, or t
  misc_feature (1101)..(1101): n is a, c, g, or t
tggtggtcccaaatttttggaaaattaattacagcacttacagaaaaaatttcaaacgggtctccccgaggcgttttggaaatttcatctcccaactgtgttaggcgtgagttgacctgtaagggttgtggacagacgtgccgaagtctccaaaagctttcagacatttctccttataggtgctcgggactcttactctcaataattctcctgtgatctcacagggggctgtgagaaccgctctcaggagacacatataattgtgtctctccctcccattttctctcttctctccctctccctctcctgtgacaggcttgtgatggagaaagattcncncttctattaaacggggggcggaccctctctctgtagaaattctcggctttctcatcctcagagatgtcgncgtttgaacaatataancgctgtgactataactcttggagagcgcggagacgcttttatgagcgcgtggggcgagaatacaagtgcgcgcgagattctctccctttcgggcaacacgcgcgcggcttttgtccccgtgtttgtcgagaagctgcttccgtgtttcggccacagagggcgccgcgttgttgataaagatcacttttttctcttagttagaattagcacccccggggcgcccgcgcctattctatctcaccggggtgttaggggggtgagcgagaaaccggcggcgcccctatgtgtggggcgcggggggtccctaaccgaggttgcggggagaacacctatggagaaagggcgagaagagatctgggcgagaatacacccgcggtgcccccccgagaaagggagaggagggctcttccccccncccaaagaggagaggagaattcctccgggtgtccccaaaagaaagcggctcattgaagaacccgggcctttaggcccctattaacacaaaagaggggagagggtgtcacccccggagaagaaagcccgccttggttgacacaagggcgagaattaacatatacccccgcgcgtttgtacgaaagcagaagcggcgggggagggcccacaattcccttttggggagagagaggaggcaccataaccattattgggggaccnctttataccagggtgtttccttacggagaagaattccgaggcgcagggggaagaatccccggggggggaaacaacgtggggggggcacctcattactggggagaccccgcggaaaaaagtagatatagttggcccacgaacaccatagtgttggccacgacaaaaagagcgggccgggacaacccacggggtgttctgttttggttagtcagagggggcccttcctcttgtgaagagagagggccgcacaaaataagcgatatataagggcggacaagcaccgcccgggtgagtttggtgtggccaacacaactgataacacagggggggggggggtccacccctgtggtggtgttgcccgagaaattgggagggaggattgtgggtgtcccaga

SEQ ID NO: 558542 - DNA, 400 bp, Homo sapiens
  misc_feature (90)..(90): n is a, c, g, or t
  misc_feature (103)..(103): n is a, c, g, or t
  misc_feature (114)..(114): n is a, c, g, or t
  misc_feature (247)..(248): n is a, c, g, or t
  misc_feature (295)..(295): n is a, c, g, or t
  misc_feature (311)..(311): n is a, c, g, or t
ttcatgtgtctttctgtagacatatctgaagagatggattaagaatgctttggattaaggattgtggagcacatttcaatcattttaggnattgtcaaaaggnaggattgaggnaggatcagatcaataaatggagcgcaatggagcaaagcgaggcacctggaagataaaccgctggagcaatcctccttggaagagattcaggcacgaggtagatcggtaaacattataaagggagaaagggggnnggttgtgttataaaaatagtaaactcacgtaatgtcacttcttaaantttaaagaaaaacaanaattggagttgaagaaataagtaggtttccaattgggctattgccgttttctttgaaaaaataaacattttttaaaaaacaaaaaaaaa

SEQ ID NO: 558543 - DNA, 903 bp, Homo sapiens
  misc_feature (513)..(513): n is a, c, g, or t
aactctggggctcaagcagttctcccaccagcctcctttttatttttttgtacagatggggtcttgctatgttgcccaagctggtcttaaactcctggcctcaagcaatccttctgccttggccccccaaagtgctgggattgtggtgctgagctgctgtgccagcctgccatgtttttatatttcactgtctttcattcttgaatttccacagtgttttagccccagagagagagagccctggatcggagaactacagagggcccctctcaaggggcgaacaagctgggggctactgagcgtttgtgcgccactctgtagaggacgatatggtgtagctcctgtatagacttatctggggtgccttcttcactgatattccccgtcgggatgattatacctgtgcaatggggggagggaaatccagtgaaacttgattctcgagggaagatgtggggtgcagtaacgtgggtgtgtactataatgctttattgagctcagagggcaagtatngtactcctcctccaggatctaaaaataggtgcctaaagtggctgcagtcaaaggacagagcggaagctatgacagagcgggacttgggtgatgtatcgctgagccgactgccatgacatccttggccgttgaagtctgggcctggcagatgtccgcggactagttgaagctgcttgagggagtggaattggacgggaggggggcgtagacctacatctctctgtcaagattctctggccacgggagtggaagggggagggttcgcccgcattcttgtgttgtttggtctcgcacagaaaccccgcacggcttgcggtgtgtcactacgaccgcacaaggacccccccaatgccgcggccgttttttgtttggattggttgtcctaaccgc

SEQ ID NO: 558544 - DNA, 247 bp, Homo sapiens
gtcccccccatcctatgagaccagacaaaatcttggatcagatcctcacctgctcacacactgggttctgcacattttttcaggctttgtcacacactttccaatttctaagtgtacaaatgttagcctctctgggcttcctatctctaagaaatcttgaatctctgaagtatctttctttctttattttttcccatgctgtacagcaagaggatcacgtaactcttacatgagaccgctcttacgg

SEQ ID NO: 558545 - DNA, 228 bp, Homo sapiens
ctacgtacgttgagtttggaccgatatcgcttgctaccagttagttctcatgcgactaatgttcttcttcgttctatgctactccgcgagatagcgcagggaccgctctgattgacagatgattattcgcacaacaacggcgatacttcgagtagggagagcattatgtatgtctctcttgtgaggactagttctttaggtggtggttagagaatagtatctgtttct

SEQ ID NO: 558546 - DNA, 604 bp, Homo sapiens
ccccccagttatttcccaagtgaaaaagtgttataatatgaccagatgttttttgattgtaaagccggtaaatcttttgagagtgtaaaagcccggctaggccattcgccacggtaaaacacaccggggttaatgaagggcttattaacttgtaggggaacccaactgggaaagaatcccgatccagatattttcctgcaccaaaaaaaaatgaccccgtagaccagcatccaaaatgtggtgttcttgttaagtaattgatcgtggtctttgctttaatcttagttccccccggcacggtggctcaccacctgtaatccccagcaactttgggaggccgaggcgggccagatcacctgaggtcaggagttcgagacccagcgtggcccacatggtgaaaccccgtctcttactaaagataaaaaaattagctgggtgtgttggtgggtgccctgtaatcccagctactcgggaggctgaggccggagaatcacttgaaccccggaggccgaggttcccgtgagctgagattgcgcccctgtactcccgcctgggccaccaagccagactctgtttccaaaaaatacaaataaaaaaaatctta

SEQ ID NO: 558547 - DNA, 178 bp, Homo sapiens
cgttgccccaaactgtgacatacgaaggacatgctttattacacaagcaaccataaaacctgtcccttaagcttttgaccgtgtttgtcacttaaatatatgtagcaggaagcgggctcctcttctcatccatgtcgttgcaggtggcagcgttagcaggctttgggtgggcctggag

SEQ ID NO: 558548 - DNA, 481 bp, Homo sapiens
cccagcggccgctgcggcgcgggcgctggcgcagcccgccagtgcgttctgacttcgaccgtcgagttccagaacgtcgcggctctcgaaccgcacgattgaacgctcccgctgcgggttggctccttttgccgttgctgccattcctacaatgccttatcgtcctgaagccttccatatcaaaagatgcatgcccagtgcaccatatgtacaggtgaataccatgataaagcagcatactgcagtataatgcctcacatgccgacataacttccatctggaatgtatagacgtatggtcacaaaaacaaactaattgcacaaatatgtcttatctcattgcaggaccaaaccatggatgcaaaatctacagcatcccctctccgtaccctcactcaaatatagggacctgaccgagagctctgtcaatagatcgcctacattggatacttccctatccaaacgtgaccatgtgggaggat

SEQ ID NO: 558549 - DNA, 1433 bp, Homo sapiens
  misc_feature (417)..(417): n is a, c, g, or t
  misc_feature (466)..(466): n is a, c, g, or t
  misc_feature (468)..(468): n is a, c, g, or t
  misc_feature (475)..(475): n is a, c, g, or t
  misc_feature (1433)..(1433): n is a, c, g, or t
taaaagtatttagcttttaatgaaactccctccttgttggtttcaaccccccaggacacaggcccccccaacactctctttaattctttcttcctctcagcttctttctgtgcttgaaaaatttgtggcctttcacaattagacaggctgtgctttgtggagagcttttccctttctcccagaaactttgtgtagttaccccagattcgcacccacatatctcatatgagtgtgtggagagcacacgccccgagtctctgtgtgtgtttttagacacagacatatctccacccgtgtgtgtctgtgttctccactgtgacaccacaagagtctccacacaaattgtgtctcccagaggtgtgtgacacacagtgtgtgtgtgcccagaacaagactctctgtgtgtgtctcctctcntttatagagtgtgtgtataatgtgtctctctctatatatcacaaatctntntctctcncaacaaatgtatatgcccgctgatggtgtgtgtataatttgtgtctgcgaaaagttgtgtatctcgcgcgtgtgtgtgtgtatgtgtagcacaaacacacacacacacgcacatcttatatccgcgcgctggcgcgcgcgcgccgggagtgtgttctatccgcggtgtgtgtctgtgcgctctatgtgtgcgcgcgcgcgcgtgtgcccccgtgtgggctctaccacgcgtgttgtgcgccctctatatgtgtatctccccagagagtcgtctatctcactctccaggctctcgtgagagtgttggccattttgttttgtggctcttcagagagaggccccgcgcacaaattctctctcacacacaatctcgtgcttcccccccccatttcttgttgtcaggggtttttcccccagaggggagcctcccctctcagagcgccccacacaaaagagaggaggggggccgcccctgttgtgtgccccctgtgagaataaaggggcggcgccaaagaatagcctcttgtggtttaagggggcctattgtagaaagcgcgacacaaacgagggcgcccccggagcgagagatatttcccgaggaaatttataaagcgccccccagggggcgccccccgggggccatcctttgtttgtaagccgcgggcggggcccccctccttgccggcgggagattccaaaggagggccaagccccggggagggtgtcccccccccaaaaacagcagacaaacccagaggccgccgggggaggatcaaccaaggaagagcgcccggataatcctcttctccaccacagaaaatggggttctcgcagcatagagcactcagacgaaaaagttgacatcccctgggtcctctttttcgacacccccaggataagagggccccgcgttttttcgcagccccaaaaaaccgttctaaaaaaaaggggtgggcccn

SEQ ID NO: 558550 - DNA, 729 bp, Homo sapiens
acaacaaaatatgactacgcgtccttcgtaaaacgtcacgaggacttctctaatttaggtatttggcactagtgcatggatccttagttcatatgagggacaaagtttctcagtcagccccactatccatatacttactaactcctaccttacccttgacagaggaggtagtagagattctggaattagtctatttttatgaattccattatttttgtccatggcatactctaatgaaaacagtgttctagaataaatgtgagtttgattatgtctgaacatgtactaattaactacaaaataaacgttagatgatcagcctacttcctctataaacaatgaccaattagacgtttccgtaattccatgtattatgtatatgtacactctataaatgtaaatgtaatgctatgtctaaaaagtgcaatttattgtacattgtacccaaccaaatgtttactttcataatcgttatgaacttgaatcggtcttagctctctatgtgtacatgtgtgacatgaagccttgttgcatactacaccatattgcaactgcgaacgtgtacaagggtgactagcatatatgtagagccagtgaatgtattcaacagcttttgtgatagccactttcggacccaataaagcaggtaataaataattgatctgaagttcacaaatatcgaacatacactcactcctcttcgattattcaactctcacatataactct

SEQ ID NO: 558551 - DNA, 165 bp, Homo sapiens
tgcaaggtgtcttccaggtagatgtggtgttcactcagagcctatgtagacatgcagccagcaccttctcggtaacatactgtcagcgcattcaagtcatggtccccatcaggaggatctcaggctcaacgatggcacaatgccatctgttgcagatactgccat

SEQ ID NO: 558552 - DNA, 180 bp, Homo sapiens
actgttcgaccaggttgacgtgaggcagaggctgggcctggaggggccaccaatgatgcaggagctgggcctggaagaggctgcaatagtaagcatgaggctgggcctaggtgaggtcaacttgagtaaagttcagtggcctggatgagaaggctgcggaggcgaggagctggtgtctaa

SEQ ID NO: 558553 - DNA, 188 bp, Homo sapiens
taaacccaccatcacaaaacacaaaattttgcagcgaagagaaatgaagaaaaactgaagaaaaaaaaaaaaccgggaaaaacaagacccatacaaaattttcccaccacccatacccgagggtggcatttgccccccccggtattgtgcaggacaattcaaaccaagaagcatttaaaacttacccg

SEQ ID NO: 558554 - DNA, 833 bp, Homo sapiens
caagggatggcactgtgacattaggcacagggctaatgtgtgtgtgtgtgtgtgtgtgtgtgtgtgtgtgtgtgtgttgtgtcgtgtgtgtgtgttttgtagggacagagtctcgcttttgtctcacaggctggatgtgcaagtggcgtgcatctcagctcagtgccactctccgctctccttgtgttcaaagggattctccctgcctcagcctcctaagacagtgctggagcatctactggacgacgacaccaacgacgcgctggtctaatttaatatgatgtggatcagcaggctgcggtatctcaccgatggttggcccagggctggtctcaaattcctgacctcgaagtgatccacccatctctgtctcccaagatgtgcttgggacttacaggggtaatgacgccactgctgcccggtctgtacactagtgtatttcatcaaatctgcaggatcgactgcagggtcatcatgaaaccatgaaagacgtgacacccggcactatcgcgcgggggaacatctatattcgcgacttgtcaatactaccatcacttcatagtcatacttactcgacctactctatactcatccacatttcactacaactaccatctatatatgtcaccagactcacttcactacctaaataaataatgtcgcacaataccgcatctggtctttctttacaagccctcgatcgccagacggctagctgaacccatttagtaggggtacgtatacaagggcccagcttcttaagctggtcatagtagaagtgaccgacgatgatcagtgctttaaaaaatgttttacaagtgaatcccagcagt

SEQ ID NO: 558555 - DNA, 461 bp, Homo sapiens
  misc_feature (312)..(312): n is a, c, g, or t
ctgtattttcagtagagacagggtttcttcatgttggcctggttggtctcaatgtcctgaccttaggcaagccacccgccttggcctcccaaagtgctgggattacaggcatgagccatcacgcctggtgaatggtgtcattttgatgtactgagccatctcagtttttccagcaaccttccctcacctttgtggtcagctagaaggtcagttaacacatgggatgggaattcttgccaatgtccttcgtaaaagaagaacttctccttcactcacatgtcctgatacttcctcagcatttcattctagccnttctgtctccatccaccatctatcaatcatctatcatctagctatctatcgatttctcttttttggctttaattttgtcactttttcttctgtctgctatagaaatagcaaattttctatgtaagaaaactccgaacgctagcccaaat

SEQ ID NO: 558556 - DNA, 307 bp, Homo sapiens
  misc_feature (94)..(94): n is a, c, g, or t
  misc_feature (148)..(148): n is a, c, g, or t
  misc_feature (160)..(160): n is a, c, g, or t
  misc_feature (229)..(229): n is a, c, g, or t
  misc_feature (248)..(248): n is a, c, g, or t
  misc_feature (285)..(285): n is a, c, g, or t
acatcagagccagcaacggtgccctgagaaggcggttagggcgtcacgactttccaaggggccatgccttctctccacccaaatgacacaagantctatctttaaaaggcacaggaaccacagacaaaggttaagtgacaagcaagtnttctcaaggggnctggagcgccacgcagaccctgccttttcgtttcaatgcactgtctttgctgaggccataagcaggagncccaccaggcggtcttctnttggtttctgacctcacttttcagagggaggggaganttagaaggcttggcaggaaaaa

SEQ ID NO: 558557 - DNA, 179 bp, Homo sapiens
  misc_feature (28)..(28): n is a, c, g, or t
  misc_feature (37)..(37): n is a, c, g, or t
gagcaggggggtggaggccacccagagntggtgttgncagagggaggaagaaacagcatcaagggaccgggcatggtggctcacacctgtaatcccagctgggaggccgaggcaggagaatcacttgagcccaggagttcaaggccaccctgggcaacatagcaagaccctatctatac

SEQ ID NO: 558558 - DNA, 886 bp, Homo sapiens
gagctcgctgttcgtccgggtttgtgacgttgtaaatttccaggacttgaactgcgcatgtcgctctgaagaaggaaagctcttcggtggagtagggctcaacttataagaccgacgagcaggcagggagaagagcacttcagcaggtttcggacctatctctgaggtggtcgtgtcaaggatcgggagactcagtggtccagggtgcggtttcatcaacttcagcatcccaggagcatgcttcagttgccatgagagccatgaagcgggagcagtctctggatggtcgtgcagatccgtgtggactcatggcagggcatagtctagctcggggaaccagaggaggtggcttgtggcccatgggcgtggtcgacatggatactctagtaggtggtggggaccatggttatgggagtggcaggtatttatgaccagtcgaatctggtagggtatggatatggatatggatcggttccagagactataatggaggtagaactcgagggtggtatatgaacggtgactcaggaggtaattaacatgagaacatgttatgaggttgaaattgtgagtgcgttaatgattagatacacaaggactcatttttgttccaggattgtccttccaacggcttactgataagggttcaggagcggaaggagcatttatcatagatgtataactgggttaaatgtgcgccgggtgtgtaactttataacggtcatccttttttaaacttggcgccatgggccacttgggggctgcacgtggtttgtagcaatcgtggcaggtttgggaaaaagctgtggggcacgcccatagtctgcgctcccacggtggtggcccatagagcaacacaaaaggcgcgccttaacggcgtcgcact

SEQ ID NO: 558559 - DNA, 263 bp, Homo sapiens
ttaggtattgatcaccttcttaagagatctgtatatcaggtagtgcataatctgcacttagcattggctatgcgcacggatgtttctccttcccacgccagtatgccacatgatgaactttcgatggttgtcattgatgtcagttgtgaactttctgtaataacaaaggcagtccgcattcttccctttcccccgaatttctagggtcaaaaactttagttatggcgcttgttaatcatgggatgtacacaaagccggccatg

SEQ ID NO: 558560 - DNA, 305 bp, Homo sapiens
  misc_feature (39)..(39): n is a, c, g, or t
tgaaaggtattggctcccctgttttggtgtggactcaantgcaagtggtgtttaagaggtcaggaggcctgctgatcttttcaaggacaccccatatgtctactcatagaaagggcaagtaacgtgttcattttggtcttgaatgtccaaactcaagggttggattttggccaattgaaatcagacatatgcgatcttgggtttttgcatggaaattaatgtaatgcttataaatgaaaaatgaaaacatttcaaccatctaagtcaaacacaaaaataataaaaaaagaaacatactggccttg

SEQ ID NO: 558561 - DNA, 136 bp, Homo sapiens
actccccccccgacctacgcccgacgacgtaccttcgacgttcccttacccatttccgaccggacgactcgtgactcctcaccggaccactcgtgactcctcaccggacactcgtgactcctctgggtaccgacgc

SEQ ID NO: 558562 - DNA, 795 bp, Homo sapiens
  misc_feature (152)..(152): n is a, c, g, or t
atagtgtgcacaggcggtcgcactgagcaggagttactgatcccagttgatagggtggaaaacaatggctgtcgcttgcctgcttatacagctatgcgtttcttctgcatgatccagtgtggagcagagactgtgaagaagcggtgccgtcnaggcccagtgctatagtgagttggattcatccagtaccttacgagtgcaacacacgaatcttgggtccagacatgccacccttgacgcgctccaaaagaccgataggatcatcctcgtgagggaaaatactagaagaattaaaaatgctggtgaaagtaggaggacgtctatacgttgccactatgagaaatgcttgagcgcctctttgagattgcacgtgtgattcgtacgcatagaacgtaggagactccgacgaagaaagaaccgtgctgcagggaaggggcaattatgaccagaggtacaaaccatacatttccgagtgaaaaacgttggccttgaaacggagaatggttgtccctcaggagaagatgagaaaggcctaatttaaatatgcagtgaatcctggaggaggtgcaagaaattgtgggttatgatctaatacctgacaattgtttttgcagaggacgaaggtggtgacaggtagattggtagggaagttgcggatacgaatgcactgaaattctgaaaggaggcttgattgacgagaacttgagagtcctgactaaatttgtgttcggggagaacctggatttttttttccaatttgtcatttttaagatatttcacggaggaattgtaact

SEQ ID NO: 558563 - DNA, 262 bp, Homo sapiens
aaacttaattttggaagttttactttcgagggtgaggaaagggtgaaatgtcggtatgtaaactttgtcgccaaaaagccccaggagaaatgaaaaaagaaacaaatcccttcagttaaaatgccaggggaaaaacacttttgaaaaacaaaccccgaaaagcccaatgtgtttttatggggttgagattttttaaaaacgagttttggaaaaaagttttttgatgtttacaaagttccccgtgaataaagggcaactggga

SEQ ID NO: 558564 - DNA, 146 bp, Homo sapiens
ccaacgaagatactcatctctctggtccagtgatctgtgagtgaagctggagaatcggacagatgcatcactgggtggatggcgttgtttaagaaaaagtgcaggaggatgagttccgctatctgaatgtaccagaactcaggtct

SEQ ID NO: 558565 - DNA, 275 bp, Homo sapiens
gtctgagaacaaatggcacagcatccctgccaggatcaggaacaaaaggtagaaatgacctccaagcagcagagaagcacatccatagaagagacaatgagaccacaggaaaaacaggtaaccatcactgaaaccctgtgggaccaggtgctgacagtttttaaggatatacaaaaggagctgcaggaagatgctcggattcgagggatgagcaactgctccatgacacccatgacatcagcacccaggactggaagcataaggcctccagattc

SEQ ID NO: 558566 - DNA, 277 bp, Homo sapiens
cctgctttctttctgttcccgggtggcatcgacccgtcggagagtaaatgccaagtaaggtacctgccgttggcagattttgagctttcttcttggacacctaatacccacagtcctccagtaaatcccaagcaaggtacctgccgtcagcagatttgagctttcttcttggacacctaatacccacagtcctccaggctccggtagattgcaaatgacctgctttctttctgttcccgggctgcgttcggacccctgtgggatagtaactcccaag

SEQ ID NO: 558567 - DNA, 196 bp, Homo sapiens
gaaagtttttccccctttaaaatatttgggttttgtttaaaaaaagttttgtccaaaacccaaaatttaaaaaaatggctgaaggttgttgcccggctttttaaaaaaaaatttttttaattgtttttgtttgtttgtttttcccttgtaaaccagggcccagggattgccgcaatttaaccccccttttgcccca

SEQ ID NO: 558568 - DNA, 420 bp, Homo sapiens
ccagcctaggtagcaaatcgagaccccccccaagtttataaattattacaaacgaaagacgaaaatagctgggtgtggtggctcacacctgtaatcctagcactttgggaggccaaggtgggtggattgcctgagctcaggagtttgagaccaacctgggcaacatggttgaaaccctgtctctactaaaacaaaaaaaatcagccaggtgtggtagcgtgcacctgtagtcccagttacttgggaggctgaggcacaagaattgcttgaacctgggaggtagaggttgcagagatcatgccactgcactcccagcctgggtgacagagcaagactgtctcaaaaacaacaacaacaacaacaacaaaacaaaacaaaaaaaacctctcaaaaaaatgaaaacaaatttaaatttaaatt

SEQ ID NO: 558569 - DNA, 238 bp, Homo sapiens
aataagagtagggggggtgtgggtgtgtaccagagaccgagagcatgagtggggtgtgctcgtgtgcgtggaattcgtgtgtgtgtgtgtgtcttgtatatatgttgcgcagagtgcatcattttcagactctactatttccaatcaagtttctgtttgatttggatcatctcaggatcggattctgttttagagtgtttctgggccaggatccgggcccctgtcctcctctgcacct

SEQ ID NO: 558570 - DNA, 362 bp, Homo sapiens
  misc_feature (206)..(206): n is a, c, g, or t
tactactactaaattcgcggccgcgtcgactccgcccacaccgtcggcctcggcgtgcagaagaacagcggcaacagcgacttcccgtacctggactccggcctgaacagcggtgccgaactccagggcccgggttcgggcgccgacagcccggcactgaccaatatgcaattgaacaaattccagcacgcgggtgagcgcagctngctggcgcagtacaaatatgacttcgcccagttgggtgtgaatggcctggtgttcgccaccacctacgtccatggcgaccagatccgtacaccggccgatccgaatgccaaggaatgggaacgcgatatctccctggcgtcgacgcggccgcgaat

SEQ ID NO: 558571 - DNA, 973 bp, Homo sapiens
cgttccgtcgaggcggtcagttgtttgcaacaggttcaccctcgctgtatcgggcgctggcggtccggttgtgtacgccctgtttgcgtgcagctgtcgcccgccgcgttcttgtggtgttgtggtgccgccccgagtgcccaatgtgggtccgccccgccctgtttttcgcgcgctgtagccccgggtgtgttctctcccccgggcatgctgggggttgtttgccgggaccgccaaaggtggcaccccgggggggttctattcgtggcatgcctttttaggtgccccctctttgggggcaaacttaggtcccacgacctcgggggccccaccgagtgggcacccacgatgggggaggctcgctgacggggccactccattttgtcccgggaggtgcttcacagcccccacctggtgcgggaactctccggttattcctccgcctgcggtctgacaggaccaaaacccacggttttgcccccgctattggacctggggcgtttttccgcccgttgatgcccgctccccctccgctgcgctgtagcggttggcagtctctagtattcaacctccccggcggcctccgcttcgctcgtactctccggtttcaggaggttgtgtacgccccccccatccccccggggggaacaaagaccacacaaccatgtctacgcctggctcataaataataaacatcacagcaccccccttccttatatagacccacacaaccacaatcatcaatcgtatgtcaatacaacgcaccaggtgacactcccctccctttttcaagccccctcacccactcaacactacttcttttagtgcaccacagaaaatcacacctcccaccactattctatcacactcggaatagtttatagggcgagaaaaaagaaatattcatcttgtcaccatttaaagaaatgaaaaaattccccattactcccgggttccccttcccccacataac

SEQ ID NO: 558572 - DNA, 660 bp, Homo sapiens
taacaataatgtcaagttaaatctgccaaattatcaagtggaatttggtggagcatgttttggccggggtgccccacagtaaacagaggttccttgaaatgatcaaggggtagggctgaaaatgggcactggccctagccaggtgaggtaggacccgggcagggaagggcagagatggtgaggccctgaggtcagtcagacaggactgaccagggaacaagccatgaccctcgaggacccaggggcacaggctcccagatgatagcccctcttcgtgaatgagcacccaggcaacacagctccggggctggtgtgtatgcaaaccgtgttcagcagattgccttccgtgggacaaccacccccttataaagtgctatctatctaccaggacaaattgaaagcctcttctataccccagtctcccagggcaccccccagacagagggctctgaaattctaaaagacgagttcaaaaacagcttttcaagagggggatccattattgaaacagtgggtgaaccgtgacatacgtattcgggtcctcaaagaataggggaggataaccccactacacaaagggaacaagcaaccaaaaaccacaaaaagaccaaaggataagaagaaatggaaaaggagaggacggaaggaatgagaggaaaa

SEQ ID NO: 558573 - DNA, 326 bp, Homo sapiens
acatcaccagagctcaccatagtctaatagaaaacaaccgaaaccaaataatccacgcacgggtttatacacaatttacacggggtctctattttcccctccctacaagccccagagtacttcgagtctcccttcaccttttccgaggggcatcaacggggtcaaaatttttggtgagccccagggcttccactggacttcacggtaataatggggctcaactttcctaggctatctgggttcatccggccacctaatatttcactgttacctccacaacatcccttagggcttacgaagccgccgcctggatactgggctttggg

SEQ ID NO: 558574 - DNA, 417 bp, Homo sapiens
agcaggaaaagggagataaggatccagctagctactttaacttttaacaacgatgtcctttaaaaatgtttgtatttgtatgcatactcatgtatgttgtgtatatgtgtatatatacacagacacacaaaatacagagtaactgcagtctgacattcaattaagctacagaatgcatggtattggcatacatttttattttatttatttattttttaattaatttttttgttttttgagactgagtcttgctctgttgcccaggctggagtgcaatggcacggtctcggtcactgcaacctctgcctcccgggttcaagggattctcctgcctcagcctcccaagtagctgggactacaggtacctgccattgcgactggctaatttttatatttttagtagagatggggtttcgg

SEQ ID NO: 558575 - DNA, 749 bp, Homo sapiens
ggagaggctctgtctctcgcttcttaggcggcccgaggacgccggtgctcgagttgccctgactgtcgcagggagcagtcatcgaacatcgcggacgcgcatgtgggcctgggtagaagttcgatgctatttggacgataagctgtcgcctggtgggtccttatctcatctgacgataccaggataggttacagttagctgggtgctctggcgtggaggaagatgtcgctccgtgggagaagtggctatagaaccccaaccggaataggcccataagcctgcatgcctatcatgtgtgcagcgtctacccgtgatgggatgataccggagtcctcataactccatgtttctggcgctataagttgtaccactggtcaagagttgacggcgtgtagttacatgcttctcgagtctgtctgccagatgactgagtgtcttgagcatggaccgtgtctccgttgtacaacccacgcggccgtgacgccatgcgtgcatgccataccaagtgggggatgtcgtgtatctggttcaccgttcgttgactatgcctgtgtcttctccaccacgctggggtctgggagagaagtggtacacgtgccacgcaggatgagactctatctcagggcctgtaggacctgcttgtattccagtctgctcgtgcttaacgttaccactcgtgccaaggaggatccatcttgcatagcttcttcaggtgccagtatcggtgtctcggtttctcagtggatgat

SEQ ID NO: 558576 - DNA, 770 bp, Homo sapiens
tggagaaagtagtaggggttttaatggtcaacacgagagatcataatagaagacacaaataaattaatgggtctcataatttaagatgtccaggggcctcgtctagggaaaggccaggttcttatacagacaaggtactatccaaaacaaaaaacgcgcggtattaggaccgaccacgggttgcaacgaccaaccaaagtggaacctggtgccaccagtggacaggacgaaccttaaaacacacggggggcttcctggtattgtccactccctcagataaggtaaatgttgtaggcaataaaaggggatagaaggctacatatttgggcgagaccgcgtgggtcgctggcgtagcacacacattcccggtacatttgggggacaccaacaaggaggacagggggtgggaccacagggccacacaccaaaagaaatcctcaagaggacacaatatcactaatttgggaaacaattccatgggcaatgggcacacctgtgggcgcgacaccgaacgactgagtatcgggagcacacaacaattgggtctccccgcggcacacctcgtcagaggaccataaccgtgtggggacaataaccgcaggggggagaaatcaccaagagggagcccccaagggaattgccccctccaggggggcatacaagcgcataccagtacaagatgtgccccgggacacaaagacgaaaacacgacaggatcccggggacacgcgcggggagaaactactgagaaacacacagagggggggcac

SEQ ID NO: 558577 - DNA, 375 bp, Homo sapiens
  misc_feature (17)..(17): n is a, c, g, or t
  misc_feature (78)..(78): n is a, c, g, or t
  misc_feature (96)..(96): n is a, c, g, or t
  misc_feature (169)..(169): n is a, c, g, or t
  misc_feature (208)..(208): n is a, c, g, or t
  misc_feature (234)..(234): n is a, c, g, or t
ggcaactgagtttcccnactgtctagcattcaaaattcagctgtggtcccaagggcacctcctggcggtaaaaacaancttaggcgtgccgggtgncgcgcctcacgcctgtggtcccagcactttgggaggccgaggcgggcggatcgcgagttcgggagttcgaacnacgcttggccggcatggtgaggccccgtgtctgctgaanatgcaggaaatagcccggcgtggtgncgggcgcctgtggtcccggctgctcgggaggctgaggcaggagaatcgttggaacccgggaggcggaggttgcagtgggccgaggtggcgtcactgcgctccagccctgggtgacagagcgagactcggtctcaaaaaaaa

SEQ ID NO: 558578 - DNA, 276 bp, Homo sapiens
  misc_feature (3)..(3): n is a, c, g, or t
atngtgggcatcatgcaactccatctcccggctcaggcaatcctcccgcctcagcctcccgagtagctgggactgcaggcttgcgccaccacacccagctaattttgtatttttttgtgagggatggggtctcgctatgttgcccaggctggtcttcaactcctgagcttgagtgatccacccacttctgcctcccaaagtgctgggattacagatgtgagccaccatgcctggcccatttatttatttccttattgcctgccatgcccaacatgg

SEQ ID NO: 558579 - DNA, 81 bp, Homo sapiens
gcggccgcctactactactactactgctcgaattcaagcttctaacgatgtacggggacatggagaaaccctgtctctacg

SEQ ID NO: 558580 - DNA, 117 bp, Homo sapiens
  misc_feature (48)..(49): n is a, c, g, or t
  misc_feature (96)..(96): n is a, c, g, or t
  misc_feature (116)..(116): n is a, c, g, or t
gaccccagggagagctgaccactgcccgagcagccggctgaatccacnncacaatgccgctctcaggaacccggcccctaataagaagaggaaatncagcaagctgatcatggaant

SEQ ID NO: 558581 - DNA, 107 bp, Homo sapiens
cgacgaggagacattgcggcggcgccggtagcggctgggtctggatgccggccgagggagagggtcggcagccacagtggcggcttgtgtgtgcggatgtggtgctg

SEQ ID NO: 558582 - DNA, 169 bp, Homo sapiens
gtatcagcagtgttctatgagaactcccagagtagtggctcccaacaatttaagccatagcgaaatagctactgggctccctggcctcgcaggccaccaaggacggcaagaaggacaagaaggaggaagacaagaagtgagactggagggaaagggtagcttgagtctg

SEQ ID NO: 558583 - DNA, 156 bp, Homo sapiens
gtgactctgaggatccgttttgggtgcctttcctaaaatcttttcttctgaattatctggttcttttcaatagtttccagaaaagaccaggctttgaactactatcaactaatcagagaacatttctattttcctcagagccaaaataaccaaatt

SEQ ID NO: 558584 - DNA, 889 bp, Homo sapiens
  misc_feature (889)..(889): n is a, c, g, or t
ggtttttttttggcaaacgccaccgccgagaaaaaccgtgtgctatagccatggtcaaccccaccgttgtcttcgaattgccgtcaaggggacctttgggccggtctcctttgactgttggcagacaaggtgtcccaaagacagcagaaaatttccggtgctctagagcacttggtagagaacgggattggcgtctataagggggtcctgcttccacagatttatcccagggttaattgtcgtcaggggtgttagactccacacggccataattgcactgttggcaacgtccatctatgggcgagaatttttgacggatcaaaatttaatcctaaaagcataccggggcccctggcatcttgtccattggcaagagtgctgtaacccaacacacaattggttcccaagttttccatctgcacttgccaataactgaattgttggcatggcaagcttgtggtgtcgggcaaagtgaacagaggggcatcgaatattggtggcagcccatgacagcgcctgggggccaggaatgccaagcaccatgaagaagatcacaattgcttgctttgtgacacaacctcgaaataagttggaactccgggtataaattttacaccaccaaaatacattcctttcttggaggctcaagagaagaagacccctcacacccaatttggtccgagtatcctaagaatcttgtgtggctcacgagggaagtcctttaggagtcccatggtatcttattccctccaatggctagttgattcgagacgctacgttttggttttcagagcaagacgtcttatacccttttctccaaacaacacatcaaaaaacaattgttggctcgccgaaagatttatacaactttggcgggcaagtaagactn

SEQ ID NO: 558585 - DNA, 210 bp, Homo sapiens
tctatgaggatccccgggcgtctcatgatacaaggacggagctgctcggctgagtacatcccttatgaggctgggactacaagctcaacgtcacctattgtgtgcatcaacgtgccaggcagtcctttcaagggccctgtgcattatgtgaccgatgcgtccaaggtcaacgtgctctgggcccgggctgtagcccagggattgttcgtg

SEQ ID NO: 558586 - DNA, 717 bp, Homo sapiens
tgggccctccgtcggttctctcgtaggtccacgtgtcgtggtcttacagtttacccgccttcgtctccgagttgtgcagactcgcggaaccggggtgttcccctggccggccgaaggagggctgggacttcggagaatttctgtttgccctttgacgccaagtggctttgccaattccgtgggcaaggaaaacctggggtggattggtgggggtagacttggaagcccttgtgggacaaggacatttgctttgtgcctcacaattacgttctttcgcgacaaaaggggaaccaaagttttccccccaagaaggcgtggttattgtggcccacaaccaaggctgggttttgggaggcaacctcatttgttggcgccccgagaattaactcggaaggggttgtggcacattgggacaacacggcagcgataggaacggtttggggagcatctgtgggtgggggagaacccaccagttggtctatttggccgagcaggccgaacagggcaatttttacgttggaattccctgacctgtttgatagtggggcccccacattagatctcatgataagccccagaggatatttaagccccgggaagttggttataacataacctgtggcactgtgggatggcttaatagatatccccaaagttgcggaaaagggaggcgctcccctattgaaacttaagggttcctgcaaggaaagcagaagt

SEQ ID NO: 558587 - DNA, 324 bp, Homo sapiens
accctgtacgatgactactcttgaattggagtgtgtgcaggtcacttcatggcagcttctctgggcagcaatctgctctttgagcagcagcagatgctcgtcttctggaagctgagctctctgaatgaggtcttcacacgcgaatgccagagaacggcagaccgatgatgagcggacacagacgacagggtacatctgcagcgcaatgctcatcctgagctagatgcgggcatctcatacacatgcttcaagtaccaggactgcgactctttcctgtttgcgggcccctttcaatccagctgctgcttcaggaagtaggaaaca

SEQ ID NO: 558588 - DNA, 115 bp, Homo sapiens
ggaatcgtgctggtgcttgtacatgggtattgccacatatcatataatgtaatgctaggtgtcagtggtaggaagtttctcatagtgaggtgtatgagttggtcgtactggaatc

SEQ ID NO: 558589 - DNA, 160 bp, Homo sapiens
ttgtggtatattagagctgagcaagaggtggtgaggttgatcggggtttatcgattacagaacaggctcctcttgagggatattatgcaccgccacggtccttttagagttttaaagctagtggcctcgtagctgttcttggcagagcgagggtgttcct

SEQ ID NO: 558590 - DNA, 631 bp, Homo sapiens
agacccaaatatctttcacagaattttgttccataaatgtttttcttaattattaagaagtgttaccttattaaaatgaccaccattctaaaccatttttcagtggtctggatactaagtttacagtttcataccaactatctaaaacctaattgcaaattgaccacagacctctaacctcctacttttatagacttgaatacttaagtaattcaaattaggggtggcatttcattcctttcttatctaaatcttagtttcctggaataataaagcttgatggtcaccaagagaactgcttgagtttaagccattttcaaaagaaactcgccttttacattattgtgttccagaacattaagtgactgtaggtactgggtataagggatggtaaactttgtggtgctctttatgaaatgatccatataactggtgggcgcattagagctttttaaagggggcttggtactattgggggaacatatgtatatccatggttaagagagtaacttgggtgtgggctggttccctggatttttatacataaaaggtgcccaaatgtgttctcaaatgaagggaagcctttcttttttcaaagaagcttttaaaaactgaacacccaaggttaaat

SEQ ID NO: 558591 - DNA, 135 bp, Homo sapiens
ctcctgttcacccaggctggagtgcatagctaccactgtcagctcactcgcacacctcatgcctctcagattccagtgattctcctgcttcagcctcccaaggcgctgggcactacatgtagtgtgccaccaaca

SEQ ID NO: 558592 - DNA, 267 bp, Homo sapiens
tgagggctcacgccagagagagtccagcacagcctttccctgccaggaacaccgacgacccctgtgagccagctgcagtcggccccgctccagcagctcctgcacctgcttgttcgctccaaacacatcccacagggacagctgatgctcaaactgctgccagtgctgttgagtgatccccacatcggtgcagagccgcaggaccacaactttctccagcagctccagtctgcccagggggacacgcttccggtcgccatggccaaa

SEQ ID NO: 558593 - DNA, 231 bp, Homo sapiens
tgggtcttaccacaagtcgaaattgtgggccacgagaatccgcgatcaaaactagatggcaggccggctcatataaggttcatctggcacaaagctacaggagaacagttgtggaacacaaggttgaaagttctgctggtgtctatcacgaagctcacggcaggatgttaattctgaattcccagagttcaattgtgacccaaagcctagtacaagtttttttccatcaca

SEQ ID NO: 558594 - DNA, 353 bp, Homo sapiens
  misc_feature (16)..(16): n is a, c, g, or t
  misc_feature (36)..(36): n is a, c, g, or t
  misc_feature (46)..(46): n is a, c, g, or t
  misc_feature (62)..(62): n is a, c, g, or t
  misc_feature (111)..(111): n is a, c, g, or t
  misc_feature (251)..(251): n is a, c, g, or t
aaaaggggaacgaaanaaaatctctgatggagtctnactctgttanccccaggctggaatgnagtgggacgatctccgctcactggaaagctcccacctccccaggttcanacccatcctcctgcctcagcctcccgagttgcagggactacagcacccgccacaatgcccggctatttttttgtgtttttagtagagatggggtttcactatgttagccaggatggtcttgatctcctgacctcattacncgccgactccggctcccaaagtgctggaattacaggcgtgagacaccgcgcctggtctccatcaaatgactttttaaataaaatacggttctcacctaaaaa

SEQ ID NO: 558595 - DNA, 727 bp, Homo sapiens
  misc_feature (12)..(12): n is a, c, g, or t
  misc_feature (123)..(123): n is a, c, g, or t
  misc_feature (135)..(135): n is a, c, g, or t
  misc_feature (181)..(181): n is a, c, g, or t
  misc_feature (195)..(195): n is a, c, g, or t
  misc_feature (206)..(207): n is a, c, g, or t
  misc_feature (217)..(217): n is a, c, g, or t
  misc_feature (221)..(221): n is a, c, g, or t
  misc_feature (227)..(228): n is a, c, g, or t
  misc_feature (246)..(246): n is a, c, g, or t
  misc_feature (264)..(264): n is a, c, g, or t
  misc_feature (270)..(270): n is a, c, g, or t
  misc_feature (288)..(288): n is a, c, g, or t
  misc_feature (291)..(291): n is a, c, g, or t
  misc_feature (366)..(366): n is a, c, g, or t
  misc_feature (381)..(381): n is a, c, g, or t
  misc_feature (453)..(453): n is a, c, g, or t
  misc_feature (471)..(471): n is a, c, g, or t
  misc_feature (478)..(478): n is a, c, g, or t
  misc_feature (610)..(610): n is a, c, g, or t
  misc_feature (613)..(613): n is a, c, g, or t
  misc_feature (636)..(636): n is a, c, g, or t
  misc_feature (655)..(655): n is a, c, g, or t
  misc_feature (707)..(707): n is a, c, g, or t
tccagcctgtanctgtacagcattcagctctctgggacaacacagtctgtgggcaggctgtagtcacatctcttagcctatagagtatcacagctgtcagtgtgaatagtcctgatggccacngtgtaaaaggtntttgtggtggagagaagctaaagtaggaaggatcttttgaagcacnaacaaatggggtanctgaacagacnntctcagtatnaccncatctnnttcaaaaatagcacaccnactcccttccaaagtgcntcgttncactgcaccatcgtgganganatggaagagcaggatggatttggctggctggagtcacatcttggggaagctggccaggttggctttgccacaggngttgttcttatttcnagccatgaggatatatcctttgtttccccagttttctccccagctgtttttaattatccagtgcttgtttcncttctggattccatatcntactgtnaaaaccgcatggttcagattatcgctattgcagctttcatcataatacacacctttgctgtaaaactggaaggaggtcaggcttgcatcaatggccacagagacaggtcccactcgggccactgccctcttnagnggctttctcattcccctcggggnatctctctgtaccctctgnattttagctgccttgcctgttggggttgtacatacaactctcttcctgtccnacatatgggtaggcatcttc

SEQ ID NO: 558596 - DNA, 1307 bp, Homo sapiens
gaggttgtgaggaacctgcagcgcggccgcaggaccgggccgctgagcctgcagccgccccgcgcgtgacctgcgatcctagacccctgactccctttggctcagcccgcgcgccccagtgcccggcccgggctggcgcgacagggaggatgagcgtgcgggcggcggaaggaggagccgcctcagccgcagctggccaactggggccctcaaagtactccgatctggagtacaggtgctgcgagagcgacgcaggcctgcgacggatcacggatgaactttcattagctgtgatcctactggattccgacaagcatcacttgctgctggatcctgggctgtcaatctggaggagatttttgccaattacgcaggcgttctttcgcggaactagccagcgactcctgccctgcattcaactgcacggcagtacctgataacactctaacctctaagacaaatatacctaacacgactccgactcgaccgacagcacctatcgcgttgcacacacatcggacgaaaccttacaccgaacgcggcacgcggctacacctgacccctcctacgcacaccctcacgagcaccgccagagcatcccctctcaggggaatgccatacactaacacacaccagccctggaacaaaccccactcgacctcgaacacggcaacagggaaggccaccaacgaccatcacccacaacagcgggccacacgcgcctaacgcccagcgacgacagacagaggacaccgccacactacagcacctcaagagcaacgacccacggcgagacccctcaggagaccgaaaccgagaagcaacaaaacaacacaaacgacgcgcacctacacgcggcacgcaccaccgcgcacagacaaacaccaacggagacggaaccacagccacacagcagagaaacaccgccgcaccaccaatcccaagcaaacgacaggacaaacggaagcgcacacaacccaacacaaaataaacaacagatcgagcacagccggcaagagaccggtggaacagcaagtgaacacgaaaccgcttacaaacaacacgaaaaccaaacccaccgcgcagcaacagataagaggaggcaaaaagcgacaagaataaccacgcacaaaccaccagaacatccccacaaccacaacacaaaacaacacaataaccaatacccgccagcgcagctaaccacgcgaagcagacacgaacgaccacaccgaaaccacaaatacagccaacaagaaactgccgaaaggcgagagcccgagcacacagaaccaccatgacaaacgacc

SEQ ID NO: 558597 - DNA, 365 bp, Homo sapiens
agaaacgcgctccttggcggacactgggggaggagaggagagcgcggtaacttatccgaaatgccgagatgcgttttagcttggttactttgctgagcgaagaggcaccgccccgtctcggccggtccatcaacaacggctcccccaccatcctgggcaagcgcatacgagcagcacaacggggtagacggcttatgaaaagcgcctcttgatgcccagtagggtctggcaaaccacggacagaccaggcacatggtaagaggaacaacccatgatggggtacggtgcgctcacccatgagctctctggggtgttgggaagaggctggcagccctgccaggtgccacgtggaagcttcaggaggc

SEQ ID NO: 558598 - DNA, 1108 bp, Homo sapiens
caagtagctcggactacaggcgtcctccaccatgcctggctaatattttgtattttttagtagagacggggtttcaccgtgttagccaggatggtctcgatctcctaacctggtgatccgcccgcctcggcctcccaaagtattgggattacccgcgtgagccaccgcgcccggctgcaaataatctttctttttttctgagacagagtctcgctctgttgcccaggctggagtgcagtggcacgatctcggctcacggcacgctccgcctcccgggttcacgccattctcctgcctcagcttcccgagtagctgggactacaggggcccgccaccacgcccggctaacttttcgtgtttttagtagagacggggtttcaccgtgttggccaggatggtctcgatctcctgaccttgtgatctggccgcctcggcctcccaaagtgctgggattacaggcgtgagccaccgcgcccggcggcgaaacacgatattgtactaacatcttaatttggttataacaatctcacaagacccctgacatagtctcagagatctgtagggccgaggtacattggagaaccgtactctagggccaaatcaattcttcttgcctggctcacttgtccccccacggcccgcgctggagccactgctagtcttcagcgctagaagagagctcgccagaactcctctcaaggccatcacagacagggctaatccttcctccatgaacaaaggctcccgccaactccaggacgaagaggctgtgaccttagccgggccaccatggcacacgggcgagaaaaaggcggcgcgacaacagcggagacggcggccgcccgcattgaggcgggctcccacacgatgtgtgctccatagaccgatcaacatctcgaaaaaacgagagcagccccgcagtatcgggaccactcgctaacaccgcgcacggacacagaggaacatacaggtcataatcagcccatggcgcatcagtctagcttacatacaacccagaggacacattcagcgcgcaccgacacagtagatcatcgatgctagaaacaagtagatgcctccacacgacgagtcaatttacgcaggcaca

SEQ ID NO: 558599 - DNA, 955 bp, Homo sapiens
aatgctggcgcgcgcggcgcgtggcactggggcccttatgctgaggggctctctactggcttctggccggctccaggcggccgttcgttggattggcccgaaccacgtgtatgttcgtgcccgatcggggacccttggttggtgaacaaagtggctgccggattaccaccggatccttgcagccgtgtattgaaccatctgtcatccctgttgtgagatcgggatccggattattgtgcagagtcttcaaggaaattgtgtcaatcaacgtgccttgaagacaaggtcggctgtgaacttcttcgaacaattgtagcgtcgtgcaaactcggatggagtccctataacctggccgcatttcagtggcgacccttttatcgagggggcaaatggcataaaccgcgttggtaggaagggaaccccttgagtgaaattgccccggaccaccgccaaggtttatggcctcaagaacatatagcccatttagaggaatcgaggagcgcttcggggaaagacgttcgtcttcgtatgagaaacaaagagtgttctacccccgggagacagcaggcacgatgtttccccattgaagttgcccatggcaattttggttgggaatttgccaactacaaacccaaggctttgtcctggaacttggctgggcggattatacccagagttgcccctcccgcttatgcaggaatccaggcgatttatttccgagttgttgacaaccccctgggttttgaacaaagaagttcttaattgcaagattgcagtggttgcaacggacacgatcgtggccgagaaaaacgggggtccaccaggtttcctagaaagttctggaggggggacccgaaagaaggttcggccaatcaagttgtggccaaaaggggataaaacgacggccagaaaatctgggcccccggaagacaaaaaagagcgtcacacgataatt

SEQ ID NO: 558600 - DNA, 170 bp, Homo sapiens
ggcccccccccccccgggtggggggggtttttttgttttttgggtttttttgggggggggggtttttcatgttacacccaaatcgggatttatattttatttgtttccctttcaaggggatcatggcaaatggccagatttttttgttaataatggggtagggtttggta

SEQ ID NO: 558601 - DNA, 1368 bp, Homo sapiens
gtgtggtcgggcactctctgtgcgtattgagtatcgcagcatcacgtgtgaggaggcacctcccgctgacgagattgttgttattctcccctcctctatgtgccccccttattgcgataggtcgcccttgtgtgactggagaatgcgcaaccactagtgggtattgctgtcgcttgatggattcttgtatcaagttgcttcggcgcgaggaacgatgctcgcggtgaaaatggtgttggttgagatattcttgttacatgcgctatcataataaggattccgtcgactgtatttttcgtgggcgtgctcttctgttgggggggggctccgcccacgccggggtggttgagcaaatggtgccctcaccataagtgggtgggtccctactctgctcctcctctttggtgctacagtgggtttatatccccccgcggtggtcttttgtaatagtaggctgtcccctcctcttgtgtggcgctgttgtcgccgctcctctctccgtggtagaatagctaccctctcttgtggtgttggtcttatgctgtttggcgtaacctttgttagtagctatgttggtttcccactagcggaaccgaggaatattgttgcggccgccccctgttggtcagttttatgtgcgcctgattttcttgtggtggggttcgccccagtatcgattggtgccgttcatcctcccgccccacgctggggcagcattatcggcgggcacataaacaacccactctggttgggttcctaattggttggtctcccacgaggtggcgggggcgctgtgctccttctgtgtcttggtccccccttgtgaaagacgtcgtattccaagagcacatatgggcgcgcacacaggttgtttctccctccaccacaagagcgctgtggccacagacacggttggtgggcacacagaggatgcactccgtgggcccactatatgtgtacgatctcgcttgcgcatggcctcttgctcacccagagtgacgtctccaagagccacaagtgtgtattttctggaatcacagcccaaggggttctcccacgattttgtccggagatggagcctcctggccagggacaccctccaacacccggttgtggtgcagaacaacaggggttttcccccagggcactgggacaaaggagaccgagggggcaggcccagaagctggggctctcgagatggccggaccaaggccctgtggctgcctatgggggactgaatagcctgagcgcccacctgactgccattttggaccacctcaccaccaaggggaaacgcaccccccggaaacctgggaatttccccttttggttccagggtttccccataaactttttgacccaccctta

SEQ ID NO: 558602 - DNA, 1662 bp, Homo sapiens
cgtgacgcgtggagtcctggactaaccaccccacgacacgccctcccacgtgcgcaggagggctgtacacgatggtgagtgagtcggtgtgggacctagagccggtcttgaaagacccgcgtgctgtgcgtgcacaggcctgacagagatgacaccgcacatcgagacccatgtgtaccaagggtgtgtgtaggctggaccagtagcctaggtgtacaagacatcgcgataccacggtgactagaagtgtgggcacacgtgactgtggacaaggtggcctatctactgagcagggggacattacggagtgtaaggcacaagcatggcatgactcacaagagggggcaattcggcccctgagtgcaatgtcactgcagtactgacacaaggaggcacaaaaagcctcaaggaaagagataccccgacgaggcgaggatacgagtgagtgcgtgcagccaacgggtaagatgagtccttcttctcagatcttatagaagccataagagcacgtggcatatcttaggggcaccgggaaaagggcgggcattgccacggtcatcaaacagtagttaacccacatgggaaagcagaagggcagaaggagtaggaacactacaacaacgggaattgcccccagaatacacgaagacacccaatgatggaggaacccaaagaaaacaggtaagaacccattacatagagcaaacaaagagacgagtaacacaaacaaactcgaggagaaaacaaggatgaacaccagaataaaccacgagggcactgcgtcatacccctgaaggcaggctaggggaacctgcaacgggggacataggataccagcctagagaaaccacaacatgcgcaaagaaagaaggagcgcagtacacccattagggagatatccagcgctcgagccagaaatacctacacacgaaacaacaaggaaatacagagggaagcggacaaagtaagacaggacaagggaataacccaccaaggatgtcagacgaacacacaaggagagtgcaatgaggcacaggactgacacagatcaagcgggaacaaaaggggcagcaacgggatagacaacaaccgagtatagtagaacgacagccacagaaaaaagagacatccacagagcaacaaccacaagacaacgacaataggaaacaaatgcaaaaacaacacgaggagaagcaaaagagccaccgagagaaaaaacgacacagaagagaatgacaaaagagacacagacgaaaacactacaaggaccagagacaatgaaggagaacagacccaatagcacaacgagagaccgagagtgaacgaaacaaaagaagagcaggcgcaggacgaacgaaagaagacaagcgagaacaagacagaggccgcgacagagcacaggaagaccaggagacagacgagacacggagacaacgcgaaatagcagaacacagaagccgacacagagcaagagcagagaacgcggagaagggagcaacacatcaccaagacaggaagcccacacaaaagtgaggaaacaaacagaccaagagcacgcacaacgacagagacacgagaacacgacaagcagaccaagcacacagacgacaagaagacaggacacagcagacacacacccaagagagcagaaacgaaaagaca

SEQ ID NO: 558603 - DNA, 193 bp, Homo sapiens
acagaggcaccaaggagcataaacatcacacactagggtttgacatgaaatcggattaatggaaggcatagcattaggagatatacctaatgtaaatgacgagatgatgtgcgcagcgcgccagcctggtgcatgaatacatatgtaacaaaactgcacattgctcacatgtcccctagagcttaaggtctga

SEQ ID NO: 558604 - DNA, 300 bp, Homo sapiens
aaattaaaaaaaatcattttaagaatttactaacctttgaacgtgccagtaagtaagtatggcgagaaaggcaagacagagtgggaccgatcgatagcgcagcgttcggtttggcgccctttcagcgtgcgcagagaacgtgcgctcggatcgtacgattgtgcaggattcgcgcctccattttttcaggagagagcgggataccaagagaaccggaccagctgctggcagggaaactgtgttccttttgtccaagatgtacagaaccaaagtgggcttgaaggaccgccagtagctcta

SEQ ID NO: 558605 - DNA, 116 bp, Homo sapiens
cactactgaagagctgaggtgtggacttctggacccacgcttcccatctcggaatgtactaagctgcctgcccacgtctttgaagaagtctttgcttcttaattttcttattaatt

SEQ ID NO: 558606 - DNA, 885 bp, Homo sapiens
  misc_feature (6)..(6): n is a, c, g, or t
  misc_feature (96)..(96): n is a, c, g, or t
  misc_feature (188)..(188): n is a, c, g, or t
  misc_feature (211)..(211): n is a, c, g, or t
  misc_feature (270)..(270): n is a, c, g, or t
  misc_feature (318)..(319): n is a, c, g, or t
  misc_feature (327)..(327): n is a, c, g, or t
  misc_feature (336)..(336): n is a, c, g, or t
  misc_feature (340)..(342): n is a, c, g, or t
  misc_feature (367)..(368): n is a, c, g, or t
  misc_feature (383)..(383): n is a, c, g, or t
  misc_feature (396)..(396): n is a, c, g, or t
  misc_feature (441)..(441): n is a, c, g, or t
  misc_feature (490)..(490): n is a, c, g, or t
  misc_feature (493)..(493): n is a, c, g, or t
  misc_feature (519)..(519): n is a, c, g, or t
  misc_feature (549)..(549): n is a, c, g, or t
  misc_feature (587)..(587): n is a, c, g, or t
  misc_feature (656)..(656): n is a, c, g, or t
  misc_feature (728)..(728): n is a, c, g, or t
  misc_feature (738)..(738): n is a, c, g, or t
  misc_feature (746)..(746): n is a, c, g, or t
  misc_feature (787)..(787): n is a, c, g, or t
  misc_feature (803)..(803): n is a, c, g, or t
  misc_feature (872)..(872): n is a, c, g, or t
gcggcnatggacccgagccgccgccagccccacggaggtgatccgagcggcgaagaaggacgagtactaccgcggtgggctgcggaggcggcgggnggcgccctgcacagcctggcgggtgcgaggaagtggctggagtggaggaaggaggttgagctgctctcagatgtggcctactttggcctcancacacttgcaggctaccagaccntgggggaggagtacgtaagcatcatccaggtggacccatcgcggatacatgtgcactcntcgctgcgacgtggcgtgctggtgacgctgcatgcagtcctgccctanntgctgganaaggacctnatannnctggagaaggagatgaaggatgaanncgaaagtaggcgaancttgcaggggagnctggggccaggtgggcgtggctgatcaggggcgcggagctggatnagtaaacacaaggcacaccctgacatagagcagcagaggagggagctgntgngggaggtcttcgtcctcaaaaagggnctcgcctgaatccagcggctacatgttgcntggttttacatccacggtgtcttctaccacctggccangaggctcacggggatcacgtacctccgtgtccgcagcctgcccggagaggacctgagggcccgtgttanctacaggctgctgggggtcatctcactgctgcacctggtgctgtccatggggctgcagctgtacggtttcangcagcggcancacgccangaaggagtggaggctgcaccgcggcctgtctcaccgcaggncctccttggaggaganacccgtttccagaaacccctgtgcaccctgtgcctggaggagcgcaggcacccaacagccacgccctgngtccacctgttct

SEQ ID NO: 558607 - DNA, 349 bp, Homo sapiens
  misc_feature (180)..(180): n is a, c, g, or t
  misc_feature (248)..(248): n is a, c, g, or t
tttgcactttgggaatgagtacataactgtatgatcacactctgcaaatgccacttttaaagctgttaatagactttgcaccttttctttgacaaggatgtgtcatatttaaatttttacattcatcatggctacaggtagaactggggaggggggaataattttttatgggaattttgntaggaaaagagactagtgatttatatatgcaagaggtttggttcaaaatgggttttttagaactgggnatttcgaatgtggcatgtgactttattttatttttagaagcaaatttggatgtgacctgacagacatatttgcttgtaatagtatatccaactttgaagat

SEQ ID NO: 558608 - DNA, 452 bp, Homo sapiens
  misc_feature (57)..(57): n is a, c, g, or t
  misc_feature (120)..(120): n is a, c, g, or t
  misc_feature (125)..(125): n is a, c, g, or t
  misc_feature (132)..(132): n is a, c, g, or t
  misc_feature (144)..(144): n is a, c, g, or t
  misc_feature (155)..(156): n is a, c, g, or t
  misc_feature (159)..(159): n is a, c, g, or t
  misc_feature (172)..(172): n is a, c, g, or t
  misc_feature (174)..(174): n is a, c, g, or t
  misc_feature (179)..(180): n is a, c, g, or t
  misc_feature (196)..(196): n is a, c, g, or t
  misc_feature (203)..(204): n is a, c, g, or t
  misc_feature (213)..(213): n is a, c, g, or t
  misc_feature (216)..(216): n is a, c, g, or t
  misc_feature (219)..(220): n is a, c, g, or t
  misc_feature (223)..(223): n is a, c, g, or t
  misc_feature (234)..(234): n is a, c, g, or t
  misc_feature (243)..(244): n is a, c, g, or t
  misc_feature (246)..(246): n is a, c, g, or t
  misc_feature (249)..(249): n is a, c, g, or t
  misc_feature (252)..(252): n is a, c, g, or t
  misc_feature (256)..(256): n is a, c, g, or t
  misc_feature (259)..(260): n is a, c, g, or t
  misc_feature (265)..(266): n is a, c, g, or t
  misc_feature (270)..(270): n is a, c, g, or t
  misc_feature (281)..(281): n is a, c, g, or t
  misc_feature (289)..(290): n is a, c, g, or t
  misc_feature (293)..(293): n is a, c, g, or t
  misc_feature (295)..(295): n is a, c, g, or t
  misc_feature (298)..(298): n is a, c, g, or t
  misc_feature (301)..(301): n is a, c, g, or t
  misc_feature (303)..(303): n is a, c, g, or t
  misc_feature (309)..(309): n is a, c, g, or t
gaaaggtgcaaatatatgggttgagctggaggtagaaatacaggtaattaaggtttntagtttaagggaaaacagatctattgccatttaaataaggtaactgggatttggttaagttcncaaanatagcanaagatttatttncaggcttcccnngtnctgtcagggcaananaaagnntggtaaaccactacancagtttnncagtgtganggntgnnacncagctcccctncccgggtgnncncancanaggncanntgggnnggcntggttcagtgngaatcaanncgntnaanccncncatggnacatgtcatgttgggctgtgaccgcgcccccgagcccactgtttgtcaaagctgcatgtatgcagtggcaataaaaccttatgccgtcctgttctattcaagcttacggccaatgccccttcctccctgtagcaaaaaaaaaa

SEQ ID NO: 558609 - DNA, 756 bp, Homo sapiens
ggctcacttggggtctgggacttaatgagtgcttttcacttaagtgccaactgaaggagtgaggctgggagagtagaaatagcttgctcaaggtgacacaggtcaaagttatcaaacctgtcatcctcactccaaagccagtgatcatcttgagggccctcagcatttcagagctgagttcctgctccctcttgacctcagacttgtcaggggaacatttgtcctgccaaactcatttcttttccatttttgatgtgtgtgtatgtgtgtgtgtgtgtgtgtgtgtgtgtgtgtgtgtgtatgcgttgtgtatgcacaggggggctgttgaggtcacagatagtatcacagagttgtattgtgggattgccccccaacccaatgtacgtaccagagcttctaagagaagcaggggctcctcgtgatcgtgggtgctcaccacgaggcgccacctcgtggtctctcagtggccttcgtgtgcgtcgctcccaaccagggtgcaccccaagatagtgggtcgtcatcctcaatatttcgtgtaggaacgacgccactacccttctatgatggcagtgccatagggcgctgctctacccctcactgctctcttcccaagcaccgtggagccttgggatcatattacttccagggacgcggatctccatacgagacgcctgatctacagtctcccgtgctcctcctcgtgcccttttctccctctttcttttcccctccacacaatagagcaaaaaagga

SEQ ID NO: 558610 - DNA, 519 bp, Homo sapiens
tagctggccgggtgagtggattggcaggaagagaactggttggtgttcacaggactgatccacaatgggagaatggagcttacgagaccctggtgatgctggagacagttcctcggagtggagaggtttacacctggcaagtggagcacccaagcgtgacaagcgctctcacagtgcaatggagagcacggtctgattctgcatagagcaagatgctgagtggagtcggaggctaggtgctgggccttgtcttccttggggccgggctgttcatctacttcaggaatcagaaaggacactctggacttcagccaagagggattcctgagctgaagtgcagatgacacattcagaagaagaactttctggcccagctttgcaggatgaaaagcttatcctcctggctgttattcttccacaagagagggctttctcaggacctggttgctactggttcaggaactgcagaaaatgtcctcccttgtggcttcctcagctcctgcccttggcttgaagtgc

SEQ ID NO: 558611 - DNA, 382 bp, Homo sapiens
  misc_feature (134)..(135): n is a, c, g, or t
  misc_feature (143)..(144): n is a, c, g, or t
  misc_feature (158)..(158): n is a, c, g, or t
ccgtagctcgatcaacagaaagtagttcttgagaagataacaaaatcaacaaaacgttagtgaaactcagaaaaaaagaaaaaaagagactcaaatttgaaaaaatcataaacgggaagaggatatgtcacaannggacaccnntagaaatataaagngatcatatagagagtactatagaacaacacatatgccacataaatttgaataatttaaacggaaatgatataaattcctggtacacatggcaaccttataagagattgtgaccccagaagggaaaacgaaaacacaacatagaccaagttacaagatcatgcagagcagaatcacgtagtaaacaggtctttcaacgaacaaagaaatccaagaaccacgacgg

SEQ ID NO: 558612 - DNA, 405 bp, Homo sapiens
  misc_feature (57)..(57): n is a, c, g, or t
  misc_feature (120)..(120): n is a, c, g, or t
  misc_feature (125)..(125): n is a, c, g, or t
  misc_feature (132)..(132): n is a, c, g, or t
  misc_feature (144)..(144): n is a, c, g, or t
  misc_feature (155)..(156): n is a, c, g, or t
  misc_feature (159)..(159): n is a, c, g, or t
  misc_feature (172)..(172): n is a, c, g, or t
  misc_feature (174)..(174): n is a, c, g, or t
  misc_feature (179)..(180): n is a, c, g, or t
  misc_feature (196)..(196): n is a, c, g, or t
  misc_feature (203)..(204): n is a, c, g, or t
  misc_feature (213)..(213): n is a, c, g, or t
  misc_feature (216)..(216): n is a, c, g, or t
  misc_feature (219)..(220): n is a, c, g, or t
  misc_feature (223)..(223): n is a, c, g, or t
  misc_feature (234)..(234): n is a, c, g, or t
  misc_feature (243)..(244): n is a, c, g, or t
  misc_feature (246)..(246): n is a, c, g, or t
  misc_feature (249)..(249): n is a, c, g, or t
  misc_feature (252)..(252): n is a, c, g, or t
  misc_feature (256)..(256): n is a, c, g, or t
  misc_feature (259)..(260): n is a, c, g, or t
  misc_feature (265)..(266): n is a, c, g, or t
  misc_feature (270)..(270): n is a, c, g, or t
  misc_feature (281)..(281): n is a, c, g, or t
  misc_feature (289)..(290): n is a, c, g, or t
  misc_feature (293)..(293): n is a, c, g, or t
  misc_feature (295)..(295): n is a, c, g, or t
  misc_feature (298)..(298): n is a, c, g, or t
  misc_feature (301)..(301): n is a, c, g, or t
  misc_feature (303)..(303): n is a, c, g, or t
  misc_feature (309)..(309): n is a, c, g, or t
gaaaggtgcaaatatatgggttgagctggaggtagaaatacaggtaattaaggtttntagtttaagggaaaacagatctattgccatttaaataaggtaactgggatttggttaagttcncaaanatagcanaagatttatttncaggcttcccnngtnctgtcagggcaananaaagnntggtaaaccactacancagtttnncagtgtganggntgnnacncagctcccctncccgggtgnncncancanaggncanntgggnnggcntggttcagtgngaatcaanncgntnaanccncncatggnacatgtgatttttttttgtgagccttaccccaagccaaactattgtcaaagcatcatttttataaaaataaagccttattttgccctgttttttta

SEQ ID NO: 558613 - DNA, 297 bp, Homo sapiens
tgaaatcctgtccacagcagcagccgcagccgccaacagagcgctgttagagagctaagatagcactgacttcgtagaaaaccataacatcggccatcttggacacagagaaaaacaatggcgttacttatttacaaaccacgaccgacagttatctcttcccaggagaggctagaattagcttatctgtcttttggccagtgccgagtggaatgcctggttagggggaggaggagggcctgggttttattagtggtgctttgtatgtaaaaggcagcctggcctattgtactgagg

SEQ ID NO: 558614 - DNA, 811 bp, Homo sapiens
  misc_feature (310)..(311): n is a, c, g, or t
  misc_feature (322)..(322): n is a, c, g, or t
  misc_feature (402)..(402): n is a, c, g, or t
  misc_feature (778)..(778): n is a, c, g, or t
catatcaacgaaaatcactcagttgctcggaagcaggatcgtgccagcccctaccggtactaatgcttcgattcaacgagagccttacaggactccactagggctggcgcaagcttacgcaatttaacaatttcggaaatacgctcgaggggatctatatgacgaccattctctaaaataaatattattgctgtaagggatgctctcaatatgtgaatttgaacattgcgcgccgggtttaggtcgtcatcaaaattagcatttagtcgattgataattcggctgaatgcaacagacacgatttggtcgnncaatcctgaantatcttcttgtgcaggttcaacgacatttaaaagcgtatcgcaatattccttcgcgatcaggtacagccttcctgcttgngccaacgaagtctgggcagcgtctttcttttcccttttgacttggtttctggcctggcggctggcgatccacatcgccgcgatgatcgctgcaatagatccaaatgcctgcacccacgacgccaagcctggatgactttcgatccagcaaaatacgacttcccaactcataacccactcccctgtagatcccggaactatacacggtgaggatcccctatgtccgcacaacaagaaattgcctcagttcatccatgtccagccgagcatgggcctgccgttcgaaaaggaactggtggtagacctgttcgccggcgtggcggcgccagcaccggcatcgccagggcataccggagccgactagcgtgaaccacaantatcgcctgattcatttgggggtaccgacatga

SEQ ID NO: 558615 - DNA, 515 bp, Homo sapiens
tttttgtaaattgatcattgaaataaaagcacaacaaggtacttaaggcattaatctgttcttcagtgatatttttaaaagtttataaaaggtttttgcctttttaaatgtctgagtcatcattttggcaaaataaataatttatggtaatctgtaattccatttcataacatcaagtgttttaaatctccaacatttaacaggtttctaaaaatcaaacttcagtttaaaaattgtctttcgtgatgcctggcttttggatgctacagagggcccctggagcatccagaaggaaggtaaacaggattagttaacatgtctaggtatctgggattgccaaaataatgtttaatcttcaggttatattttagggaataatattaatatatgctctaaaattgtttggaatgtctaaaattctaatgtctgagtatatgctatcaatcacaatcaaggttatgttaagttaatgtacaccaaggagataataaaatttctctgtaaataatgttaaa

SEQ ID NO: 558616 - DNA, 253 bp, Homo sapiens
  misc_feature (108)..(108): n is a, c, g, or t
gaaaggttaataatgacttgttggttgattgtagatatatgggctgttaattgtcagttcagtgtttcaatctgacgcaggcttatgcggaggagaatgttttcatgncacttatactaacattagttcttctataggcctaaagcagccaccaattaagaaagcgttcaagctcacacccactacctaaaaatcccaacatatactgaactctcacacccattggacaatctatcacctatagagaactaat

SEQ ID NO: 558617 - DNA, 167 bp, Homo sapiens
ccaatggcaggcagatcagtgaggtcagagactgagacttcctggcaacatggtaaaactctgtctctactaaaagtgcaaaaattaactgggtgtggtggtgcacgccgtgtaatcccatctacttgggaggctgaggcacgagaatagcttgaacccaggaggcg

SEQ ID NO: 558618 - DNA, 264 bp, Homo sapiens
accgctatactcggctgatattaaagatgctgcaatgctgcaaatgtaagcagtggtttcatgaagcttgtgtgcaatgtcttcaaaagccaatgctatttggagacaggtgagaagagcatttgagctttatcgatttttttttttttttttttaagcttttaaaaaatgggggtaggagtccccatcagggtgcaggggttaacgaatccgactaggaacaatgaggttgtgggtgttcggccccagagttattggcggtcg

SEQ ID NO: 558619 - DNA, 292 bp, Homo sapiens
ccgtttagaaggacgagatgaatgaccacagtgagtaacggatgatggagaggtcaatgaggtggacatggaaggcaacgaacaggatcaggaccagtggatgatctaggtagacaaggcagggtggcctcagagaagattccagtgccagcccaagactacccatgcatcccaatgcccgcaaccccatgcccacatgaaccagctgtatggccccgagtgcctagaaagtgcccattgggcaccatcctcacgctgctgccagtgatctggtctctattggccccatccc

SEQ ID NO: 558620 - DNA, 240 bp, Homo sapiens
gtaatggacgttaagcccgtgaaacgcctgtgactcacgaaaaatgttgtgccgtagataccgtcggtaatcggtgaagggagactcgaagtactctgaggcttgtaggagggtaacatatatacccagtaaaattgtaataagcagtgttagaagttattaggtttcggttgttttctaatcagactaatggtgagctcaggtgattgatactcctagagctcactgtgtggggaaggg

SEQ ID NO: 558621 - DNA, 337 bp, Homo sapiens
atgtcctagcgggagggcagcggcgagagcttggagtggacaagtcctgggtgatgagtcagagtaggggaatgtatcatcaaggtctccctcctccccgcataaggaggtcttggcaaaggcatctgaaaaggacgtctacccaaggtctgccagagactagcaatgaagactctggggccaggaatgtaaacataggaaaagcatgactgaccaggagagcctgagtccttgactgcaacttccttcagagaccgtgacccactggctgtgcaccaaatgtctctcagagagcagcagctttctgtgtgaggtctgccagggtctcactctgtta

SEQ ID NO: 558622 - DNA, 97 bp, Homo sapiens
ggatttgctggtgcagtacaactaggcttaatagggctcgaattcgagattttgtgttatttcttacattcttagcccagaaaatgctgtgtacaca

SEQ ID NO: 558623 - DNA, 225 bp, Homo sapiens
ttctttctcatacaggatgagaccaaaagagtttcagagctgtgcccaatatcatgtacaccgctatcattaaatcagatttttatgctgtttttgattttgtggtggtattggccttcctttgaactaatccagtacacgatttagataaatcgcgttaggtaattcacgggaataagaacggttcttaggtctggcaggtttggacagtagtacgacattttc

SEQ ID NO: 558624 - DNA, 596 bp, Homo sapiens
tcttctcctgacactttgcttctccagacatgggcagcaggcttgggtggattgcctgagtgttggataattttcacaatacttgactggaaaccaaggtggccctcccctccttgaggagggatctgcccccagttttctcgagaataagcccacaaagaaatgcagcccttcggtgtttgctctacataacgatgctattggatgtcagtgacacaaaacagaagtgctcccagtagcactggcccagtgccccaaatgagagcatctagcagaggctccgcacactgaacacagcacagcttgtccagcaagacccaacaccacacgtgtcatggcacagcatgcccgctatcaaagtgcccaccagggcctgacagacaagcccgtcttcttgacgcaattcaggtccatgacatgtgatgtggtggaatgattaggagcaaaacagttgtaaacaaaagcctgatctgtccatcaaaactcatccgatcgttttatggaaatagctgataccaatcaagatgacttcaggaaaatgaaaagttttggaaacaaattatctgcatgctatggaaaattgtcaaaaattaaaa

SEQ ID NO: 558625 - DNA, 1501 bp, Homo sapiens
  misc_feature (282)..(282): n is a, c, g, or t
  misc_feature (292)..(292): n is a, c, g, or t
  misc_feature (298)..(298): n is a, c, g, or t
  misc_feature (315)..(315): n is a, c, g, or t
  misc_feature (350)..(351): n is a, c, g, or t
  misc_feature (381)..(382): n is a, c, g, or t
  misc_feature (453)..(453): n is a, c, g, or t
  misc_feature (464)..(464): n is a, c, g, or t
  misc_feature (469)..(469): n is a, c, g, or t
  misc_feature (471)..(471): n is a, c, g, or t
  misc_feature (502)..(502): n is a, c, g, or t
  misc_feature (518)..(518): n is a, c, g, or t
  misc_feature (1032)..(1032): n is a, c, g, or t
ggtctgacacttactgccaaacgcatggcgagggaaaaactgcgttagtgaagaacttagaagctgtgagagaccttggaggtccacatccaccatctgctctgataaaactggaacatctgactcagaaccgagatgacagtggcccacgagtagatgcgtttgagcaagtcgagatatccactgatatgctgatacgacgagtagtaatcacgagtcggtgtgctctctctatgacgaagcacttcagtcgtacctggacttgctctgtccagaattgcnggtctttgtnacaggncagtgtttcaggctaancaggaaaacctacctattcttaagcgggcagttgnnaggagatgcctctgagtcagcactcttaanngtgcatagagctgtgctgtggttccgtgaaggagatgagagacaagatacgccaaaatcgtcgagataccnttcaactccancaacnangtaccagttgtctattcataagaaccccaanacatcggagccccaanacctgttggtgatgaagtggcgccccagaaaggatcctagaccgttgcagctctatcctcctccacggcaaggagcagcccctggatgaggagctgaaagacgcctttcagaacgcctatttggagctggggggcctcggagaacgagtcctaggtttctgccacctctttctgccagatgaacagtttcctgaagggttccagtttgacactgacgatgtgaatttccctatcgataatctgtgcttgtctgggctcatctccatgattgaccctccacgggcggccgttcctgatgccgtgggcaaatgtcgaagtgctggaattaaggtcatcatggtcacaggagaccatccaatcacagctaaagctattgccaaaggtgtgggcatcatctcagaaggcaatgagaccgtggaagacattgctgccgcctcaacatcccagtcagccaggtgaaccccagggatgccaaggcctgcgtagtacacggcagtgatctaaaggacatganctccgagcagctgggtgtaacttttggagatttcaccacatcgtgaatatacgtgtgttgccaagggacctcccttcagaagaagcctcatcatggtggacggcctgccaaggaccgggggtgcctatcccggggcggggaccgggtgaccgggtttaaatggaccctcctcccacgttttggcaacaaacggccagacatgggggcgtggcctatggggaatgtgcggggctcagtatgtgtccaagcaagcttgtgacatgattctttctggatgacaactttgcctcaaattgtgactggagtagaagggaaggtccgtcctgatctttgataactttgaagaaaattccattggttttactttaaccagtaaccattcccgagataaccccggtccggattttatttttgcaacttcccctacactggggctgtcccactctgattgattgggccggagtggtcc

SEQ ID NO: 558626 - DNA, 545 bp, Homo sapiens
agtgatctagaggatcccggcttaggaggtatacagtttgtgattatctctcccatactgtagactgtctgtttactctgttgatagtttcttttgctgtgcagaagctctttatttcattaggtcccactcggcaatttttgttttagttgcgattgtttatgaggacttaatcataaattcttacccaagactgatgtccagaatggtgtttcctaggttttcctctatgattcttatagtttaaggtctcacatgtaaatatgtaatccatcttgagttaatttttatatatggtgaaagatagcgatccagttttagtcttctgtatatggctagccagctatcccagaaccatttattgaatagggagttctttcccccttgcttatttttgttggctttgttgaagatctgatggctgtaggtgtgcgactttaattctaggttctctcttctgtcccattagtccttgtatctcttttagtaccagtaccttggcattttggttaccctagccctatagtatagttggaatcaggtaa

SEQ ID NO: 558627 - DNA, 714 bp, Homo sapiens
  misc_feature (245)..(245): n is a, c, g, or t
gccttccaaaatgatgagcttctgctgagggaagtcctggcaaaacactatctcaagtgtggtaacttgcaaaatgtcatccagctgctcgtaggtcatgtcctatagagaacttgccgtgtactacgcaggccttggcatccctggggttcacattgctgccgcctcaacatcccagtcagccaggtgaaccccagggatgccaaggcctgcgtagtacacggcagtgatctaaaggacatganctccgagcagctgggtgtaacttttggagatttcaccacatcgtgaatatacgtgtgttgccaagggacctcccttcagaagaagcctcatcatggtggacggcctgccaaggaccgggggtgcctatcccggggcggggaccgggtgaccgggtttaaatggaccctcctcccacgttttggcaacaaacggccagacatgggggcgtggcctatggggaatgtgcggggctcagtatgtgtccaagcaagcttgtgacatgattctttctggatgacaactttgcctcaaattgtgactggagtagaagggaaggtccgtcctgatctttgataactttgaagaaaattccattggttttactttaaccagtaaccattcccgagataaccccggtccggattttatttttgcaacttcccctacactggggctgtcccactctgattgattgggccggagtggtcc

SEQ ID NO: 558628 - DNA, 775 bp, Homo sapiens
  misc_feature (219)..(219): n is a, c, g, or t
  misc_feature (329)..(330): n is a, c, g, or t
  misc_feature (386)..(386): n is a, c, g, or t
  misc_feature (410)..(410): n is a, c, g, or t
tattttccgtgtccccgcctgcagagtcagtgtgcggtttgggagaaaatgtgtcggatattttggggcggtcacgtgggcgggcgggctccgagaggccccgggacagtcccagcctagagccgtgcccccccaggagccccccagtacggcgagccccggacattgcgacgctccatccaagagactgcccgacgccgggacctcggggctccgcgnctcccttccccctcccactccagcagctacggccagttccctcaacctgacccagtatgtagaagccagtctctgcaggcggccacgggacttttggaggcccagtggcnnggccaggcagggcgggtacggagcctcccaggctggggcagtgggcatgggcaggngctgtggctgaagacctcgcccgnccactgcagaccccaggggactctcacaccgcagctgccatggccaccaataaggagcgactctttgcggctggtgccctggggcctggatctggctacccaggggcaggtttccccttcgccttcccaggggcactcagagggggtctcccgcctttcgagatgctgagccctagcttccggggcctgggccagcctgacctccccaaggagcatggcctctctgatcggtggagacacagagcaaccaggctcacacgagcatggtgcccaagctcgtcctcgaccccctacgacatactcggggtctacaaaggccatgactaccgtgttgcacatgccacaggtcctcgtgggctaccacc

SEQ ID NO: 558629 - DNA, 467 bp, Homo sapiens
caagaaaggtaaaaaaagaacacaagatgatctgatgaatatgatgatagacgactctgcagcctcaacttcatttcagacacagcctggtcaacctcagcaaggttatattcctccaatggcacagccaggaactgcaccagtaccaggagcaccaggaatgcctccaggcatacctccattaatgccaggtgttcctcctctgattgccaggaatggcaccagttatgccaggcatgccacctggattgcatcatcagagaaaatacacccagtcattttgcggtgaaaacattatgatgcccatgggtggaaatgatgccccctggaccaggaataccacctctgatgcctggaatgccaccaggtatgcccccacctgttccacgtcctggaattccttccatgactcaagcacaggctgtttcagcgccaggtattcttaatagaccatctgcaccaacagc

SEQ ID NO: 558630 - DNA, 237 bp, Homo sapiens
tacccgctgagctgacgcgctcttcgtggctggggtggctcggggcgtcctctcgacccgctccttggggctggggtggggcgggggccctcttcgtgccccctcacggttgccaggcaggctcgcgccctctgcgtcactagccctggcgccagcggcggcggcggccgccgccgccgctgctgccgcggcggaggagctagaggacgacgacgacgagcaggacctccgccgctc

SEQ ID NO: 558631 - DNA, 112 bp, Homo sapiens
aaacattctgccctctgaagggtaaaaattttatttttgaggaaccacaaactgctcgctggcttagagtgttttataagaaagcaaaaatgttttcctcccctcatcctag

SEQ ID NO: 558632 - DNA, 582 bp, Homo sapiens
cttcaccagccagtatttatctttattcaattctgctccttcatagccatagccagccaccaaaagagcaaaatccatttttatactgctgcactgtggctcaaacacttggggaagtaaaagaaagctgggggtgagaagctctaggagacacctgacagtaacccaccctgtcatccaaaggtataaaggcatctctaaattcagtgaaatgacacacattccagatagaacttaacaagaggatctactgttatcaaggctctcatctaaagctagcagaaatacaaatttgcataaatccttttgtcggccgacaaaaggaaataggaggccaatactatttatttccagaaaaataaccagttctaccaggctcatttactaaataaactttcccccacttaaagtaaaatcagcaatatctttatttactatcaaattgtgataaatattgtgatttactttgataccctctaacctgtacctcttacttgattgtattgattaaccttgataatgtttgatttcgtcttccatcaaaattttgaaataaaaattttattctgcttcaaaaaaaaa

SEQ ID NO: 558633 - DNA, 338 bp, Homo sapiens
gcggaagcggagagcaacagcgcgccgaacctgtagagccacataagaaaaccattctcgctgggcgcggtggcccacgcctgtaatcccagcactttgggaggctgaggcagcggatcacgaggtcaggagatcgagaccatcctggccaacatgatggaaccctgtctgtactaagtatacaaaaattaggtgggtgtggtggtgcatgcctgtgataccagctactcgggaggctgaggcaggagaatcacttgaaccctggaggcggaggttgcagtgagccaagatcactccactgcactccagcctgggagacagagcgagactccatctct

SEQ ID NO: 558634 - DNA, 259 bp, Homo sapiens
caacatcgctcggttggaacttaattactgcgtccccatgggagtacagccaggcgccaggctctgtgatggctcccatttgtgaccagatttattatccattataactatctcccacagcctacaccaatctatttcaatacctacccgtgccacatttaccccaacccttctctctgggaaaacgcggttcagcgattctttgactgcggaccctttggaaaccccgtcaataaatgttaaagacacactccaaaaa

SEQ ID NO: 558635 - DNA, 101 bp, Homo sapiens
aactgatatcatccatccatctatcatccagatgtatattgagcacctgtgtctgggtcctattggggagcttgtaaccaccaagaccttcctaagccatg

SEQ ID NO: 558636 - DNA, 384 bp, Homo sapiens
agtcagctgcagtagcatgatgtcactgcactccagcctaagagtcgaccctatctaattaaaaaaaaaaaaaaagagggcggggcgcgttgctcttgcttgcaatcccagcatttgggaaggccgaggtggttgatcacaggtcaggagatggaacccatcttggttaacagggtgaacccccttctctattaaaaatacaaaaaaaattaggcggggtgtggtggcgggcccttgtatccccagctcctcgggagggctgaggcgggagattggcgtgaccccgggggggcgggtttggcggtgagccgagattcgcgccttgtgcactccagctgggattgacggcacaggcttccgtctcaaaaaaaaacgggggggggg

SEQ ID NO: 558637 - DNA, 328 bp, Homo sapiens
aagaaatggtcttacatttcagtagaactaagaaagtattcctggccgggcacggtggctcacacctgtaatcccagcactttgggaggctgaggtgggaggatcccttgaggtcagaagttcaagaccagcctggccaatatggtgaaaccccatctctactaaaaatacaaaaaaattagctgggcattgtggcatgtgcctgtaagcccagctactcaggaggctgaggcaggagaattgcttgaatctgggatgcggaggttgcagtgagccaagatcacatcactgcactccagcctgggcgacagagaaagaccccatctca

SEQ ID NO: 558638 - DNA, 437 bp, Homo sapiens
  misc_feature (17)..(17): n is a, c, g, or t
  misc_feature (19)..(19): n is a, c, g, or t
  misc_feature (27)..(27): n is a, c, g, or t
  misc_feature (29)..(29): n is a, c, g, or t
  misc_feature (218)..(218): n is a, c, g, or t
  misc_feature (333)..(333): n is a, c, g, or t
  misc_feature (373)..(373): n is a, c, g, or t
  misc_feature (418)..(418): n is a, c, g, or t
  misc_feature (427)..(427): n is a, c, g, or t
ggagctgggaaacccancntgggaagnangcattccaggagctgctttccaaaagaagaatagcctccaccaggaaggtgtggctgagcccagagccccagaaacctgcgggaagctccaaaggggggcctgccagaggatacacacccaccctacctcctgcacacgggatcctccaaccagacagtgtggcccaagcagcctggctactttcaccnttagccagcagccctgggcacactggggatggtcccaaacatggcctgtgctgctgtcacggtgctaaggggcctggcaagcacggggtctttcttgctggacggaggcacaggntccagaatctatcttttgccctacagttgtcccgggcaanagcctagatcttatggacccctttaacgggtggcttattcccaanccccagaantcttgggacc

SEQ ID NO: 558639 - DNA, 113 bp, Homo sapiens
gttacctgaaaacactgtgcacatcttgtgtctgtttggaatattgtccattgtccatcctatgttttgttcaagccagcgactcctctgtgaccaatgtcttgatgcatgca

SEQ ID NO: 558640 - DNA, 583 bp, Homo sapiens
  misc_feature (470)..(470): n is a, c, g, or t
  misc_feature (475)..(475): n is a, c, g, or t
  misc_feature (528)..(528): n is a, c, g, or t
  misc_feature (548)..(548): n is a, c, g, or t
agtcaacatctggggtgcatgactgttggcatgtgctatttttagaaatctgaaattccataaagtaggtaagcttttattggcctctaagaggccagggtgggcaaggtgaaagtttacaagaagctggggatggaggaaaacatgaggtggtgtccaaggtatttgaaaactccatagtaaataagagctctagaactcatcagcttctacaacaaatgagatgcttgggttcggtaaagctatttgggtagatggctcagttttcccaatcacctcctcagttataaaggaaactcgctctgatgctgtcatcggccagtctccctcatgtttaaggtgaggtggagtatatcttttaaaaaaatggttggacagacaggcatggtgactcatgcctgtaatcccggcacttggggagaccaagacaggtagagcacctgaggtcaggagtccaagaccagcctggnccaanatgatgaaacctcgtctttactaaaaatacaaaaaattaggtggccggggtgncatgcgcctgtaatcccagntactcaggaggctgagggaggagaatgtgttgaac

SEQ ID NO: 558641 - DNA, 120 bp, Homo sapiens
tcatgtgcctcagcctcctttgtagctgggattataagtgagtaccattgcaccagcttatttttgtattcttagtagacacggggttttgccatgttgaacaggctggtctcaaactcc

SEQ ID NO: 558642 - DNA, 127 bp, Homo sapiens
ataatttcttgcctccgaggtctatcgtctgaggctgagcatgataagaaaatgacctcatgctccttattcatgtgcagcaaaattgccatatgggccaggcggggggagatcctcatagaagtcg

SEQ ID NO: 558643 - DNA, 870 bp, Homo sapiens
gaccttcactacccggagagcccgagatattgaccggaataacggaggccttcgccaagcgatatcgcctgtcaacccgggcttcatccagtccacatacacggtgctatgctgcggtcctttaaccgtcatcaggctcaacaccaagtgctccgcaatcgccaatgtgccggggacaaatcagggcgtggagcgctatgtggccattgaaccggggcatcaacgaggggcggtgacctgctgaggcacgcgcttcaggaaccggtacgccaacgcatccgaaatgagcccttcaagattcctgagcatgacgggaatgacgctaacccacactcttcttcaacccggactcggcgattggtctggctcctagaagctggttggccgggcgaagacgtgtaagcggcgttggtttatccttacagacaactgcctctactacttgtgagtacatccacggacaaggagtccccgaggaatcatccccatggagaatcttgagcatccgagaagttggacgacccccggaaaccgttctgctgtgaactttacatccccaacaacaaggggcagctcatcaaagctgcacaacgaggcggacggccgagggggagggaaaccacatggtgaccggatctcggcccacacgcaggaggagaaggacgaggggatcaagtccatccagcgcctggagtgtggaccccttctatgagatgactggcagcgagtaagaagcggatttcagttaagaagaagcaggagcagtctgaccgcctgcccccaactccattaattatacggagctgccccgcgtgggtggccagaccctggcttggggctgtgatcctgttccctgtttggaaagtcata

SEQ ID NO: 558644 - DNA, 88 bp, Homo sapiens
gctacggctcgggcacgccgacgaatccgttgggcatctcgtagaccacggcatcttggcggtactgggcccacgtgtcgcgaacggg

SEQ ID NO: 558645 - DNA, 371 bp, Homo sapiens
tatattagtcagctagagctgtgtattaggccatcttgcattgctataaagaaatgggtaatttataagaaaagaggttaatggccaggcacggtggctcatgcctgtaatcccagcgcttggggaggctgaggtgggtggatcacctgaggtcgggagttcagggccagcctggccaatgtggtgaaaccctgtctctactaaaaaaaattgcagggattggccgggcgtggtggcgggcacctgtaggtccggctgctcaggagtctgaggcaggaggatcgcctgaacccgggaggcgggggttgcagtgagccgggatcgtgccattgcactccagcctgtgcagcaagagtgaagctctgtctcaa

SEQ ID NO: 558646 - DNA, 598 bp, Homo sapiens
  misc_feature (234)..(234): n is a, c, g, or t
ctgacctagaggatccctcgaattcgacggtttctcttttttttaaacaggtctcactctgtcactcaggctggagtgcagtggcgcttcatggctcactgcagcctcaatctccctggctcaagcaatcctccggcctcagcctcctgagtagctgggatcacaggtgtgtgccaccatgcctggctaattttttttttaagagatggggtcttgctatgttgcccaggctgntctcgaactcctgggctcaagtgatcctcccgccatggcctccgaaagtgctgggattacaggcgtgagccattgcgcccggccgccttggaactaacttctaactcttgttttctagaataatatgtggattcgagaccatgaggatagtgggtctgtacattgtggggaccccaggtccatccagtgggggcctggcctcccagagtggggacaactccagtgaccaaggtgagaatcttgggaggtggaaggccaaacatgggagtcaaccagaggattgacgttagatcggcaagtaagacttgtacgaggggcagagatggctggggtgtggagtgtcgtcttgggggaagagtctggg

SEQ ID NO: 558647 - DNA, 294 bp, Homo sapiens
caaattcggtcagctttccagtttgttccgcatatgtggagcttgtcgtgagtgatcgctaggaaaaaggaaaaagccaagatactcctactgcagcaggtattcccagctgtgtcaagtcacagtcattaataaccttctacaagcaacggggaaacaacttgggattggcaggttattgaggccagggcaagcttgtagtgccaacattcagcaaaggggggtcgccccaaaaggttagacacgttccccaggtcaagggacagccaagcaccttctgggctctttctggga

SEQ ID NO: 558648 - DNA, 447 bp, Homo sapiens
  misc_feature (12)..(12): n is a, c, g, or t
caccttagaagntgtggctcagggcacataaagttgagacagagattatacatccagccccacctctctggaacgggggagttgtctggggaggaaacacaagccggcatgggaacaggggtcacggtggacacgggggtgggctgtctctccacctcctcacattatgctaacagggacgcagacacattcaggtgcctttgcagaaagagatgccagaggctcttgaagtcacaaaggggaggcgtgaagaaatcctgcatctcagtccctcacaagacagctgtctcaggcttttcaagctgtgagagacacatcagagccctgggcactgtcgctgcacgcagcctgagagtagctccctccttttccacctgagctcttcctcctacacatcacagcagcgaccacagctccgatgaccacaacttctaaggttaaggggta

SEQ ID NO: 558649 - DNA, 831 bp, Homo sapiens
  misc_feature (5)..(5): n is a, c, g, or t
  misc_feature (89)..(89): n is a, c, g, or t
  misc_feature (112)..(112): n is a, c, g, or t
  misc_feature (125)..(125): n is a, c, g, or t
  misc_feature (129)..(129): n is a, c, g, or t
  misc_feature (131)..(131): n is a, c, g, or t
  misc_feature (133)..(134): n is a, c, g, or t
  misc_feature (137)..(137): n is a, c, g, or t
  misc_feature (140)..(140): n is a, c, g, or t
  misc_feature (142)..(142): n is a, c, g, or t
  misc_feature (147)..(147): n is a, c, g, or t
  misc_feature (153)..(154): n is a, c, g, or t
  misc_feature (158)..(159): n is a, c, g, or t
  misc_feature (161)..(161): n is a, c, g, or t
  misc_feature (190)..(191): n is a, c, g, or t
  misc_feature (199)..(199): n is a, c, g, or t
  misc_feature (209)..(209): n is a, c, g, or t
  misc_feature (211)..(211): n is a, c, g, or t
  misc_feature (220)..(221): n is a, c, g, or t
  misc_feature (223)..(223): n is a, c, g, or t
  misc_feature (245)..(245): n is a, c, g, or t
  misc_feature (247)..(247): n is a, c, g, or t
  misc_feature (249)..(251): n is a, c, g, or t
  misc_feature (272)..(272): n is a, c, g, or t
  misc_feature (300)..(300): n is a, c, g, or t
  misc_feature (332)..(332): n is a, c, g, or t
  misc_feature (351)..(351): n is a, c, g, or t
  misc_feature (356)..(356): n is a, c, g, or t
  misc_feature (377)..(377): n is a, c, g, or t
  misc_feature (479)..(479): n is a, c, g, or t
  misc_feature (491)..(491): n is a, c, g, or t
  misc_feature (730)..(730): n is a, c, g, or t
  misc_feature (789)..(789): n is a, c, g, or t
ggatntggggttgcagcgcccctcccagcaagggcacggggccctcctcctcctcctctgggggcggggggggtgggggggaaagggcnccggggggtgggtctggggggangggagggtggggngggnangnnctntgngncctcngagatnnctgnngnttcgccctgcgccccctcgtccagggcanngaataagngttgtggtgntngttgttttnntngggggtgttggtgaaagggttntngnnntttaggtaggggtccaggttnttggtgatgagcttgttgttgagaatantggggggcaacatgagggaggagtttttggantgctccatcatgagcgtgnggttncggttgtgatcgatggtcttnagatggttctggatgattccaaactggatgggaatgaagaggtgggagggtggaaaatggggtggcttcaggtttttgagaaaatggtccatgggaatttcntgggtcagatcntggtctctgtagatttgctggatgagggcatcaaggtggtccacggtttttcggagctcctctgtcttcttggtcttgttagtgacgtactcctgcagaaagtcagccgtctgcttagggagcttggtgcctacgtacttaaagtgttccttgtggaacttgctgtcaagatggctggccatctcgtcctcatagaaggtccggtatttgcacagagaacacacaaactggatcctttncaccatgcggtctcgctgccgctttttctgcttgtcctgactcttcttgcctgcctgcnacttgcgcttggtctggccattttcatcctgggtggttaggg

SEQ ID NO: 558650 - DNA, 160 bp, Homo sapiens
tctcatcttgaatcccagggagacccaatgcactagtattggcccccaccagagaactggctcaacagatccaatacaggtaattctggcacttggagactatatggtgagccacttgttcatgcctgtcattgagtgcgaacaagatgtttctgaaatg

SEQ ID NO: 558651 - DNA, 693 bp, Homo sapiens
  misc_feature (22)..(22): n is a, c, g, or t
  misc_feature (61)..(61): n is a, c, g, or t
  misc_feature (102)..(102): n is a, c, g, or t
  misc_feature (130)..(130): n is a, c, g, or t
  misc_feature (135)..(136): n is a, c, g, or t
  misc_feature (141)..(141): n is a, c, g, or t
  misc_feature (147)..(147): n is a, c, g, or t
  misc_feature (174)..(175): n is a, c, g, or t
  misc_feature (178)..(178): n is a, c, g, or t
  misc_feature (258)..(258): n is a, c, g, or t
  misc_feature (280)..(280): n is a, c, g, or t
  misc_feature (309)..(309): n is a, c, g, or t
  misc_feature (326)..(326): n is a, c, g, or t
  misc_feature (378)..(378): n is a, c, g, or t
  misc_feature (401)..(401): n is a, c, g, or t
  misc_feature (406)..(406): n is a, c, g, or t
  misc_feature (428)..(428): n is a, c, g, or t
  misc_feature (458)..(458): n is a, c, g, or t
  misc_feature (472)..(473): n is a, c, g, or t
  misc_feature (480)..(480): n is a, c, g, or t
  misc_feature (508)..(508): n is a, c, g, or t
  misc_feature (524)..(524): n is a, c, g, or t
  misc_feature (534)..(534): n is a, c, g, or t
  misc_feature (550)..(550): n is a, c, g, or t
  misc_feature (562)..(562): n is a, c, g, or t
  misc_feature (618)..(618): n is a, c, g, or t
  misc_feature (651)..(651): n is a, c, g, or t
gtgaggggtgcgcccaccacancaatgatggtgtccttggggtcaggaccaagtccgggtncagtgactgccggctcagcagaggccgggcctgggcctgangctggtgtggcagggccccctagcagancagcnnggggnagtgcnttatgacggtgccgcagcatctgcagnncanactcgcagttggcacaggcctgcttgagctcgtagagagcaccaggtcgcttcgcagctcattgaacatgtgcacaagcncctccgtagtgtggggctcagntccacaccaagctccaggcagcatctgtnccagggccttgatcttnttctgtcccacagagcttgggagcttcatccgttggctccgcagcgtgaaanctgcagacttgaagtctggaaantaaangcctgcagtttcaggaacagcnggcttctcagcctcctttttctggggtagnttctttttgggggnnttgggtnccgtgcgccgctgctctgcagtggtgtntgcggctgtgatcagnttctgcaggncctggctgcgtttctnccgctccttctnccgggcctcaatcttgcgcagtccctgtagcaggtactcctcctctgccacctgcnctggggtccggttgtagagacgctcaagctgtnccttccgccgtcgttcgtgcccagcatcaaatactggtatct

SEQ ID NO: 558652 - DNA, 961 bp, Homo sapiens
taaaaaccctcatcaatagatggagacatacagaaatagtcaaaccactttctacaaaaggccagtatcaggcgggggcttcgaagccaaagtgatgttgggatgtaacacgtgaaactattagtgggcggatgaacgcagatagtgaggacaagttgagccaataactgaccgtgaagtccgtggaaccctggtggctacaaaacacatgttgagccgtaaatgccgtcggacaatggtgaagggagactcgaagtactctgaggcttgtaggagggtcaacaatagagcacccagtacacttggtaactaagcagcggctctgaattattgggttccggtcggttccctattagactatggtggagctcaggctgactggaaacatccgtgagcgcgagataaaacgggatgtcgcacacggagggggaccaccaaggggactaaacgcggaggctgaacgccaggctacgggggccaaggccctcaacaaatgggggcggaaacgggggcaacgcggaggacggtggcaaacaagggggccccacacaaacaacgccgtgcgcaaccacacaaacacatccaccaggcaggcacatacacccacggactaaacacccggacatcagcacggccccacacagggaacagggagagcgcagcgccagcacacctacggcaaacagaaatagcccggccccccccctagtacaacaccattagacgcccaaacaccaccgggcgacaaacgacagcgcaaaagaagaagcagacacagcgaaaaagtaacacgcccccacacacacaaagagacgcccacagaccaaccgagaagacgcacaacaacgaacaaacgaccaatgaacacaacagagcaggcgaaagacacacaatacagccacgaccaatcacaaacagggccccaacgcaaaagagacacacgggccaagaggcatccaaa

SEQ ID NO: 558653 - DNA, 153 bp, Homo sapiens
tcatgttaggagacaggccatgcctttcaagtgcatgcagctcactgattgcatcctcaaagatttccgcatcagtgcccaccagaacttatgtccgacaatgcctggcagcaaggcagatcttcaaaatctcattgtaccagccacggggct

SEQ ID NO: 558654 - DNA, 425 bp, Homo sapiens
gctaccctaccatgtggccaaggaagggaaccaggagcctggagaagcccaaacctaggccagcgggggcaagaggcacctgaagtgcttctccaggaaggagacattggctgggctggggaaggcactctcagcaggggacaccctgcaaaaagccccagaggtgccccctctagatttgcttctttgccttctaggcttctggcctggctgagctcctgggaacacgagtcagcagcaccccaagcctgagcctttagggaaccaacccccgccccacccacattacactgtcctgagaggctgggaaactcctggaacattccctggccagtctcaggttttccaccctctgcctttgggccctgaggaccccttaccccagccacctttagaggatacagcagaggccagggctcttgccc

SEQ ID NO: 558655 - DNA, 243 bp, Homo sapiens
gaagcaggcaatcctggacgacatgaccacccaagcgggccgtcccagtgggcttcttagcactaccttcagtaattgaaatctgcccagcgtaggctgtcactgtggaggcgcttcgcaagattgggcttcgccttggaacacaacaatcacctttggggacgagtaagaagcactacacatagtagttttagtaagcagaagcacccgactatgtcagagccccaagagcaccccccagta

SEQ ID NO: 558656 - DNA, 253 bp, Homo sapiens
gagatgatcatagttgcctgccacaagcacgttcttgactataccacgaagtgaccaagccacacgttactagaggttgaactcatagatatgtacaggatataaacaaataccacggggaacagtttacttcaatacaaggtcaaaatcagcaacaagttctacaatccagtgctgatatcagatactagctgcaaggacaatttcttttcgaaggcttattccagtttcgtctggatactcggcgtgtgca

SEQ ID NO: 558657 - DNA, 344 bp, Homo sapiens
tctatttggcagatgagaaaactcaggggtgaatttttacaacaggtggttctcaaccttgggcagcattattgtgaaagtgaccagaaagtttttaaaaactccttagtgaccagctcatattccagaccaacatcagaatcttgggcattagcggaacccaagcattcgagtggtgtctttccaacatttccaaaggtgactacaaaggtgtattacggccaaacacgtggaaaaccacgtggtttgtgaatgtgatttacactcaatctctttcgagggcgcaagtgtggtcttccttaccttattttccccttttatattactaattaattctttattat

SEQ ID NO: 558658 - DNA, 430 bp, Homo sapiens
actctagaagtaaaggaatattggtagaaacaattgtactataaaattttaaaactgaaaatagtaacgaccatattatagcatttgaaaaacattatttaaatacagattttgggtaacattaaataattatttattccaagataatatggtaaatatttatatttatactggcagatacatagagaaacaggattaattctaagtaatattaccccaaaaagaaatactttctaatattgaattcaacaagatgtaccaccaacagagacagtgaatgtatttcaccttcctaaacagctatttttatatgaaaatcctaaattatctacatcagtcaatgactggcatttcaagagtaaatgattcattttacttacaatgcatcaagataaaaaggttacactgaacaactagaatgtttactgaa

SEQ ID NO: 558659 - DNA, 185 bp, Homo sapiens
  misc_feature (169)..(169): n is a, c, g, or t
gcccggcttacggggattacggcagtagacgatgacgtcacgaggagatcggcatcgcgacttgaacatctatggagtcgtcgcctcgacgaatctgttccgcaatatcatcaatttcggctacctcatcgagcaaggttctgcttgaacttcagaatgacgatcctcnggcattccgggaaaag

SEQ ID NO: 558660 - DNA, 118 bp, Homo sapiens
cccactttagatgtacttattctcctgactgttcttcccagggagtgtggaggtcttggccctgttccctgtcctaccaagtacgtagaataaaaacataacccactgacaacggcct

SEQ ID NO: 558661 - DNA, 281 bp, Homo sapiens
agcgggtctacctccccatgctttgccgtcgagcggacgcggctgggacctctgtttcgttttggtcttattttaccctccactttagcctttctgtcctttttcttatagttctccgttttcgtcccactcctccgcccatgtccagacaattgtccaccttgctacgcagaaagatgtcccttcagggtctgggtagacccaaagacacgaggtggtgcaaacacgcgcggggagctcttggccgtttgctccaaccgttggcctgtaacacacgcacc

SEQ ID NO: 558662 - DNA, 906 bp, Homo sapiens
  misc_feature (157)..(157): n is a, c, g, or t
ggtgtatgcaaccgaagaaaacagttgtggtcacattatatcttcacgggcgtccccctttattgcgcttacagaaagtgtcgcccggatcttggcggcctactattgaagagggtgtaaataagtaggccggcggcgctttttgtgggcgcccccnctctccctactggggaactctttgcgatggaggctttagcaaccgcccgaaccgtggtgttacaaaagtgttgccgcgaatgctcgcgcgaaagatcctgtccaatttctggatcatcggccctcccactcaggtaattctgctccgcacgccatctatcgtcatctcggccccaaagtcgggcatgttcttctccgtcaacggaagacagtacactttggggccgcacaccccactgagggcccgagctgtttctcccccccgctgagaagggagacttcaacccgtcaaccattgggaaatcttgcgtcccccgttgcggttttttaaaaatattggagatgtgatctcacgtagtgacaatggtggaaccaaatattggcgccccacgtttcccccaacaacataatgttgtgcgacgcactaatgttaatctctcttcaaaaaactagtacccgcgagactcttttcttttaggcaaaaatacgcggaccccatacagtaatggttgatgcgcccaaacggttcaacatacaaagccgccttgatgacccacataatggcacgcatgtcaccccttaactcccactccatattatccacacaaagtgggcgacacccgctctcgctcgatattaagtaccagccacccacaaaaaacatttcttgctcacctattatccccccacgggacatctatttcttatggcactacagaaaaaagagccctttcaaacccccacataaca

SEQ ID NO: 558663 - DNA, 167 bp, Homo sapiens
ggcaccaccactgacctgggtctgtgaatcgacaatgccgtcttctgctcttcgtggcgaatcctcctgctggcagcctgtgtgcctggtacctgtctaccctggctgaggatcccagggagatctgaacagcaagacacatagatcccatcatgataggataccaa

SEQ ID NO: 558664 - DNA, 354 bp, Homo sapiens
catctgtactttagtatagccaatatttttcttaaaatggacttctttttttttttaaatggacttctttttaaaacttaaagtttatttaagagaaaactctgtgggccgggcatggtggtacatgcctgtaatctcagctacttgggaggctgaggtgggagaatcacctgaacctgggaggcagaggttgaagatcacgtcactgcactccagcctgggtgacagagcgagactccatttcaaataaataaataaataaataaattttaaaaataaataaaaaagtagttcgggggaatgatggaaggctcacccaaaattctcacttgaagggcctcagcacaggggcgc

SEQ ID NO: 558665 - DNA, 83 bp, Homo sapiens
catggatttgctggtgcagtacaactaggcttaatagggacatggggcttggctttggtagccctcttggtcttactttccca

SEQ ID NO: 558666 - DNA, 971 bp, Homo sapiens
gcattaccatctcacttctaggaatactagtaatatcgctcacacctcatatcctccctactatgcctagaaggaataatactatcgctgttcatgatagctactctcataaccctcaacacccactccctcttagccaatatgtgcctatgccatactagtcttgccgccgtgcgaagcagcggtgggcctaggccctactagtctcaatctgcccaggcacatagtggcctagactacgtacagtaaccgtagacctactccaagtgcgtaaaactaatcgtggcccaacgaattattattactagcagctgacatgactgtccaaagaaacacataagttgaatcaagcacgaagcacgccacagcctaattattagcgatcatcccctctactatttgtttaaccgaaagtcaacaacaagctatttagctgttccccaagcgttttcctccgaccccctaacaacccccctcctaatactaactacctgactcctacccctcacaatcatggcaaagccaacgccacttatccagtgaacactatcacgaaaaaaaatctactctctatactaatctccctacaaaatctccttaattataacattcacagcacagaactaaatccatattatatcttcttcgaaacacattatccccactggctatcattcacccgatgagggaaacctggcaggaagccgaaaggaggcaccatactaccctatctacacctagtaggtccttcccctaataatcgaactagttgacatcacaagacctgggtccacgaaaaaatcaataatcagtctcacgccaaaaatatcaagtctgagacacataaagaaagaaacacagttaaagaaaacacaagagccaatatcacaagccgggaccagggaaaaagcgaccaaggggggaagacaacgacacaaaaacaccgaaaggaaagacgaaagatagacgaa

SEQ ID NO: 558667 - DNA, 844 bp, Homo sapiens
ctcaaaagggcaaatctaagagatattggtgttacagaggaagtagagaaaggggcagggatggaaagtttattcagagaaataatatcagagaactcccaaacctagagaaagatgtcagcattgaagtacaagaaggttatagaacttcaagcagatttaacccaaagaagcctacctcgagacatttaataatcagactcccaaaggtcaaggatgggaaaggatcctaaaagcggcaagagaaaagaaacaacatgcaattgaagtctgatacctgtggcagcagacttttcagtggaaactttacaggccaggggagagtggcatgacataaagtgccaaaagaaaacaacttttaccctagaatagtatatccagtgaaaatatccttcaaatatgaaggagaaataaagactttcccagacaaacaaaagctgagggagggattttgtcagcaacagacctgtcttttcttgtaagaaatgctaaaaggggcaagagaaaagaaacaacatgcaattgaagtctgatacctgtggcagcagacttttcagtggaaactttacaggccagggagagtggcatgacataaaggtgcaaaagaaaacaacttttaccctagaatagtatatccagtggaaaatattcttcaatatgaagggaataaagactttccagacaacaaagctggggaggatttgtcagcacagactgctttctgtagaagctaaagggtctcatcgaagaaagtgggttgcgagaatctccagcccaatccgggtatatttgcgaaggattgtggccaaaggggtggagcgtgcgtgaaaacaggggggaaatg

SEQ ID NO: 558668 - DNA, 424 bp, Homo sapiens
caaatctgtggattgtagtagggacttatggtgcctcttctgggtccccgtgggacaaattggcagccactttcctcctctctgaggtccataaaagccctgggctcagccagagcagggcagaggatggccagaggacaaagagggcagagaggtggtgggatgaccagctgcagagaggagtactctctgctgatagctggagacaatgggatggctggctgcagagaagagctaccttctccactgagagctgcagagacaacctgccagcagagagaagccaccctttccagggcctcctctccactgagaactgagcactggacagatgacctgcctacagagaggagctacccactgtgggcctcctctgagctgttctagcactaaataaagctcttcttcatcttgttcacccttc

SEQ ID NO: 558669 - DNA, 104 bp, Homo sapiens
aagtccatcattttcttcaagctttcaaagtagctgttgtaactggagctgttgtaactgaagctgttgtaactggagctgttgaaactagagctgttgtaact

SEQ ID NO: 558670 - DNA, 1381 bp, Homo sapiens
gggagccaaggtccgctcggagtgagtgccctcgcggtttattgagtgagcaaatcggagccatcgcattccgttccctgtcggacgtactccataccacgggatcatgcagagtctccgaggatgtcacagtgctcgagaaagcgccctgctgtacggcgggagatgtaccccgtgaattgcctgggaagatgctccggaagcctgtcggctcaagatgccagattctggcgtctgtgtccgggttccgtcactgaggtctgccccttgtccgggcccttcctccctagttctcttcaccgtcgcccatccgtgtcgcgcgccgcggtcagggtccccattcgggcatgtgggtgtgtcttccactcggtccccaacccttcggcccttcttgtggccccatcagggaaagccctgggctttctggcagacgccaggttcttccctgagaatgcttcccccgtccatttcccttcaggcacagggcccataaggttcatccggaaacaccaaggactttcggggttgggccagcttcaggaaagggaaccttgacgttccgaaagactggggtaagggcacctggccgatcctggtaacaaccctcgtgatttctggcaaatcggctacaattagcgggagctgtgggtgtcacctcccggggtccccatgggaaggcgctcctggaggggggacaaaagccggggagtcaggggagagaatgtggcacacacgagggggggaacccaggggcacaggggcggtatggagagggcttgatagaaccacagggtgtggcgatggagttcatgtccattgtattgttggcgtccgtcatcttttgtatattttttatatacccaagcagcacagctagcgaagagagtcaaaagagcgaaaaacgaaagagaatagacacaagcagaacagatagagtagggagaggcgggaggggcggagaacgaaaaggagagcaaggcgacggaagagagggtgaagaagaggagaggacagagcgaaggaagaagcagcagagaagagaggaggaggagaaaggacgcaagacaggcagcgacagggagagaagccaacagggacggagaaggaggaggaaagacagaggaaaagaaggaaagcgcacaggcaaggcggagacggaccgcaagggaaggaaacagagaaaagcgaagaagaaggaagcagcaagaggggagaggcaagaagagaagacaggagaacaacaacacagagcagggaagacaacgagggaagaacagaagaaagacagaagagaaacggaagaacgacaaggacagaaagaacgacagaaagcagagccagagcggcgcacggaaagacacagagaagcaggaagatgggg

SEQ ID NO: 558671 - DNA, 110 bp, Homo sapiens
ttaaataacaacttcccgtgaccgtgcttcctccctgctttccattctccttcatatcgaaagaaggaatttgggtatacgtagacaccataaccgttccggggcggccg

SEQ ID NO: 558672 - DNA, 496 bp, Homo sapiens
  misc_feature (6)..(6): n is a, c, g, or t
cgtgcnggacattttacaggagagaggaattggattcgatgagtcttggtgaggtagaagaatgaatggaaggtctaaaggaaatccaggaagtttttggagagttaactcaacaagtgtgagaaaaagattctttgggctcacaggtccatgttcggcacgttggcatcgaacaggttctggagaactggtctaagttaccatggtctgccagtagggcgaacaggaatgaagtcgcacctaaccataaacaactgaactaaacagacttacttcgtatggcctgccctttattggttatcccagaaattgaaactttgaaagacgtttgaagaaagttggggtccgtttttttatggtccattaaatttggcaaacactacggcagtatttaaccatctttggtcaataaacggccgatcattatactctagtcttctaagggctcactcattctgggtcatttggggactcttttttcccagaattactccac

SEQ ID NO: 558673 - DNA, 168 bp, Homo sapiens
  misc_feature (20)..(20): n is a, c, g, or t
cgtgactctaccggagcttnattctgcacccacagcagcactgggtcgtacacacaacactgagcctgcagctccacaagcgctggccttcacggagaatctaccactttccagagctggcaagctcaagtgacacaacaccttcacctcccggctccggcgctgcgg

SEQ ID NO: 558674 - DNA, 201 bp, Homo sapiens
ctagaggatccccgacgggttcaacggaacttttgagaaagcccccctaaaaaaaggcttagagtcaccggcatgccgctcacgttgcaggacggaatcgcgcgcccctcacgctggagtaagttacgaaacatgatcgtcagggctctttgcaaacgagtagcccaagaacgctggatggaggcctcctcggcccttgcg

SEQ ID NO: 558675 - DNA, 180 bp, Homo sapiens
ttcacctgaatcctctagctgactcttagagtatccccgcgagaggacggaatacctgaagccttacacggttcgaccacaggccctaccctgatccattaacgatcgcgtcggaccgtgggggcgtgcaaatgccaacggaccgggcatggctcaactggcccatgaattgaaaattgg

SEQ ID NO: 558676 - DNA, 197 bp, Homo sapiens
cttggggagaggctgtgctgagccgaaaggtactgctggacggtgtgcagaacccccgagcagatgacctggtgtggaagtctttgtacgtgtctgccaccgtcatcttgcactcatgcagtgacatggtgcaggcagagcgcagcgggatccccatctgtagacctctccctgaccagatccacttcaccaacgcc

SEQ ID NO: 558677 - DNA, 1084 bp, Homo sapiens
taaaaaaaccttgtttttattcagcccaaaccgtgggcaatctacctctggtggtatggccaaagtttaaaaaataaaaaccaacaacaacaaaacaaccatgtgtatgagaaaaggtgaagttatttaaaagtggggctcgtggcgtctccggaatctcccgtgtgtggtttttcactccacgtttcgcctcccgtagaggccggcaggggagggattgccccttcccgtgccgtggtgggttgtggggcgctgtggcgcccctctcgggggagaggcgctttgcccggggagaaggcagggggcctgtgtctattgtgagaagcggggacagaagattgtgcgccatctctgtgtcgtccctctctcgcgagaaaaatctcacgggattgtggcaccacacattgtgtgtgcgaaagatgtgtgtgtgtgtccgagaaaaacagcgtttgacgcgggaaacccttgtgtgtgtgctgagacgtgacaaaacgttggtgtggttggcactcttcttcttcagcaccaccgcaacgagtgatgttgttgttgtggacgcgatgaaacaagtcgttctgcaagagactcttgcgcaacaaagagaacaccacaagtagttattattacaacccttgtgaggaggaggtagttcttcacacacatggtgttgtgcacaaccacctgttttttgtagaagagagatcaattgttgttcgaagtgtactcccccccacgaagaaggagttgttgtgcacaaacaggtcgttgacgaggaattcataaagttggtagtagcccggagaaaaactatccccccccacaacctatggttggggggcgcccgacaagatcggcttgccggacaaaaaggttgggttgcttcccccgggaaagacaatagtttgtggagcgacagaacggcaggacggtagggttgatctaacaccaacaatacaatgagagcacgcaagagggcgccgcctgcctgggaggggggggaggcctacttacccgaaggaggggcagcccccccccctcggctgtgggaggagggggagatactaaatacgtttgcgacaagcat

SEQ ID NO: 558678 - DNA, 334 bp, Homo sapiens
gatcctcacgctccaccgactgctgtcaccttcatcgttccagtttttaaatcctgagtcacgccaaaaaaaaaaaaaaacccaaaacaaaacaaaaaaaaaaattaagtgccttgccattctcttttggttttcgggcgcaggtaaggtttggtcaagaaagggtttgtaccgcaattgaagtcatagtccggcctaaaaagcgcatttggcggggggacaaggggaggggcccggagactcggtcaattattccgtgctgtgcgggttccacattcgggcgggagaaaggtggagacaggagagagggccaggagattggagagggggtacc

SEQ ID NO: 558679 - DNA, 252 bp, Homo sapiens
gtcgacagatggggtttcatcatgttggtcaggctgtttttttgtttgtttgtttttcttttctcacttgcaagctaacaagttaagtgaattgtgtttgtcttgagctctgcagagacaaacacaacctttgtggaatggtgctttaggggacattggcgtggagtgggacaacaagagaagtgcttttgctggatggtgttcgtatcgtggcttgcttggacaggtgcagggcagaggaccaacgtcgac

SEQ ID NO: 558680 - DNA, 211 bp, Homo sapiens
ggagaggagctgacgactatgaactatcagcaagtggcgattactacccggagtacaagctgctcttcgagggtgcaggtagcaacctggagacaagatgctggaggaccgattctttgagcacgaggtaaagctgaacaagttggacttcctgaaccagttccacttttggtggtcttctatgccttcgtagaagctcaatggagccggc

SEQ ID NO: 558681 - DNA, 106 bp, Homo sapiens
acgtcgatttttccccaatcgatgaagccatgctttgcaatgacaatattaatgtgatccgaccctaacattttttctatggaagacgtatgttgcataaagcaag

SEQ ID NO: 558682 - DNA, 233 bp, Homo sapiens
ttctcttaagaacaaacaaaatcattaccaaatatgtgtgtctgagtccagatcagacttaattctgtagttattttgttatggcttagtgttgtcatgagatttgtccactgttgatcatcttgtttaaggctcttacctgtcatatggatatctcgaacgtggaagcagtaattcctactctgctagtttgtgtaggccacatactctagcagtagtaatcctgggtttcc

SEQ ID NO: 558683 - DNA, 394 bp, Homo sapiens
atccttccgcctcagtctctggagtagctaagactacagttgtgagacaccacacaaggctaatgtttttatttttcatagagatgatgtcttggtatgttgcccaggctggtctcaaactcctggcctcaaatgatccttcccgcctcggcctcccaaaaagctgggaccacagacaggagccaccatgcctggctgtactgtatgctttaaatgggtgaactatgtggtgtgttaattatatctcaataaaaatgttttaagggcagggcatggtggctcatgtctataatcccagcaccttgggaggccgaggcaggaggatcacttgagtcacttgagtccaggagtttgcgaccagcctgggaaacacggcaagaccctgcctctacca

SEQ ID NO: 558684 - DNA, 1199 bp, Homo sapiens
atctcgctcggtagttggttactttatgagtggtgtaatgtctctgtgggtgcgcggggcttttttgttgtttgctgttttctgggctttctggttgtccgaatagtatcgctgtttttcttttatcctattttgctcttgatagtcgtcatccggttgtgtacgctggctcttgatacgggttctgtcttgggcatgagaggggggtcgtagatctattgtcttgagcgggaatccgtttcgggtgtttggtgtgtttgtgtggatactgtgtttgtgctaagattatttgacccctttgatgttggcatatggctgtgtggtttctgtcttgtattcttcccttgtttgcctttgtatttgtctggttcctttctagtttttgttttgtactatgcgttgtgtgcggttcctgattgttgagcctggcatgttgctctagttcttcatgcgactcagatgatcttgttgattggagttgcttggcctctgtcacccatgtcttgtgtgcgatgttgcgttctcggctctctgcatcctccgtgtccctggttcagtgcgagtcttctgcctcatgccttctgagtagcttgggattacatcgcgtgtgccaccacgctcgtctaatttttgtatttttagtagagttgggattttcagccatgttggcctggctggtctcgaatctactgagcctcgtgatccacctgcctcggcctcccatatagtgctgggtattacaggctgtgagccatccatgctcggctctattttactattttcttgaagtatccgattttgtgcatagtaatgacacagcaccattcctgagaaatatggaaagatatgtgtgtggtatgataagcccatattctgttcattgtcactctgtatctaggcttcctctttggatgtgaacgcgggaatgatacagtggctgtatttccacccaaaggggcgtggagaccttttggaaacgggctttctcctttccattttgcagcctgggggcagggtggagaccttccttcagaagggtagtgccttggggagcagcagacctgctctgagtccagcttagcgttccaaaattctgtgtggaatcttactggagatgtttgttatatatttgaaaataacggcctgtatttgtcacgctatacttatacccaaggacctttacaataggtgggcgtggg

SEQ ID NO: 558685 - DNA, 417 bp, Homo sapiens
cctcatgaagaggccatatggaaagggagaagccttgtccaaccatctccaccaaggtcccaggcatatgagagagccaacttggacagtctggtcctgttgagcccccagatgcccacagtctcagttgacgacatgtggagcagaagaactgcccagatgagcccagccaacccagtgaatcatgagaataaggaaatggtttttgcttaaagcttttgctttgaagtggttccttatgcagcagtagatatctgaaacagggggcattgattagtgacatcaaggccctaggggatggcagaactcccagatggaagaaagctggatgtctgagtcatggcaaggagagccattcaccaactaggaaaccacgtagaaatattccacaggagaaataaacttttgttgtatttg

SEQ ID NO: 558686 - DNA, 545 bp, Homo sapiens
  misc_feature (337)..(337): n is a, c, g, or t
  misc_feature (401)..(401): n is a, c, g, or t
  misc_feature (405)..(405): n is a, c, g, or t
  misc_feature (411)..(411): n is a, c, g, or t
cctttactcatcatgctccagcctcatgatctgtggcagtctcatgaagagaccaagttccttcttacctcagggtcttgcatatagactttcactgtctgaagtttttccctgtctctattgattattagctctttctcaacccccttttttttttttttttttctggagagggagtttcactcttggctgcccggggctgggagtgcaatgggtgcgatctcagcccacggaaacctcggccttcggggttcaagtgattctccggcctcagcctcccaagcagcggggatcacgggcttgcgccgccacgctgggccaacttggtatctttagntaaagaggggatttcaccaggtgggtcaggcgggtctcaaactcccgacctcggggtgatcggncggnctgggnctcccaaggggcggggattacgggcgtaagccagggggcccagcccctttctcaatcttttaggcttcaacttaaataccaacccctcagatgggtgtctttttctaaccaaaatgtggtccaaatcttcctcg

SEQ ID NO: 558687 - DNA, 1427 bp, Homo sapiens
  misc_feature (478)..(478): n is a, c, g, or t
  misc_feature (661)..(661): n is a, c, g, or t
  misc_feature (683)..(683): n is a, c, g, or t
  misc_feature (788)..(788): n is a, c, g, or t
  misc_feature (807)..(807): n is a, c, g, or t
  misc_feature (860)..(860): n is a, c, g, or t
cgcttatatgcgcccggttgtgcaccgccccgcccgcgaaaatgtggtttgtcgatgtgtgttaaaaagggagaatcgttcccaccccacgatgtttcctcggtgggaagtgcgccttcctttgtggcagaatggacaacatccttgtgttgacctaagaagtgtttttggggagagagaactcccccacaagaggtgtgcgccccacgaagaaccccaaggcgggtgaccgcgcaccaacccggcgttgttggggagaccctttactcaaacggttccgttggttttttttgggggggaaacatcaagagagaagttttccaccgcccctcacgaggatccatcaggagaaacccacccttgggggattccccccacgctctcaagaagtgttaatttctccgtttcctcgggggccttttttctgggtgtcccttaataaaaagtgaacacctaaatatgtcgggataaatacggngtgttccacatcatgtgtgatgccccccgtggtgaaactttttaggtgtaccccgccgcggacccccacgccgcatgtgtgagattaatttctcgtaaatgttgtatgggaaaatatcgtcgtagatattttgcgcgctctaaaaactctttagtttttattggcgccacacacactcggcgncttctgagacgcgcgacgagancgctctactattttgggtgtcctctctctataggtgagagataatgtgttgtgtgtcgctctcacactacgggagcacacacacagagggtgtgtgtgagaaaantttgagagaaaatttattnttttatagggagatgtttatatgttcacccagaaacgacacagagtctcaatntgctccgttgtgtttgcacagcctctctcacagagaattgtgtgtgtctctttgagaatctctctcacagaggagacacctctctcgtgtcacacacacgctttgagagagtttgcctcgttgagaacaagagaaagagaagagaaggagggcgcgagaatctctcttccacgcggagagaagttatatttccctctttctcttttctatattttaagaatacaccctcgcgagaggcggtgtgggaagaaatgtatacagagaattgtaaagggaggggttcacgtatagtggggaaatttctgtgaccacgcctgagattgaaagaatgatgattgagagaacctcctgcactttctaagttaaccccttgcttccctctcaccctcttgtaaaaatttggcttggccacacatgagcacttgtcaatgcttatttgtccccaatatccactcctgtcgtagagtcttaaatgtttttgagtcgcttgcgttataaagtggagaagtgccaccccaccacgtgaaaccagatcccctttataaataagcttaaaggccactgcca

SEQ ID NO: 558688 - DNA, 187 bp, Homo sapiens
aaactgaatgaacgtatcagtataaatggtggttatctgagtattctagaatggattctggaaaagaaagatgccatgtggatagggtccctcaatagaacagttttggaaaatagcacaagttatgaagaaagcaagaatttattggacaagaacaagatattggacccagactactttatcctgg

SEQ ID NO: 558689 - DNA, 466 bp, Homo sapiens
gacatagtagatatggtagtgtgaggacaagatgctatctgagagccagccaatccgacatcatcccctgcaaatggtatgcttatactatcctctcaaaccctgggtcattggtttcatacacagcctcttccacggataaaaggggttcttgtacacgcttgttactccaccattgaggcgagttctgagttctaggttttcctaggacactctactctcagtcaccaagatctctggaatgatcatacatagtggagtggcagggtgaggtatttcaaaaggagtatgtgtaacaagaagtcttgcccaagccctgtcatgtcagtgtgtgtgtgtggcctcccagcccaagcagaaattgacagacaggcctgtatatagtgaaaagatatatatatatttttttttccgaattaggcagctggactcagtttaaatgatccctattgtgttgggcacatcc

SEQ ID NO: 558690 - DNA, 808 bp, Homo sapiens
aatcatggctgcaaaggaggtctccccagccaggccttcgagtacatcctatacaacaagggcatcatggaagaagacagctacccttacataggcaaggatagttcatgcagattcaacccccaaaaagctgttgcattcgtcaagaatgttgtcaacatcacactcaatgacgaggctgcaatggttgaggctgtggctctatacaaccctgtgagcttcgcctttgaggtgactgaagattttttgatgtataaaagtggcgtctactccagtaaatcctgtcataaaactccagataaagtaaaccatgcagtcctggcggttggctatggagaacagaatggattactctactggattgtgaaaaactcttggggctcccagtgggggggagaatgggtacttcctcattgaacgtgggaagaacatgtgtggcctggctgcttgtgcctcctatcccattcctcaggtataagccacggctgcacgggcaactgattggcagaccaagggaggaactggtccttcgatgagaatgccaccctggagaaaattgtgtggaaatccacccagaggccctctcactcctgagtctagacgcctaaagacaggaaggacaaacttgaatagcgacaagcccacccacgtgacatcatcaccagaaatacgcttggattgtggttttttaatgacccaaacccacgtggacctagaatcgtctctctttccagctctcttcatgtactgggagctgtaatggttaccttttctatgttgtgtattcaataaacacacagtaaatacc

SEQ ID NO: 558691 - DNA, 471 bp, Homo sapiens
  misc_feature (34)..(34): n is a, c, g, or t
ggagaaggaaaaggcaagaagcctatccacattncctaggggtttccagccttttttttttccatttatgcccctcccttgcctttttttaaaattaagaaacctattttttttaagagcagttttagattccacagcaaaattgagtgaaaagtgccagaggattcctcatataccctccctgtccctcacacacactagcctcccccactgtcaacatactgaaccacaatgctaatttgttacattcaatgaacctgcattgacatattatcacccaagtccatagtttatattagaattcactcttggtattacaaattctgtaggttttaacaaatatataatgaggccgggcacagtggttcatgcctgtaatctcaacactttgggaagccgaggcaggaggattgctggagcccaggagttcaagaccagcctaggcaacatagtgagaccccatccttacaa

SEQ ID NO: 558692 - DNA, 348 bp, Homo sapiens
aggcacgtggaatcactttgagccgtagggagttcaagaacagcctgggtgccattgccaaacccccatctctacataaaaataccaaaaaaaaaatgaggctggacatggtggctcaggcctgtaaacctaccactttgggaggttgaagcaggtggatcacttgaggccaggagttcaagagcagcctggccaacgtgatgaaaccccgtgtgtactaaaaatacaaaaattagccaggtgtggtggtgcatgcctgtaattccagctactcagtaggctgaggtgggagaattgtttgaacgtaggaggcagaggttgcagtgagtcgagatcacgccactgcat

SEQ ID NO: 558693 - DNA, 338 bp, Homo sapiens
ggcaatggaggaagtgtgtgttgagtcgagctggctgggggtaggttgtaatcttcaaagggtgttgggtgtaggaggtgaaggcgtcgtgtgagttgaggctgcgtggtctgaacgcggtagatctccctgaagtccagtgcttgtggagctggcagggacagtgttgtcgtggtgagccagtgctgctgtggacgcggtgtagatgcttcaacgatgcctgagcttgtggtgctgtcagggaagagtgttgtgtgagtggagcctgggctgctgtggaaggttgtagaattcttgaccaaaggataaggctgtggtactggcattgggccagcggg

SEQ ID NO: 558694 - DNA, 303 bp, Homo sapiens
  misc_feature (17)..(17): n is a, c, g, or t
  misc_feature (219)..(219): n is a, c, g, or t
  misc_feature (271)..(271): n is a, c, g, or t
gaacccataaacaaatnccacattagccctaactgacttttgacaaaagtgccaagaacacacttggggaaagtacaccctcttcaataaatggtgctgggaaaactggatattcatatgcagaaaataaaactaggcctctatctttcaccatataaaaatcaactcaaaatggattaaagacttaaatgtaagatccaaactataatactaccagangaaaatataggggaaatgagtcaggacattggtttgggcaaaggttttatgnacaaaacttcagaagcactggtaatgaaagca

SEQ ID NO: 558695 - DNA, 334 bp, Homo sapiens
catacactgggggaccgacagtctttacaacaaatgatgctagaacaactggaaatctgcattacaaaaaatgaatctagacaaaggctttaaactcttcacaacaatttactcaaatagatcacaaaactaaatttaaaacacaaaacaataaaattcctagaagactacacatacggacgaaaaactctagatgaccttgggttcggctgctgactttttacatacaaccaccacgagaccctgactccctgacacacggacaagacactgactaacgctaaacctttattaacacacttagaacatttcctgctttgacggggaacacaga

SEQ ID NO: 558696 - DNA, 221 bp, Homo sapiens
tgcttgtcttcatcctcctcttctgaatctggcttttgctttaattgaggctgccttcgcctctcagcctcttgtaccatcctttggagctctgcatctggatctggatgcccttttgccataaagcgcttcctgaattcctcaagctcctgcttctctctcttcctatctggttcatctgcttccatttccttatctctattacgcaaccttttttgaag

SEQ ID NO: 558697 - DNA, 242 bp, Homo sapiens
gatagactggccgtcgctatacaaaagatattaggtgtgacgatcattactcacgcgctgacggaacttgtacagggaggcatgcaccgcagtgttgaatacacgtcgacctggctccatctaaacgagatttggaggtgaacgcggatctcatgtggcgacggtgcttgtatacagaggcatgcaccgcagaggttaatacacgtggacctgcaagcatgcatgcatgctcgggtactgaa

SEQ ID NO: 558698 - DNA, 392 bp, Homo sapiens
agatggagtctcgctctgttgcccaggctggagtgtagtggcgtgatctcagctcactgcaagctccacctcccgggcccacgccattttcccgcctcagcctcccaagtagctgggaccacaggcgcccgccaccgcacctggctaatttcttgtatttttagtagagacggggtttcaccatggtctcgatttcctgacctcgtgatccgcccaccttggccttccaaaatgcttaggtgggtggatcgcttgatcccatattgttggtgtacctgctcttttaatattgatgaatcccttttctgttctccttttcaagtatttagctgtgccgtggtaattttcatcctttggtcccagtttcttattgtattttatgcgggatggtt

SEQ ID NO: 558699 - DNA, 871 bp, Homo sapiens
  misc_feature (71)..(71): n is a, c, g, or t
  misc_feature (107)..(107): n is a, c, g, or t
  misc_feature (133)..(133): n is a, c, g, or t
  misc_feature (173)..(173): n is a, c, g, or t
  misc_feature (197)..(198): n is a, c, g, or t
  misc_feature (200)..(200): n is a, c, g, or t
  misc_feature (206)..(206): n is a, c, g, or t
  misc_feature (215)..(215): n is a, c, g, or t
  misc_feature (230)..(230): n is a, c, g, or t
  misc_feature (237)..(237): n is a, c, g, or t
  misc_feature (260)..(261): n is a, c, g, or t
  misc_feature (272)..(272): n is a, c, g, or t
  misc_feature (293)..(293): n is a, c, g, or t
  misc_feature (296)..(296): n is a, c, g, or t
  misc_feature (299)..(299): n is a, c, g, or t
  misc_feature (301)..(302): n is a, c, g, or t
  misc_feature (309)..(309): n is a, c, g, or t
  misc_feature (313)..(313): n is a, c, g, or t
  misc_feature (335)..(335): n is a, c, g, or t
  misc_feature (385)..(385): n is a, c, g, or t
  misc_feature (403)..(403): n is a, c, g, or t
  misc_feature (427)..(427): n is a, c, g, or t
  misc_feature (429)..(429): n is a, c, g, or t
  misc_feature (457)..(457): n is a, c, g, or t
  misc_feature (479)..(479): n is a, c, g, or t
  misc_feature (497)..(497): n is a, c, g, or t
  misc_feature (564)..(564): n is a, c, g, or t
  misc_feature (703)..(703): n is a, c, g, or t
  misc_feature (706)..(706): n is a, c, g, or t
  misc_feature (725)..(725): n is a, c, g, or t
  misc_feature (730)..(730): n is a, c, g, or t
  misc_feature (739)..(739): n is a, c, g, or t
  misc_feature (744)..(745): n is a, c, g, or t
  misc_feature (751)..(751): n is a, c, g, or t
  misc_feature (755)..(755): n is a, c, g, or t
  misc_feature (757)..(757): n is a, c, g, or t
  misc_feature (760)..(760): n is a, c, g, or t
  misc_feature (765)..(765): n is a, c, g, or t
  misc_feature (772)..(772): n is a, c, g, or t
  misc_feature (776)..(776): n is a, c, g, or t
  misc_feature (792)..(792): n is a, c, g, or t
  misc_feature (797)..(797): n is a, c, g, or t
  misc_feature (804)..(804): n is a, c, g, or t
  misc_feature (809)..(809): n is a, c, g, or t
  misc_feature (823)..(823): n is a, c, g, or t
cgggcgctcgctggtggcggacccggaagctgctgcggcgccggggctccgtggcctggattgaatccgancgggaaccatgaacgtggacaaaactgaactatgcngagtctctgctcacctggttacaaangttccacgttccgtctccctgtgccaaccctcaagacctnaacaacggccttgccgtaacctanntnctgaancaaaaaaanccctcctggttcaangaagcanggctccaaggcatctcggaaaanncaagtcccaantggaaactgaaagtcaacaanctnaananngtcttanggancctaataaaatactcccaagangtcctggcgcatcctgtgtcaaaaaaacatctcccaaaagtgaacctcantggaagaattctcaaganccggcaaagctgcggcaagctggntncagctggtggctggggctgtggccatcnagttgcggagaaaaagccaggnaccacatcccagagaatncatggacgctgggaagaatcggtttcagacatgtgggttgatgtgaagccatcccaagagactcatngacccaaagacacatccttgactccctggtcaccagagactgtatgggcaacttgtgacagccaggtcccgcaggtacatattttcctaaagtgagggaaggctgagggaggggggacgaatttacaagcagcgctgtnctnggatctgggagctggcagnggatngctcctgtncaganngagaanacananccngggtngcaaaanaaangcagggctggcggggncgggntgggccngcctngaaagcgcagggtnaccccaggtctcactggccaaaaaaactgctgctggctgcaatcccca

SEQ ID NO: 558700 - DNA, 166 bp, Homo sapiens
acattgacgccgccttaatatgatagtgaaactggattatggcgtatagttcggtcttacgttgtacctgatattcatgggacatcagtgaatgaagcctcctatgatggccactacagctcctatggatgggtcctagtgtaagtgagctactaccttattacgt

SEQ ID NO: 558701 - DNA, 956 bp, Homo sapiens
atgccccacatattctggacccattctaccaattcagcaagtacccaccattccaaatggacacagctcctcaccccccatggcttttcaagatctcccaaacacattggatgaaatcgatgcattattaactgaagaaaggtcaagagcttcgtgcttcacaggactgaatccttcggtggttgaggagtactcaaaaagagaagtagaaatacagcagttgaccgaagaactgcaggggaagaaagttgaactagatgaatacagggaaaacatttcgcaggtgaaagaaaggtggctgaaccccttaaaggagctagtagaaaaaattaatgagaaattcagcaacttttttagttccatgcagtgtgctggtgaagttgatcttcatacagaaaatgaggaagattatgataaatatggaatccggattagagtaaaatttcgcagtagtactcagctgcatgaattaactcctcatcatcaaagtggaggtgaaagaagtgtttctactatgctatacttgatggcacttcaggagcttaacagatgtccgttcagagtagtcgatgaaattaatcaggtatggacccaattaatgaacggagagtatttgaaatggttgtgaacactgcctgtaaagagaacacattcccaagttattttctttcattcacaaccgaagcttctacagaatctgtcctttattctggaaaagatgacaggttgtttgtttgtctaccaatggtcctccatatgctgggagcccaaaccgatggaatttaagggtttccaaaagcgtcggggaggtatacctttattcaactcgtgaaaggaagacagggggccttgggagggttcccctcacggtttagtgtggccgcccagggtaaagtgcgcttaaaaaaaaaaggggggcatatcccgaggcacagccctttaaaggccaggaaaaa

SEQ ID NO: 558702 - DNA, 428 bp, Homo sapiens
ggtgagccagacctaatcctatatacttggggggggcccatggcctctttccattcaattggtgggtagccgtgaactgtttcctgggccaacttttctctataatagggaagctccttggcaggggttgcatccaatttttatgtttcctcagggtccagccctggagtgaaccagaggtagtccttggcaagtgtttggtgaatgaatcttctctttagatttatcctcatcatcgtttttttaagactgtggtaaaaatatacataccctaaattttgccattttaaccatttttatggggcaggttcggtggcattaagtacatatacattggtgagctaccatcaccatcatccacctccaacacacttccatcatccccattgaaattttgagcctgtcaaaccccaaagacccccccccca

SEQ ID NO: 558703 - DNA, 899 bp, Homo sapiens
  misc_feature (29)..(29): n is a, c, g, or t
gtaagggtttttccttttttcttggcttntggttcacataagaggcagcagagcccagataaaagcacagccctggggtcagaccgattctggttctgtcactccctgtgtgatcttgtgaaactttatgtgatgggcctcagtttctttgcaaaatgaggaataatattgcgggcctgtaggtattagtgagaagcgaataagataacacatacaaaatgtttagcacggtatttcgcacatagtacgtaggtactcaaacattagctttttttttttttttctctcccgtgaaagggagtctcgctcgggtcacccaggcgggatgtgcgcatggggtggaaatctgggctacagtggcgaatgttctggcgcttcgtgggattcacggcaattctctgtggcccaagcttcccgatgtagctgggagactacagggtggcccggccaccatggcctgggaaaatttttgggtgattatcataattttttttggagaaacgggagttctggctctggtccgcccaggctgggatgtcgcagtgggcgtagatctggggctcactgggaagtctccggcccccagggttccatggccattctcagtgccgtaaggctcccacaagttagcgtgggacctacggggtgccccacacacacaaattaggagcaaaacttggggggaattttaaaggctagacaagaagtggggggttaacacacccggtgttttaccacaggagtgtggatcttaaaaatctcgtatgaacactggtgtgaactcaaaaattcgggaccatgtgggactctatttaaaaagaggcgcgggggagatttaaccagagatatttagtgccacacacaaggtcacgggggcacgagcatatattatatacagt

SEQ ID NO: 558704 - DNA, 350 bp, Homo sapiens
ctctgcaggatccccctagatgctgtccatcgggaattctgagtccaacagtcaggtcgttaacccgtattgtctcatatggactctagaatatgattcgcgctgctttccctcgggcttcttgttctgttggtcacgttattggatcaattgagtatatgtagttcgcctttgacctggtgcaagtccttaggcatgtactgcttcggtggttcgggtttcttgctccgagtgtcgtccacctaacctgcaaattttttatgcagtgtttggttactttaggcacctttgggtttgttaggctctgtttgcattaatatattaaagctccataaggatctcctcgtcta

SEQ ID NO: 558705 - DNA, 431 bp, Homo sapiens
  misc_feature (124)..(124): n is a, c, g, or t
agcccctttcccaggggcttcccaatagagcccccatctcccagggtttttttgtgggtttgccgtgccaacccctccgttccccctggagagaagatggttccccccaaagttaaggggtggnaactgggtataaagctttaaaaaattgggccaaaccagcccccccccccttgggtccccccaaaaaaaaggggggggccgggggctttttctggtgggggccaaaagctggaaaaaaaaaaccgggcttttaaaaaaagggggggttccccggcccaggggatcccggcccctaaaaatttttttaaaaagggccccccggccaggggggaaaaaaggggcccccctttttggattgtcccgggggcccatttgcttggtcctaaagggccggggccgtgtgttccccttaatttttttgttgggga

SEQ ID NO: 558706 - DNA, 91 bp, Homo sapiens
ttacagggaagaccgaaacgaccattcttaatttaactatttatattatcctaactactaccgcattcccattacgatttcgggcttagaa

SEQ ID NO: 558707 - DNA, 236 bp, Homo sapiens
  misc_feature (144)..(144): n is a, c, g, or t
  misc_feature (152)..(152): n is a, c, g, or t
gtgtgcggtgtttagaggatccctcgaagatggccggtggtcacctggaggaggtggaggaggaggaggagaagaagaaaggggtctgggaaaggatccggttcaaattaagttctcaagcgctggtggaaggtttagctacanggtcacgngagacagatcgagggacagcaacatggacacgctggggcaaggtgagcgtgatggcttagtgagcaatcacgagggagacaaac

SEQ ID NO: 558708 - DNA, 147 bp, Homo sapiens
gccttccttgggatgtaggtagcctgtttctcatgtgctccctctcctgtgaatctgaacccttgataccccgtcaccctgtgttcaccatggtagtgcactggctgaactaccactcgaaatgttgatatgggcagactgttctga

SEQ ID NO: 558709 - DNA, 914 bp, Homo sapiens
  misc_feature (1)..(1): n is a, c, g, or t
nctctgttgcactctatcaatttccctccgtctcccacattccccgcttccgcccttcccccgggccctttttccctcgccccatgagccattctacctgctcccaaaataaccggaacattctcccgcccacccctggggccccaacctccgttaagtggcgccctctgtaccccccacgcttctaccctcctttcattacaaaccggtatttgcccccccaaagttgtctgtcatcacccaccttgtggctaaaaacatggcgaagcgtctatattatggtcccgcgaatcccacgtgggggcaccacccaccaccaaggcgttcccccccatgaacacggcggcttctttgaaccccacggccctgtctcccgccggctggctaccctcgacataaagggccactcttccccctgtgcccaggcccccacaggagggatccttgcgtgggaaacaacgaatagaagggcacattccctccccctttcggttggcgtgttccacccatcggtaagaggcgcccacatatctctgcagccggtgtgtctcccaacacgatggtgcgtgttcgtggaaaacaacgagcagaccgataaggattaattttcctcgcgacccctgtgcgcgataaaatacaacacacatccctctgaccctctgggcccccaaaacagacgttccacaccgcaaataccccccaacgctttcaccacacgtcttccttacaaaaaacagtaccgccccccactagtgttgtataaaaagccgccttaattaaaacaagcgttagaataaccctggtgccccaccccccccacagagttacacgacgtctctttcaagactccactcttgcctcaaaccaccaccaccctcccgcgtctttcctttaaaaagcccccgcccccatac

SEQ ID NO: 558710 - DNA, 304 bp, Homo sapiens
cttttggggtctttgctaccgctaattgtgctgcaatgaacatatgcgtgcatgtatctttataacagaatgatttatattcctttgagtatatacccagtaaagggattgttaggtcaaatggtatttccagttccaaatctttgagaaattgccacactgtcttccacaatgattgaactaatttaactttaaaaaatttttattggcagtactctctgagagactagagttatacattaacaaggccagacgttaccatttacatgagagcaaagaccccaaaagagcaaagacccaaaag

SEQ ID NO: 558711 - DNA, 231 bp, Homo sapiens
cgccccggtggtgcatgatggatctcaactcgctgatactccaccttctgagttcaagcgacttctcccaccctcagcctcccaagtagctgggactacagtgcgtgtgccctcacgcctggataatttttgtattcttagtacagatggggtttcacaatgttgggctggcatggtctaagaatctcctgacctcgtgatcctaacacgactcggcctcccacagtgcag

SEQ ID NO: 558712 - DNA, 1105 bp, Homo sapiens
  misc_feature (228)..(228): n is a, c, g, or t
  misc_feature (370)..(371): n is a, c, g, or t
  misc_feature (376)..(376): n is a, c, g, or t
  misc_feature (380)..(380): n is a, c, g, or t
  misc_feature (382)..(382): n is a, c, g, or t
  misc_feature (411)..(411): n is a, c, g, or t
  misc_feature (413)..(413): n is a, c, g, or t
  misc_feature (417)..(417): n is a, c, g, or t
  misc_feature (422)..(422): n is a, c, g, or t
  misc_feature (424)..(424): n is a, c, g, or t
  misc_feature (426)..(428): n is a, c, g, or t
  misc_feature (447)..(447): n is a, c, g, or t
  misc_feature (458)..(458): n is a, c, g, or t
  misc_feature (470)..(470): n is a, c, g, or t
  misc_feature (472)..(472): n is a, c, g, or t
  misc_feature (474)..(474): n is a, c, g, or t
  misc_feature (477)..(477): n is a, c, g, or t
  misc_feature (487)..(487): n is a, c, g, or t
  misc_feature (494)..(495): n is a, c, g, or t
  misc_feature (534)..(534): n is a, c, g, or t
  misc_feature (543)..(543): n is a, c, g, or t
  misc_feature (546)..(546): n is a, c, g, or t
  misc_feature (549)..(549): n is a, c, g, or t
  misc_feature (560)..(560): n is a, c, g, or t
  misc_feature (562)..(562): n is a, c, g, or t
  misc_feature (588)..(588): n is a, c, g, or t
  misc_feature (654)..(654): n is a, c, g, or t
  misc_feature (717)..(717): n is a, c, g, or t
  misc_feature (757)..(757): n is a, c, g, or t
  misc_feature (784)..(784): n is a, c, g, or t
  misc_feature (796)..(796): n is a, c, g, or t
  misc_feature (809)..(809): n is a, c, g, or t
  misc_feature (824)..(824): n is a, c, g, or t
  misc_feature (840)..(840): n is a, c, g, or t
  misc_feature (846)..(846): n is a, c, g, or t
  misc_feature (858)..(858): n is a, c, g, or t
  misc_feature (860)..(860): n is a, c, g, or t
  misc_feature (862)..(862): n is a, c, g, or t
  misc_feature (884)..(884): n is a, c, g, or t
  misc_feature (890)..(890): n is a, c, g, or t
  misc_feature (910)..(911): n is a, c, g, or t
  misc_feature (934)..(934): n is a, c, g, or t
  misc_feature (939)..(939): n is a, c, g, or t
  misc_feature (1093)..(1093): n is a, c, g, or t
tccatgtttaaggacctcctgggcctcaggagggtggggcccgcccctgggcggactccccccatccgcgggcgcgaatggccgggccgcgtcgcagtgctgctggctgctccctggttgctgggtgcaaagtgctgggttctgggtttctggattcgcgggccgttcacacgtagcctgtgccggctcctcgggtgagtccgtccgcgcgcggtgccccgggacggnctaggctgccgggggtccggggccccaggcattccgggctgcagattgacggggatcccggatgcaccgcgcgcccccgcgccctcaccgacgggtccaagacctggtgggaaagaaggtgcggggacgggtccctgaagannccgangccnanaagccaaaaagctcaactttaaaagtgtnancaanacaantnannncacctcaattttgtgaacngtaaaaagganaaaatcgaagcnantncanaatgctgttnaaaagannaaaaaaaaaaaagcttgtaaaactctttgcaagaaggancctcggaancanggnctggccggcanancacacctgctgtcaccaggaccacangcagcatgaagacccccgtggaagctggccgtcagtgggatgcagaccctcggccttcagcaccgntgccgaggtggctaccgggtcaaggccaggacgtcatatgtggatgagactctgtttggcagnccagcaggcacccggcctaccccaccggacttcgatccgncctgggtggagaaggctaacagaatcngaggcgtgggcnaggaggcatcganggccttgggggcaanggggagctgtgagacnaccccntcaaggggcagnancnccaccctcacaccaaggaagangaacanatacagacccatcagccacnncccgtcttactgtgatgagtcgntgttnggctcccgatctgaaggcgccacttcggggccccgcggatggcgaagggggatgccgcaaagctccgtgctctcttgtggacgcaccacctacccccaggggtagccactcgccccgcccagggaggcacactgcgagcaatcaccagctggtncctcaagaaaga

SEQ ID NO: 558713 - DNA, 357 bp, Homo sapiens
atccgaggatttcggctactccacaaacaggtcagactattctcctgcctcagcctcctaagtagctgggataacaggcatgcgccaccacgcccagctaatttttgtatttttagtacagacggggtttcaccatgttggccaggctggtctcgaactcctgaccttgtgatacactggtctcggcctcccaaagtgctggaattacaggcatgagacactgtgcctggccgaggttttatattttgcagataaagcccctgaggcacagaggttaagtatctagtccaaagtcatatagctgtatgtggaggtagcactctgttagtggaggtagcactgggtacctgagctcga

SEQ ID NO: 558714 - DNA, 871 bp, Homo sapiens
tccctgcctagcgcggcccaactctttactccagagatcatggctgccgaggatgtggtggctgacatggcgccgacccaagcgatctggagagcggcgggctgctgcagtgagattttcacgtcgccgctcaacctgctgctgcttggcctctgacatcttcgctgcatctacaagcatcgtgcgcggggaaccagaccggcggcacagcggcgacaggcgacgaccgacgagccgcccccatctgaccccgcctcaagcgagcgcgacttcaacccccgctcgagctgcaggccgcttcgacaggcgtccaaggacccgcgcatactcatggcccatcaaacggcaagggtggtcgatgtgacccaaacgggccggcacaaattcttacgaggcccacgagcggcccagcaatgggggctcctctggcccgcgaagccaccatgccattccagggctccctttgccacatattgtagggccctggaattcacgggaagccaccttggaaaggcgactcgcagataccgacatgacccctagtcctggaaccctccagcttgcctgcccccacgcagagacgcagaccctcctgcggctggcactgggaaagctcctcagagctcacacctgtcacacagcggccactcgatcccaccgcgtttggcgcgccacaacaccgtggccttgccagcggacccgcgggcacaacggaatgcacccaacgaatgtatgcgtaccctcacacctatttaacgcgagagaggaaacccccaagcagggatctcgaaacacagtgggcccaccgggccaacacaacctcgtgacttaacaccggccatattccgccgtcgccacggctctactcgct

SEQ ID NO: 558715 - DNA, 974 bp, Homo sapiens
  misc_feature (228)..(228): n is a, c, g, or t
  misc_feature (403)..(403): n is a, c, g, or t
  misc_feature (412)..(412): n is a, c, g, or t
  misc_feature (415)..(415): n is a, c, g, or t
  misc_feature (418)..(418): n is a, c, g, or t
  misc_feature (429)..(429): n is a, c, g, or t
  misc_feature (431)..(431): n is a, c, g, or t
  misc_feature (457)..(457): n is a, c, g, or t
  misc_feature (523)..(523): n is a, c, g, or t
  misc_feature (586)..(586): n is a, c, g, or t
  misc_feature (626)..(626): n is a, c, g, or t
  misc_feature (653)..(653): n is a, c, g, or t
  misc_feature (665)..(665): n is a, c, g, or t
  misc_feature (678)..(678): n is a, c, g, or t
  misc_feature (693)..(693): n is a, c, g, or t
  misc_feature (709)..(709): n is a, c, g, or t
  misc_feature (715)..(715): n is a, c, g, or t
  misc_feature (727)..(727): n is a, c, g, or t
  misc_feature (729)..(729): n is a, c, g, or t
  misc_feature (731)..(731): n is a, c, g, or t
  misc_feature (753)..(753): n is a, c, g, or t
  misc_feature (759)..(759): n is a, c, g, or t
  misc_feature (779)..(780): n is a, c, g, or t
  misc_feature (803)..(803): n is a, c, g, or t
  misc_feature (808)..(808): n is a, c, g, or t
  misc_feature (962)..(962): n is a, c, g, or t
tccatgtttaaggacctcctgggcctcaggagggtggggcccgcccctgggcggactccccccatccgcgggcgcgaatggccgggccgcgtcgcagtgctgctggctgctccctggttgctgggtgcaaagtgctgggttctgggtttctggattcgcgggccgttcacacgtagcctgtgccggctcctcgggtgagtccgtccgcgcgcggtgccccgggacggnctaggctgccgggggtccggggccccaggcattccgggctgcagattgacggggatcccggatgcaccgcgcgcccccgcgccctcaccgacgggtccaagacctggtgggaaagaaggtgcggggacgggtccctgaggatcccgatgcctacgagtccaagatgctcagggancctcggaancanggnctggccggcanancacacctgctgtcaccaggaccacangcagcatgaagacccccgtggaagctggccgtcagtgggatgcagaccctcggccttcagcaccgntgccgaggtggctaccgggtcaaggccaggacgtcatatgtggatgagactctgtttggcagnccagcaggcacccggcctaccccaccggacttcgatccgncctgggtggagaaggctaacagaatcngaggcgtgggcnaggaggcatcganggccttgggggcaanggggagctgtgagacnaccccntcaaggggcagnancnccaccctcacaccaaggaagangaacanatacagacccatcagccacnncccgtcttactgtgatgagtcgntgttnggctcccgatctgaaggcgccacttcggggccccgcggatggcgaagggggatgccgcaaagctccgtgctctcttgtggacgcaccacctacccccaggggtagccactcgccccgcccagggaggcacactgcgagcaatcaccagctggtncctcaagaaaga

SEQ ID NO: 558716 - DNA, 992 bp, Homo sapiens
attactgcctggtgcatgcgggggggccctggtgtgccctggtggccctgggaatggggaaacctggtggtgtgcttcctgcgtgagtgtttctggcagtggcaatcctggggcctgggggtctgctgggctgtgtgactgtgttgcctggtggcccgaagtgcctgctggagctcgcggaggcaatggccgatggataatgtgatgtggatgcccgtcaccaagtttggggcctgcttgggtcaaggacatgaagatcaatgtccctggaggagatctatctcttctccctgcccattaatggaatcagagatcatttgatttcttcctgtgttgtgcctctctcaaggatgaggttttcaaggcatttggttgctatcggggactacaattggccacgtcggtctgggtgttaagtgctccaaggaggtggcaccgcatccggtgtgggccatcatcctggccaagctctccatcgtcccctgtgcgcagaggctactgtggggaacaagatctggcaagccccaactgtcccttgcaaaggttgacagggcctgtgcgtgtctgtgctggtacgcctcatccctgcacccagtggcactggcatcgtctccgacctgtgctaagaagctgtcatgatggtgggtatcgatgactgctaactcagaccggggtgacttgcaacgtggggaattagccgatgcaactttggatggcatttctaagaactaaggtacgtgagccccgtctttggagtggatgtattcacaaagttactatcaaggagtcattggccacttgtagacaaacagagttcgtagggggttacggtcaggtgtggtaaatagggttttccagcaaataagtgttgggtaaaggagagagaaaatggggggaaattctaggggaagtgtatcggtttacatgcccttgttaaagtagggggaaaaggtgatatgttgtgctgtttatggaagatttgaatgtgtcgg

SEQ ID NO: 558717 - DNA, 1173 bp, Homo sapiens
  misc_feature (228)..(228): n is a, c, g, or t
  misc_feature (722)..(722): n is a, c, g, or t
  misc_feature (785)..(785): n is a, c, g, or t
  misc_feature (825)..(825): n is a, c, g, or t
  misc_feature (852)..(852): n is a, c, g, or t
  misc_feature (864)..(864): n is a, c, g, or t
  misc_feature (877)..(877): n is a, c, g, or t
  misc_feature (892)..(892): n is a, c, g, or t
  misc_feature (908)..(908): n is a, c, g, or t
  misc_feature (914)..(914): n is a, c, g, or t
  misc_feature (926)..(926): n is a, c, g, or t
  misc_feature (928)..(928): n is a, c, g, or t
  misc_feature (930)..(930): n is a, c, g, or t
  misc_feature (952)..(952): n is a, c, g, or t
  misc_feature (958)..(958): n is a, c, g, or t
  misc_feature (978)..(979): n is a, c, g, or t
  misc_feature (1002)..(1002): n is a, c, g, or t
  misc_feature (1007)..(1007): n is a, c, g, or t
  misc_feature (1161)..(1161): n is a, c, g, or t
tccatgtttaaggacctcctgggcctcaggagggtggggcccgcccctgggcggactccccccatccgcgggcgcgaatggccgggccgcgtcgcagtgctgctggctgctccctggttgctgggtgcaaagtgctgggttctgggtttctggattcgcgggccgttcacacgtagcctgtgccggctcctcgggtgagtccgtccgcgcgcggtgccccgggacggnctaggctgccgggggtccggggccccaggcattccgggctgcagattgacggggatcccggatgcaccgcgcgcccccgcgccctcaccgacgggtccaagacctggtgggaaagaaggtgcggggacgggtccccttgaagggattcccgaatgccttacgaagccaaaggaatgcttcagtttaataaggtgtggacctacacattgtgactttcaaccctcagttttgtgtggatccgtacaaattggacaaaattcgaagctacttccacagggcttgtcgaaagagggatttaaactgtgaaacaagggcttgtgtaaaacggttccttgtggcaagggaaggggaggccttcggaaagcaagggggcttctgggcctgggcaagaggcaacaaccttggtgtcaacccaagggaaccacagggcagcatgaagacccccgtggaagctggccgtcagtgggatgcagaccctcggccttcagcaccgntgccgaggtggctaccgggtcaaggccaggacgtcatatgtggatgagactctgtttggcagnccagcaggcacccggcctaccccaccggacttcgatccgncctgggtggagaaggctaacagaatcngaggcgtgggcnaggaggcatcganggccttgggggcaanggggagctgtgagacnaccccntcaaggggcagnancnccaccctcacaccaaggaagangaacanatacagacccatcagccacnncccgtcttactgtgatgagtcgntgttnggctcccgatctgaaggcgccacttcggggccccgcggatggcgaagggggatgccgcaaagctccgtgctctcttgtggacgcaccacctacccccaggggtagccactcgccccgcccagggaggcacactgcgagcaatcaccagctggtncctcaagaaaga

SEQ ID NO: 558718 - DNA, 384 bp, Homo sapiens
cacatggcgagccgtactagtgagctccaagagtgtccttctaccagctgacatcattacctacagtgctcccgaggaccaccccggaattgtgacggcgtggattgtgctatctttgaatccccatacccgatgacaatggcgctctctgtactactaactatacaaatgtgtaacgccctcaacagctagtccgaaaaccagtccttgctgaggatgcccccctgggagaacatctggctcgtgggctccatctgcctgtccatgtcactccacttcctagatcctctatgtcgaacccttgaccaacgcaccgtccagttcgtcccttaccagttttacagtgaatagctgccggtgttggcccacggtgcgttggcccaa

SEQ ID NO: 558719 - DNA, 246 bp, Homo sapiens
tccatgtttaaggacctcctgggcctcaggagggtggggcccgcccctgggcggactccccccatccgcgggcgcgaatggccgggccgcgtcgcagtgctgctggctgctccctggttgctgggtgcaaagtgctgggttctgggtttctggattcgcgggccgttcacacgtagcctggcccctcccacatcatccattgtcttgctgccaagtgcgaataaacggcgtgattgccaacctgga

SEQ ID NO: 558720 - DNA, 354 bp, Homo sapiens
tcaatctttcctttaattagtgtaatagtatcttcaagtttatttagtcttataatatccattgcctggtaaagtatttcagattgatcaactccaagaaccttcttcgccccagctttagcagcaaacatagagagaattcggtatatgaaatctcggtagctttctgttcgtattttgtcctttagcatttcttcatgtatcccataatgcccgtatgagctgaaataaacaccatcctcatcctcctggaggtccgcaatgacactagtagatgacgagcaggttctgacatctgtgtgcatcacaaaatcctgagcaaagtgtctcattttttgcagatcctcacgtgct

SEQ ID NO: 558721 - DNA, 166 bp, Homo sapiens
  misc_feature (22)..(22): n is a, c, g, or t
tcgagctctttagccccaatgnggggcctcggagagtggcccatgtgcccctgaccgagtgactgctagaaacacaacaaggtacccaccacttaaggaaggacatctctccccacctgccaaggggactttggcttcaacaggacaagaggcaagcgtcagtcag

SEQ ID NO: 558722 - DNA, 288 bp, Homo sapiens
ccaggacttctatccctgcacccgttcataaggggagggccatggttaggtttatagatacctgggtggttgctgtaaatgaatgaggcaggagtcccaggaggttattattggcattaaaaatgattaaggatactactataagaaatcaggttcgtcctttaatgttgcgtatggttatcatttgtttgaaggttagtttgattagtcattgttgggcggtgattacccggttggtgatgaaatatttggaggtggggaccaatccagggggaaatagaatgatca

SEQ ID NO: 558723 - DNA, 170 bp, Homo sapiens
gagtggcgggaaatggggggcatcagcatgcctcccgtcgggttcctgcgctgacccctggtttgggcccctgtgttgctcccagttgaaaactggacccttttgtatgtatattataaagaccctgtttcccttttaatttttcaaaaatgggttttttttagaaccca

SEQ ID NO: 558724 - DNA, 239 bp, Homo sapiens
tcgttttccggtagccgagaactgtgccagtggattttcaggctgactctgctggtggcagcctgcaaggacacactggactattactgtaggaatgcagacaaaagatgatgagggcctgacatagggcaggagtaacaggctggagagacaaaaatctgggcgcagcttttggcaggtcagcaatagactgggcacgcacaccaataagctgcagctcattgcagtgaagtcatcca

SEQ ID NO: 558725 - DNA, 229 bp, Homo sapiens
  misc_feature (229)..(229): n is a, c, g, or t
cgggtatctaagatccaaacgactcaggaatctattgttagtgtaaaaggacagggaaatagagaggtaataggatatgtcttctacctataattgacaattttgccgctaagtagacagctggcagcacacaggagcggcactacacagacatgtgaaaccacttttttttttctttaaagacaggtttcgtctgtgcccaggtgagtgcagtgccagatggaaaatn

SEQ ID NO: 558726 - DNA, 1195 bp, Homo sapiens
  misc_feature (389)..(389): n is a, c, g, or t
ggcactcggtacggggcgggggtctggggagcgcagtaggccatgggaagccgtctcctgctctacaatggcgccaagatgcccatcctggggttgggtaccggggaaatctaccgtccatgggctatggtgtacgtgaggccggtgaaggtggcgcattgatctgtctgggttacgcgcactactatcagacatgttgcccggtgttgtactcagaactgatgatatgaggtggcgggtgtgacatgtcgagggagacagtctcagggagtcaggatggctgaaagacgatgagtggagacttccttcatgtgcgatacagaacaatggctgatgcgatgacagcgttataccatctgtatgcgaaggtgctcgtggctgaccacggngggtgcgcggtccaggaaacgagcatatccaggccgagccttcgaagtctggcactgtaagccgtggtacccgtcgtagccttatgtccactgtgcccggacatgcgctttgtgacatgcgctggggcacagggaaattctttccccagataagaatcggatgtgctgggccaatggttggtcttcctcatgttgccacaagcctaagcacgttttcttggcaccaacagttgatgatgggctccaatggaaatagaagcttgggtaggggaagcaagcgcgcctggtcgaaaaagactaatttgggtaaaactcgctacatcattactggaacgccattcatcccaagggtgggaaaattgagtacttgtcaatacacaaaaccctagtgggttgtgcaacgtctcatcaccgtccctggacttgtttcaggccagaaatttggaaggaggtccagccacaatggttcttcaaccttcaaggggaagaaaaggtttagattctcgaagtaaccttgtcccaatgttcgcgaaagagcggcaatacgctgggatgaccaccggagcgtaaggggggcgtcccctatcggggtttcggccatggagacaagggcccattgcgggccaatagggccctgacgagagcccatttctggtttccgtggagagagaggatccccagaggagttcaaaggccgggtccgcaaaagccaaagtccgagagtaaaaacatacaacggcccagggtcacaaggaacacgggtgcccacaaggcacgaaagaaagattgggggggagaatcgcacg

SEQ ID NO: 558727 - DNA, 534 bp, Homo sapiens
  misc_feature (11)..(11): n is a, c, g, or t
  misc_feature (74)..(74): n is a, c, g, or t
  misc_feature (76)..(76): n is a, c, g, or t
  misc_feature (78)..(78): n is a, c, g, or t
  misc_feature (81)..(84): n is a, c, g, or t
  misc_feature (105)..(105): n is a, c, g, or t
  misc_feature (151)..(151): n is a, c, g, or t
  misc_feature (154)..(155): n is a, c, g, or t
  misc_feature (164)..(165): n is a, c, g, or t
  misc_feature (171)..(171): n is a, c, g, or t
  misc_feature (176)..(176): n is a, c, g, or t
  misc_feature (184)..(185): n is a, c, g, or t
  misc_feature (191)..(191): n is a, c, g, or t
  misc_feature (199)..(199): n is a, c, g, or t
  misc_feature (206)..(206): n is a, c, g, or t
  misc_feature (210)..(210): n is a, c, g, or t
  misc_feature (305)..(305): n is a, c, g, or t
  misc_feature (361)..(361): n is a, c, g, or t
  misc_feature (376)..(376): n is a, c, g, or t
  misc_feature (380)..(380): n is a, c, g, or t
  misc_feature (385)..(385): n is a, c, g, or t
  misc_feature (395)..(395): n is a, c, g, or t
  misc_feature (423)..(423): n is a, c, g, or t
  misc_feature (460)..(460): n is a, c, g, or t
  misc_feature (525)..(525): n is a, c, g, or t
tggtgagagtntgtatgattaataagaagccgctttttcatgaaatgcttggaggtgaacgagttctcagcctntntnatnnnncctatcccattaactttgaantttctcttgattaatagaagaacaaaggggagggtgaagaaaaggnggnncatgctaanngccttntggcnatcatccnnatgtgngggaagancaaccgnttcnccagctcccctttttctattttgcaactttctacatctcactcttgattttggccttcctggctgaaacagcctggcagtccctagagcccctgngaagagccctggttctccaaaaggcagagggggagaagccctgcaggatgcgctgnccacttcccagaganctgncagtncgtgctcccnaaagtttgggccggcagcctaatgtganaagaaactgcactgaaaggtaaagggggaaatggtgntgaactgggcttatgtgagaatgtctatattttcataagacagccccagaatctttctctcagtnacagcctct

SEQ ID NO: 558728 - DNA, 733 bp, Homo sapiens
gatggtctaaagacccctgggcccttctttcccaatatacgttatttccgtctaggaggccccataaggaagcggaaatggatgttgaacgagttgaatacgctgaaataggtatgagattgtcacgctgtgctcatgcacacgggataggaaagtctcgtccttgcacgaccccagcaatggatgagcacgcgctcagacgtccccatcaggattccatgggagcagtcaggcagtttatgtcgtacggtgggaatggtgaagcgtgggaaaggaatgcgttgcgttgtgtagaatggcaccctgcttaccttagaaaaaggcatatagctgccacatgcacgtagctcatctacctgtctccagatccgttgctcagggcgtgcgtgttttgcaaagtggcgacataccatgcctcttgcatctttgcttcgctccgtgttcatgtttctcaagtacgcgatgactgtcagcagggggaaacacagaaaaacagaagcagcagataccaatgcaggcaggtcagctgcagcccaccagggtctccagctggagatgacagcatcctgaccttcttgccagcacacttggcttattttattcagtcgcctgattcatggccgctcatctgtgaaatacctcatgctcctttggggactgggctttggaccaagagcacctggggaggagacatggtgcataactaagccagtgagtaagtccactcgtttac

SEQ ID NO: 558729 - DNA, 175 bp, Homo sapiens
  misc_feature (51)..(51): n is a, c, g, or t
cctgccttgtcaggaatcagacaggtgagagccagttctgacttgcttggnatacttgcacaaactatgacaaacgtgtacctttagtgctgacttctaacaagctagtgcctgagctggagagtgagggtgtgggtggctcaacacacaaaccatgttctatgtttgtttgttt

SEQ ID NO: 558730 - DNA, 231 bp, Homo sapiens
ttcactgaagcaagtgatcataatcagtggtgacaattcaactgggcagtgtactcacaggaggtctgagaatcctaaccgagtgctgtcgctacatctgggtcccttccaatacagaaagcaaagtgtaaccatagtaccaggactatgtcaaagatgtctatttatgcatagcacatcaaaaagtaggattcctgtttactctgtctagtatcctcagaaagggcaggg

SEQ ID NO: 558731 - DNA, 134 bp, Homo sapiens
ccatcacccctggtaatgaatcaaaatgtcaggcggggcagtttctctagagtatttttaaaagttctgtgggtgttttacagaatattcctcaatttgagtttgcccagtgtttatcttacaattagccaggg

SEQ ID NO: 558732 - DNA, 123 bp, Homo sapiens
ccggggtctctcctgactcttggatctggtggtggaccaacactggatcctactagttacttaatttttttaagtaaaaaattattattatttggtttctgcaaagattttctcaaagccata

SEQ ID NO: 558733 - DNA, 188 bp, Homo sapiens
agcgggtgccagaggatcccgggcaggtgctatgatgctagctacttgggaggctgaggcactaaaatcacttgaacccaggaggtggaggttgcaatgagccaaggttgtgccattgcacttcatcctgagcaacaagagcgaaactccatctcaagtaaattaattaaattcttcctcttttctga

SEQ ID NO: 558734 - DNA, 427 bp, Homo sapiens
aggatagaaatcatagtgaaacatttcatattccctcattagtagaattaatgttacattgctataacaaattcacactatattaacaaaaatctcttcactactgcgatatcactctctgcttctttctttttcttttggttttaattaggcctccttttgatattctttggatggaaccctttttacatggcctcagacattcttgtttggaagtaaaattgtatttcatattcccccacatacactgtacttaaatgggcggcatttcccaatgactgaattgtagtagaatctgttctcattggcacgacacaatcctctgtctgctggagtgagacaccatgagggaccgtgaaattcaaaaaggctgggaaccttggttgattgcggagtcagggagttattcacagcatagagctgggtt

SEQ ID NO: 558735 - DNA, 743 bp, Homo sapiens
cccgaccttgaggctggcatgtggggcttcctctcccgacgctgaggctggcgtgtggggctccctctcccaaccttgaggctggcatgtggggcttcctctcccgacgctgaggctggcatgtggggcgccctctcccgaccttgaggctggcatgtggggcttcctctcctgaccttgaggctggcatgtggggcttcctctcccgacgctgaggctggcgtgtggggcggcctctcgggagcaggcggcctcggggatcctgggggtcagcagcccctccacagccgcacctcccgggactgaccctgcagaacccacctcccgccagcccctccacagcaggacagcacccgcctccttttccaagcccgcctcgcccagtggaggctgcagctctactgggtgtgagtcaggaggaaacgctcgcagccaacacaggcaggacacgcccacgtgacatcggatcccacggggaggagtccactgggcaaatctgaacaatgtgggggaagatattgatgagatgttaaacataacccatagaagaagaatctacaagtccgtactgacgtaaataaataaacaggcattggggagagacagcttttccttaccatagaattccaactcagccgcagaatcctggtgggaaccgtcatcaaagtcaacgggagcagacaccaccaaaccccagatcaaagtcagcatcgccagcaacgggcacacggacaccaggaaac

SEQ ID NO: 558736 - DNA, 304 bp, Homo sapiens
tctccttcctgagccaaaacttgtagttccaacattgggcttgatacagtggcagagttttaaaattcttagcagtgctgtggttggtcattttactagcagatttctaaaggagaagcagggcccataagagctaactggaggtttcagaagagtctctggaatagtttcaggtggcttcccactggagtgtggggttctcacgtggaagcctggcccatgagccctggatggtggttcagcgtgctgctggctcttggagagtgcttcagaccccgtgctgtggagatactgcactttttgc

SEQ ID NO: 558737 - DNA, 130 bp, Homo sapiens
ccatggccgactctagagtatacaaggctcatttgagttgcgctcatttcagtttggctcatttcaggttggctcatttcagtttggctcatttcagtttggctcatttcaggttggctcatttcagatt

SEQ ID NO: 558738 - DNA, 728 bp, Homo sapiens
tggaataaaaatcagtctatcacccaggcgggagtgcaggggtgacatcatagctcacggtaatcttctcccatactctaccaatcctccgttgcctcagcatccaaaatgggctgtgatggcaggtgtgcaccaccaacacccagctacattttttttggggtaagaagacaggggtctcactggtggtacacccagtctgggtctcaaactcccgggcctcaagcaatcctcccattgggcctcacaatggtggggataacagggtataacgccactgcacacgggccttactatcgctatcaaatccatattgtgggaaggggtggtttccccctttttcagaggcctctttaaagcctcgtgcagcaagaatctcacagtgcgtgtccttataagagcttaaagaagacaactctcggggccatgtggacaatctgtgagtgtggtgctaatctaacaattttaacacctctctcagtgtcaatatacctccagtgcaaataaccgtctctatactgctccatctcgtcgtgaaaagtttgtgtcggtaagaaagcccacgcattcccgaggttaaggaaagcctaccccagttcagtggaataccccctttattttacccaaacaaggccaaacgctcctccacaagataagtgggtctccaagcaggcaggcacggcaccaaaacgcgggttcacaacgcgtgaacatattggggggcatcg

SEQ ID NO: 558739 - DNA, 541 bp, Homo sapiens
  misc_feature (101)..(101): n is a, c, g, or t
aggattcaacaagtggtctgttaggggctttcagcggtgggggggtgcaaaaaattttcacacattttttcctttttggagtctccaccacacaggttcanaccagtaggaaccagggtgggtcaggctttttatttccctatggtggggggcaaaaaaaaccctgggttttgttccctttgcccccaaaaaatttagtcctttcctgtgatgggttcccccaaccctgttggaagtttgggtttttcccaaaaccggatgtgttggggggccggagggctatggccccaccccggaatttaaaaggggagccatttttttattttgttgggaaaagcccaaaggtttgggccccccctgtgagggatatactaaaaaaaatgtaaaaaaagggtgggtttcccccctttaaggaacggggagttttttttgggggattaaacaaagttttttaaaccttttaacgggttttcccagggggaaaaatgtcttttttgggggttttttttttttggaaataaaaccttgcctaagcccttta

SEQ ID NO: 558740 - DNA, 116 bp, Homo sapiens
agtagaagtatagcactgctccatgagaatacgtgagtggtatagagtggtatagggttatagggtggtatcagagctataccacctgatctcagatttactcagattttgaaatt

SEQ ID NO: 558741 - DNA, 123 bp, Homo sapiens
  misc_feature (116)..(116): n is a, c, g, or t
tcctcactgaccacgactctggagcgcgactcgactactacgcgcttaccactttgcgcctgtacgctactcgttctacgacggtaccccggtgtgttacaccgttacagccgagntaccgta

SEQ ID NO: 558742 - DNA, 1108 bp, Homo sapiens
gcacacaagtaatctcgacattgtcttatcccgctgatgattatgcagtctgaggcggcttatgagccctacgcttatcccagcgactatgatatgcacacacggagatccaaagcaggaccttgcttatgaacgtctgtatgagcagcaaacgctatcaggtgatccctgaggtgatcgaaggcttcatccagtatttccacaaaactgtctcagatttgattgaccagaaccgtgtatgagctacaggtcagtcgtgtctccagtgatgtcattgagcagaaggtggttgagatccaggacagtctatgagcaacagcgtggatcgcaatgctgactgaaagattcttcacagaatacagccttggcccgagagttgccgccattgttccacaggttggcaatcgctgctgtcttcctgattttatactaaggaattattctacagagcacagtactatgcgcgaagtcatgtggtgggaccgttccttggagcatgaggttatgaagtacctattgacaactactagcaattctcttcaacgtacgattcttaatgccgatggtcctgctccccttgaaggtacccaaaacagtggatctgggatattatcgactgactttcatctaccagtgtcagtcattcagtcagtaccgctgtaagactgccaccaagtcaggagggaggcagattgaccttggcttcgtacaaatcccaaaatctggaatgtcaccagtgtcctcaagtgtccttcattccctggtagacaaatccaaacatttagcgacaggttggcaggtaaaacagcgacgccggaggttgaccctgagagtcgtggtggggacattttggggcggcgcctctgttcggacgaaataggtcctttggaaagctatcgccgccctgtgtcggtggacacgttcccggcaggacaacaaagttgtgggaaaagtcctatcagggcggatcagggtgtgtaaaaccctaacttgagtatgacccgactatgtgaaaccgtgttgcacaagtgtcgggaccccgcgacataagtacggctggaattcgcgcaccggtgtcaccagtggcgccacaggcttgccaaaaacg

SEQ ID NO: 558743 - DNA, 466 bp, Homo sapiens
  misc_feature (233)..(233): n is a, c, g, or t
  misc_feature (392)..(392): n is a, c, g, or t
  misc_feature (424)..(424): n is a, c, g, or t
  misc_feature (459)..(459): n is a, c, g, or t
gtctgagcaagtggggaatgagatcaggtgttgcacatttctggtccatggtcccgatctggtttgtggcttggagggagagtagatttagatctggggggctgggtggggggccatagccttggcagctggctgggctaaccagtacttatatctttgggtcttgggcttctcaaagttcacgacagacataggcactctcacagtatcaagcccatttaccgtcacctcanaccaatactcgccccaccgtgtgataggctcttcgggtaactttactggtctcgtgggggcaaccacaacaccaagattcttaaagaaggggggggcaactatttcagggttcagctcccattggacattgttcttcatccctaactccaggcgacagntttttagaacatttcacggtcgcctcaccggncttggtctggatcttctctaattttcccagttggntcagacg

SEQ ID NO: 558744 - DNA, 158 bp, Homo sapiens
tgtaacagctaccctcgatgtcgcgcacttcgtatcattgtgaatgcggtattcaccatagcagttggaacttgtacaccctactaatagggaacgtgacctgggattagaccgtcgtgactgggataagaatgacccgactggtgatgtatcgtcgc

SEQ ID NO: 558745 - DNA, 206 bp, Homo sapiens
  misc_feature (78)..(78): n is a, c, g, or t
cagccttgaactctggggctcgagtgatcctccttccttagcttctgaagtagctgggtctccacacaagcgccatcnccggcttgtggtcccagctactcaggaggctgaggtggaaggatcacttgagcccaggaggtcgaggttgcagtgagccatgattgcgcccctgcactctagcctgggcaacagagaccctgtctcta

SEQ ID NO: 558746 - DNA, 522 bp, Homo sapiens
  misc_feature (69)..(69): n is a, c, g, or t
  misc_feature (73)..(73): n is a, c, g, or t
  misc_feature (75)..(75): n is a, c, g, or t
  misc_feature (103)..(103): n is a, c, g, or t
  misc_feature (109)..(109): n is a, c, g, or t
  misc_feature (113)..(113): n is a, c, g, or t
  misc_feature (115)..(116): n is a, c, g, or t
  misc_feature (124)..(125): n is a, c, g, or t
  misc_feature (130)..(132): n is a, c, g, or t
  misc_feature (136)..(136): n is a, c, g, or t
  misc_feature (142)..(142): n is a, c, g, or t
  misc_feature (145)..(145): n is a, c, g, or t
  misc_feature (150)..(150): n is a, c, g, or t
  misc_feature (498)..(498): n is a, c, g, or t
aagcagttaatacagactcagtgtctgcctttaaatataaatgatatgttgaaaacttaaggaagcaantgcnanatatatgcgatataaaatagtaatgtgnatgctngatncnngttaaccnnaaggnnnaganataatnagncaaantgccacaaggggtcttaattgaaatgaaaatttaattttgtttttaaaatattgtttatctttatttatttgggggtaatatagtaagtttttttagaagacaattttcataacttgataaattatagtttggtgggttagaaaagttgctcttaaaagatgtaaatagatgacaaacgatgtaaataatttggtaagaggcttcaaaatgtttatacgtggaaaccacacctacatgaaaagcagaaatcggtggcggtgtggcttctttttccctcttattttggtgatggggggcatttcctatgcaaataatgggggcaacagctgtatagttgtagacaatcntgagagaatgagtctgtattaaca

SEQ ID NO: 558747 - DNA, 456 bp, Homo sapiens
aagcagtgctatcaacgcagagtgcccattacggccggcgggggaggaacaaaaaaaaaaaaaaaaaaaaaaaaaacaatctgtgttggcgccgcgcccgtgggaccctgagaaaaagcttttcaagaacccattgccgtgtgggcgcgcgcgcgggccccagttagggtataatggtaaaagcggtggtcacataagcgtgtgtttcaccaaagagaaacacccgcggggccatagcatcaaagtggctgggggattttctccacccaatatataaaaaagacgcccgggggggaaaacacggagaggtgtttccgtgaaaaacaaatttccgcagatagggagagtttccgaggagagctcacatcgcggggatatctttatcaagcagaggagaattccccaaaggaggagctctccgaatatcataatttagcacgccccgggcgtggtggc

SEQ ID NO: 558748 - DNA, 798 bp, Homo sapiens
  misc_feature (305)..(305): n is a, c, g, or t
gaattattttttacgataccgctggacaacagcgctggtgggagcaggagcttaaaataaatgggaatattcaaaagggagaatcttttacatataacttgacccagctaattaaaccagaagcttatgaagtccgactgactcctctcaccaaatttggtgaaggagattcaacaattcgtgtgatcaaatatagtgcccctgtaaatcctcatttgagagaatttcattgtggatttgaattttgtaatatttgtttgttcactcaagatgatacagatattcggtgcggtacaaagcaaagnacagcaacaagaaatacaaaatatgcgcctcctacaggacctaatgctgaccgtagtggaaaaaaagaaggtttttatatgtacattgagacatcacgacccagattggaaggcgaaaaggctcgacttctcagccctgttttcagcatagctcccaaaaacccttatggacccacaaacactgcatattgtttcagcttcttttatcacatgtatggacaacatataggtgtcttaaatgcgtatctacgtttgaaagggcaaacaaccatagagaatcccctgtggggtttcagtgggaacaaacgacagagatggaatgaggctcatgttaaaatatacccaagtacttcattgccactcaatttttgaggttcccaggtccttgaatagaaagtgacattggtatggtgaggtgtgaacgcagacagagactggcaataatgaccaaccacctatagttccgtgacggggggcgggatcaaggacaatt

SEQ ID NO: 558749 - DNA, 377 bp, Homo sapiens
agcgaaagacagcacagaccaattcggaacagcctcataatgaagaaaaatgaaggctcataatctatcaagagtgctgaatatctgcatgtgaaagacttagtgtttctgttttcttgagacatttaatctggtggtaactgtgtgtaacattgcagccctgagcagcatgtgtatataatgatcattgtgttgtgatgctactcactttgattgcaatgatgatgtccaaggtaagctatcaaaaggcaggttacttccaaatcgcactgtaggataaggtttagaataatacatgatcaccgaaatgcataccactgtctgtgaagcctacaaaattcactgttctcttttggatttatttagcctgatgtatt

SEQ ID NO: 558750 - DNA, 318 bp, Homo sapiens
attagcaggtaagcaaagcggctacttctgaggagaaaatgtggtttctgactttacggtacatcacgactatcaccagtctgaatgagtatccttatatctgtaaagcagaaagtgtcatattactatattcactccagtgtgcagatgctcctacatcgacaaatactctatcagagaaagtatctgtacgtctgtcttagtacaaaaccattccttccctatgtctcaatgactgacattcaatgcctgacagaatcagcatttggcatgtccttggatatggcatcactatgatgctatgaactgaaagttcac

SEQ ID NO: 558751 - DNA, 615 bp, Homo sapiens
ccacgcgtcggttctggacatttcatatcaatggaatcatacaccatgtggctttttgcgtctggcttctctcagcttcatgtttttggggttcatccatgttgtagcacggagcagtggttccttcctttttatggctgaatcatactccgttgtgtggatggaccacgttttgtgtatgcattcatctgccgatggacatggggttgtttccacctttcggctattgtgaatagagctgcggtggacattggtgtacaaggaattgagtcgctgctttctattcttttgggtctatacctgggagcagaattgctacgtctgtatgtagttatgtaatctcttttgtcaggcttcttcttttttttgagacggagtctcgctctttcacccaggctggagtgcagtggcgcgatctaggctcagtgcaagctccgcctcctgggttcacaccattctcccgcctcagctactcgggaggctgaggcaggagaatcacttgaacccgggaggcagaggttgcagtgagccgagatccgccactggactccagcatggtgatagagtgagactccatctcaagaaaaaaagaagcgtgcagagggtgaattgggg

SEQ ID NO: 558752 - DNA, 279 bp, Homo sapiens
tcgatctcctcaccccatgatccctcgccttggcctcccaaagtgctgggattacaggcatgcgctactgcatccatcctgtttggttctttttatgatttctgtctctttgttgaactaattttgtttatgtattgtttttctgatttcatttagttgtcttaatgtagttcagtgagctatgcaatatagatagacaactattttttattcttttttgattcttttttatttttatttgagacagggctcacttgcacccagactggagtgcaatgg

SEQ ID NO: 558753 - DNA, 730 bp, Homo sapiens
tggaaaggtttaaacgctttatggtgcccaaaaaaaggcccagtggaatgaagggaaaagccggcagccctgagcccggagcgatggtttgtcgcgcacccaaaggcaaggagggtggggagccgggaaaggatgcgcggcctccggcgcccccgcgcgcctgtgggcccggccaaccacggaccccgcccgggtgggcaggcgcgggagagagcttgaccaatgactgggaagatcactgtggcagtgaagcatttttcagtgtgaaggacagttgtggaattcaaagccctctctattgtgtcccacgagggtgctcctttggatctgttggaaaacagaaagaaaaagaacaacatcaaatggtttgtacgcagagtttccatcagggataacgtggtgaggagctaatcccgtgaatatctgaacttcattagagggggtggtagactcggaggatctccctctaaacatatcccgtgagatgttgcaacaaagcaaaatttggaaagttatcaggaagattttgggtcaaaaatgtgcttagaactctttactggaactggggggaagataaagagaatctacaagaaattctatgagcagttctctaaaaactataaaggttgggaatacacgaagactctcaaaatccggaagaagcttccagagttggtaggggtactaccatctgcctctgtgatgagatggttctctcaggactattgac

SEQ ID NO: 558754 - DNA, 267 bp, Homo sapiens
  misc_feature (39)..(39): n is a, c, g, or t
aaaagcccctggaaggcaaaaaagttgggagcatggcanacagggaagggaaacattttcagggaaaaaacatgtatcccatgttttcaaaaacaagtcaggtttcatgtaaccaagggtcctcttgggggtccaaaaaaaacccagggctgtagcacaggcttcccagtgattttgtgttcaaccgtgagtcacacaaaaagcccccgtaaaattgggcattggggacgtccaggttgtccttaagaaaaaaaaacgtatgttgca

SEQ ID NO: 558755 - DNA, 280 bp, Homo sapiens
aaaaaaaaaaaaaaaaaaaaaagaagaaaagaaaaggaaagaaaattctaggatacatcagattgaactccttttgacaaagataattagaattgcatttataaaatcataagaattcttaaaaaactaaagaactttggaatctcctctgagatgagaaaataaataacaaaataatgaaacatgaagatattagatggtattagaaagcagatattagatggtagcagattaatattacatggagattgtggccaacacgtaatagtgtttcagagaa

SEQ ID NO: 558756 - DNA, 409 bp, Homo sapiens
cgacatcttcgggcgcacggtgagcaagcgcagcagcctggacgagaagcataagccagaggaggaggagaagaaagcggagttcgagcggcagcgaaaaattcgaccgctcgaaatagaagaaaaactcatctgtgaagaaacagcgcgaagagtataataattggtatcaaaaagggtggaggaagaactggggaaaaggaaggatgaaattgaacgataagttctccgaatggtggcggaagccaaacgcatcatggaaaaacacatgctcgaagaacttgagcgacagagacaagctgagcttgtcgcacaaaaagctagataggaggaagaacgtgctgaacgtgatgagctaggagcgaatctgcaagagaatgaccgagcaattggtgaatcacaagccaaa

SEQ ID NO: 558757 - DNA, 1013 bp, Homo sapiens
ggaagttgagcaaccgggaggcgggcttagggccggaagcaggaaggagggctcaggacgcagggcgccgctgccagccttgctgtcggccggtgggactgtcggtggccagagcaggatggagaagctacggctcctgagcctccgctaccaggagtatgtgactcgtcatccagccgccacggcccagttggagacggctgtgcggggcctcagttacctgctggcaggtcgcttctccgattcacacgagctgtctgaactggtgtactctgcctcgaacctgctggtgctgctcaatgacgggatcctgaggaaggagcttcgaaaaaagttgcctgtgtcgctgtcccagcagaagttgctgacatggctgagtgtactggagtgtgtggaggtgttcatgcgagatgggggctgccaaggtgtggggcgaagtaggccgttggctcgtcattgctctcatccagttggccaaggccgtcctgcgcatgctcctgctgatctggttcaaggctggcattcagacgtcaccccccattgttccactggacagggaaactcaggcacagcccttggatggtgaccacaatccgggcagccaggagccatcatatgtggggaaacggtcacacagagtggtgcgaaccctccagaacagccatccctgcactcacgggtactggggaggccctcagcagcgggaaatcggcagaaacgcagcaggaggactgagcagagccaccaaaactctgggggttgcaggagacccctggccgaagcttgggcatctgccgggccctggctggacttggccagcctgggagtacgggcgcacggatcttggggcacccctggtacagtgctgggtgcgccactttagtacacgagctcccgcaggagcgacaaccttgccccaaacggccggatcaccacgggggcgacacccggggaaataccgcgagcagcacggatttacgagctctagagcaaccttgtcgcatgttacgcac

SEQ ID NO: 558758 - DNA, 976 bp, Homo sapiens
ctactctgaagcgttataaaaacctgtaaacattatacaaagcccacaaaccttatagaaactcgtaagtgtgtgtgactggaaattgattcattagaacccagttttctttaagaactttgtgactcggttttattttttccttttccaaagactgtaacaaatacgttgccccaaaatgtcagcactgcacaccctccagggacttggaatacaatccttttctactttttctttctctttttttataaaaaactgggtctcccgtggtcacccaggcgtggaggtgcaggggcaacgatcaatagctaacgtgcagcctctggacctccgtgggctcaaggtgactcctccgtgccctacagcttccggaagcatagctaggacatacacgggtgacagtgccaccagtgaccgggcctaattacaaaacacaactccctctccaacgacacgaagtgggactcccctcaccctttcaaacactcagaacaccccggtccaccagtgggagcgctgcgtcctaggtgcgccacaacaacggacgttccacaaacctctcggcctccccgcatattggcataataaaatccggactacaccaaaccccgtggtaggaggcctagaacaccctgggggcgactccgagaaccccttctccgcccaccacacacgacaaaaagcgtgacccctaaacctaaccccacacgcggcgaccacacctcctcactcatctcgcgaacaaccttaaaaagggtagccccaccactgtcgtaaaacgtgggccacgaccaacaaagactcttgcgcacactcaaaaccagccaccagagagagtgaggcgaccatacacactagtacatcgtcacaaggcgcaggaccaataagagccccaccataaaccggcgcacgacacaagttgacgacacaacctggaccaagacagacagccaccaagacggggccccatacatga

SEQ ID NO: 558759 - DNA, 124 bp, Homo sapiens
gcgggtcgctggactctcgccatggcaggagaagagtttgaattctaacgacgagccgtgttgaaacttctttgtatgtgtgtgtgttgttttcactattaaagcagtactggggaatttagta

SEQ ID NO: 558760 - DNA, 266 bp, Homo sapiens
tgacctactggactgacactggtcggctgtttccactgcgctgcccgttactgcgatgtcatcctgggctcggcgcaggagtttctcacgccgtcggcttccttctctgccgggtagccccgtgtgctgggcctggccagtggatacccggaacaccaaatcgttaccattgaggtgcagagggagagtctgaccgagcctccgtatctcttgaccacgatggcgcttacctttcaggacttccattaaactaatgagcaaagaaa

SEQ ID NO: 558761 - DNA, 180 bp, Homo sapiens
  misc_feature (11)..(11): n is a, c, g, or t
tagaggatccncagtgccccacccgaaacgacggagacaatgagaacggtggccacgacggtgacgacggacaccagccctagcgaagtccaatcaatattcatgctgcagtccctccggctacggcggagcccttacggacgcccacctgggtggagtcgttaacgttcctatggtcaa

SEQ ID NO: 558762 - DNA, 147 bp, Homo sapiens
caatcgagctcctaccttaatccccatacagagtacgcgactgtttgaaaaaacaaagataattatggtatttgcttatggaattcaataatcagtaacctaaagtacaggttcggtaaaggtttagtaacctttagttaacccagt

SEQ ID NO: 558763 - DNA, 132 bp, Homo sapiens
tcacgtaaaaagtatagaacggcacaagacaaacactgacacaccagtagtgatgtcaaggatgtgaagcaacaggaactctccttcactagctaggtggagaatgcaaacatggtacagccactttggaaa

SEQ ID NO: 558764 - DNA, 579 bp, Homo sapiens
gccgtacacacaagggatcccagcagaagactgcgccaaatgtccatggtctctatgggcgagaatacaggtcacggccccttgggaatattattagacagccgccaataagacacaaagcggcctcatcgtggggagaggagtactacttgatggacggtatctgcacgagtcccaagtagagtacctgcctggaacaaggagatgatcctttgtcggcatgaccgacgacggccagaacggcggcgcccagtcaagaggttcatctcaaaaaacgctactattgacgatacctacattgggcccactggcctacttgactgcacaacacgagaacttggtcctcagtgactttatttggaatgtgctacacatcgctgtacaatagactctacaataagagtcaggaatacaggatcctgacatgattagacccgaaatacttggggtggggcagtcctggggttaaacgtaccgactggctgtggggggaattgactcatgtacggtgtccggaatcataggagttgacgtccatgcagcaaatggtaccaggttcccccttcacaatctgataac

SEQ ID NO: 558765 - DNA, 510 bp, Homo sapiens
atgatgtacagacatgctcctgatcccctgcttagcccacggaggactgtggtgtaggtggggggttctaaaattaacttttagcccccgtctacctattatgagtagggtacagatctaaagcagctccatgcaattgtattaattttggatgacaagactcccatctaaggtttttctccggcctgatcatttcatgggtggctgaaggatactagagaacctttggtccttgcatggaaaacaagaatccaaaaccagtgactgttctgtgagtgatgggtgtctgtgccgttggtggtcaggtccaggttccaggaagggtctttccagtcaaggtcagtggaggcccaacagccacagcccacagatggatccatcgctgcagtgaaggaggagcagggcctagatggtggaggagcgggccaacctggtgggcactcctggccttgcttcactgtccagctcgagacactatctccttagcatcggcctcagctagctgaagta

SEQ ID NO: 558766 - DNA, 724 bp, Homo sapiens
cgattcgccctatacaaggtgtgactttcccgtgctgtgaaaagacatttatcactagagaatgccctgattttaccataaccgagtccacttctgggaacaagagctcttttcctgctcctattccctgggtgcatcaaagccttgatatcgataaacgccatagtcaggtctgaacaattcacactgcggagccatacaggtcgcacaatgacccatctctatttgtgactctgacagcatgtggctggcaccttcaccagtcatgtccaaacttctaaggcacagaaggaaacatgaccgcatgaccggaggtttacctgcccctgtctgagggctgtgggaaatcattcaccagagcgagagcatcttgaaaggccacaggcataagcccacctaggcacaaagccgttcgagtgtcctgtggaaggatgttgcgcgaggttctccgctcgtagcagtctgtacattcactctaagaaacacgtgcaggatgtgggtgctccgaataagccgttgcccagtttctaccttgcaacagactcttcacctccaagcacagcatgaacggcgcacatggtcagacagctacagccggcgccaagatctcttacctcagctagaagctccgagttctcttactcccagcagtgaactcagcagcccaggccaaagtgagctcactaacatggatcttgctgcactcttctctgacacacctgcc

SEQ ID NO: 558767 - DNA, 210 bp, Homo sapiens
atcagagtgtgatgaaagatgtggagcaactaaaactctcatacatctgtggtagaaatgtacagtaatacagcaactttggaaacgagtaaggcagtttcttataaatatatgcgcaccatatgacctagcatttccactcctaggtggaaataagataacagcacatgtccaagctgggcacggtggctcatgcctgtaatcccagca

SEQ ID NO: 558768 - DNA, 476 bp, Homo sapiens
tcctttgacgacatcgctgaaggctctcgtaactctaccgtcatgtctaagtccgagtctcccaaggagccagaacagctgcggaagctcttcatcggagggctgagcttcgaaacaaccgacgagagtctgaggagccattttgagcaatggggaacactaacagactgtgtggtaatgagagatccaaacaccaagagatccaggggctttgggtttgtcacatatgccactgtggaagaagtggatgctgccatgaatgcaagaccacacaaggtggatggaagagttgtggaacctaagagagctgtctcaagagaagattctcagcgaccaggtgcccacttaactgtgaaaaagatctttgttggtggtattaaagaagacactgaagaacatcacctacgagattattttgagcagtatgggaagattgaagtgatagaaattatgactgacagaggcagtgggaaaaa

SEQ ID NO: 558769 - DNA, 1080 bp, Homo sapiens
tgccgccagacacacaggtgtcgtgaaaactaccccgtaaaagccacataatgggaaacggcaaaagactcatatcaaccacttgtcgtcattgtgacacgtagattcgggccaattcctaccacatactggccatctgcatctatcacatgcggtgtgcatctgacaaaagaaccattgaaaaactttgagcaaggaggctgctgacgcatgcggacacgggctccttcaaagtatgcctggagtcttgcgactaaacctgcaaacgactgaggcgtgacacgtggtatcacacatcggatatctcccttgtggcacacaatctgagaccatgcacagtactatgtgcactatcattgatgcccccaggacaacagcaggactctcatcaaacaccatgattacagggaacatctcaggcctgactgtgctgtactgactgttgcctagactggcgtcggctgcactttgaacctgcgaatatccaagaatgagcaagacccgagagcaatgccctctctgggctatacaccacattgggtgtgacaacaagctaacttcgacagagcgtcaacacaaacagtggcttcccactgagccaccttacaagccagcacgagatactgaggacacacgtaacgagactcagcacctatacacttcaacacacacatgggataacaaaccccgatacacacacaacctttgttgccaactccactggtgtgaaacgtgcgacacacatgtctgtagacagatgatataaaatatgctattgcctccagggacctggcaagagacgcctgtacgactaggccatgccacgcgcacaccaagctggtgacagcccaggataaggcaaccgatacaacaatgcatgtccaactaatcaaaccatcgtgacgctgctcatcaaggtatgtatactcaatggggtccccggcacgtttccgtaacgaaaggaccaatggagaataacacagatatgtactaccagtaagaggacgatgagaagccataagttcgtaaacgcatgatgctgacccacgcgaatataaccattcatacagcgataggatg

SEQ ID NO: 558770 - DNA, 395 bp, Homo sapiens
gtattgcgcatgagctgtatctagagtatcccctgctatcgtcatatcgaagcgatcagatgaccagcaggcggtacaggtcgcccttcttgatcttctccggcttgagcggcttggttaggtcctggttggtcagcatgaggatgcctgcgccaccgtacagacgagcccagcttgtggcttcgctcaccatggccggcagttgcaggcggtcttcctcggcgcggatcacgtccgcgtcatcgcacttgagggtgcgccactcgcgggtcatgtcctcggccgggtagtcaacgatcgccctggcaagccagctggtttgatacgcagcatccaactgctggaagtcgttcaggaacccgtactggaactggttgtgtgagcgcttggccttc

SEQ ID NO: 558771 - DNA, 381 bp, Homo sapiens
  misc_feature (25)..(25): n is a, c, g, or t
  misc_feature (112)..(112): n is a, c, g, or t
tactgaggtatactatttttactgngattttgaaactccaagataatttcctgaagaaagttttttgacaattttaccttttgaaaattccccattgatctgttagttatcnttcaaaacgtctggagaaaagtcaggatatatatataacagccaaatgggcaatttctactgttttcattactttggttttagaattgccactactgcttgcttaatatttaaaatttgctggtcttaaagcaacagtctattttccaatcttggggaagattatggtcgtataatataccagatggacgcattagtactgttaaaaaaaaaagactagttgcctatatgaattgcaaacttaataaagaaaatgaactaggaagaatg

SEQ ID NO: 558772 - DNA, 398 bp, Homo sapiens
cttagtagtctatgttggggtggacgtgggaggaaagaatgagtccttcgacgcaggaagggcgatagcaggggaaaggttctgtgcctgtgacctatgggcggtcactcacgttgctccatttatactaatacggtggtctcaggaaggtccgatttttcttctctttcttccccttcgtattggcttggaagtaacagacagatgtccaaacgaccatctcgactttcctcaaaaggtttttctgccactctctttcccgtttgaatcaatcttgagcttcaatctcttcttcccttagtcgtaaccttacatgcatctcttaggctactcctctctttacttttaattaccagctctgcaaagagtatcaattgtctgtatatatacagcttgtc

SEQ ID NO: 558773 - DNA, 486 bp, Homo sapiens
ttcaccgtgaccaggtgattgaccagtgcaccttatgatccggtacagcaaaatagtccctcatactcactgtatctggcaacacagagaatacctgcagctcccacataacagatctccatccaacacagacagacccaggtagattggtgatcgataatcaattgatgagcataccagctgtatatgactaatggctaaccagagaagtctgtacattctacactgacttctctgtatttctctgaccacctcattatttgtgtgtaatatattcataacttgcattatgggtatttaaagtcctttggaaggtgctttaacttattgaggcttttctttactcttccggtgtattgtagcagaaatgcttatgctaaagcatggtgttaaggaaactgcacacctttaaaaatactggaacagagtctcgctctgttgcccacactggagtgcagtggaatgatctcagctaactgcaagctc

SEQ ID NO: 558774 - DNA, 449 bp, Homo sapiens
ttacaggcatgcaccaccatgcccaggcaaagagacatactttaaatgtaaagacaaaataggttgaaagtaaaagaataagaatggaaatagatatactatgcaaatagtaacagagctggagtggttatgttaatattgagcaagcagactttaagacacgtgactgggcactgcggctcatgcctgtatcccactttgggaggctgaggtgggaggatcacttgagactgtaagttccagaccagcctcggtaacataatgagatcccgtctccacaaaaaataaaaaaatgaggcaagcgtggttatatgtacctgtagtcctagctacttgggaggctgaggtgggaggatcatttgagctgaggaatttgaggttatagtgagctatgacaatgccactgcactccagcctgggtgacagagtgagacgctgtccctttaaaa

SEQ ID NO: 558775 - DNA, 416 bp, Homo sapiens
ctaactctgcttctacaagagtttccttatcacttactgaataccgattgtgtcttcttccctcaatcacctgggaggaaacatctatcatcctgtcctgaagggagttcctcctaggtctggtcggacctttgtgtagtaattaagatttagatcccctgctaggaaacctgctgggttaagggaatttttagtggttaatgttgaatctttttttttttttttttttaacagaattgcctcatactttcttctgttagcaaagcagttgtcgctacagattgaatgtatttgggccatctacgggttattgggttaaggatttttgataggaagggtacgggttgtcagtgtcctcagtgaaaattggttttgggttcttctcaaagcccccagacaggatgccaccggacgcg

SEQ ID NO: 558776 - DNA, 447 bp, Homo sapiens
  misc_feature (409)..(409): n is a, c, g, or t
  misc_feature (443)..(443): n is a, c, g, or t
ggagctagtgaaggaaacatagggtttatttggggaatcttacagggtggtccagtggccgcggctggacagaactgcaaccacttataaaaagcatgcagtttacatagcactttcactcagcaccctcccctcagcagcctccacgtggcaaccctcacttcttaagttattgctgtcagatgcatctgccatacagggtcattctcaggggatgcttaagttatttctgtcaggtacatcttccatacactttactaccttgggagtaaagtagtaaggaatacagctttttccttaacctttaccagcttaactcagtgcttagggggccttgggaatgcctgctgtccagcaggtgttcacagggccttgactgggggggctgggcctttattccaacagtgtntggaagggtcacatatggggttccctgaggtganttac

SEQ ID NO: 558777 - DNA, 839 bp, Homo sapiens
gcagtgagctgagatcgcgccagtgcactccagcctgggtgatagagcaagactctgtctcaaaaaaaaaaaaaaaaaaaaattaggcttgggggtgtgtccctgttttcccagttattctggaggctgaggcaggaaaatcgcttgaactggggagctggaggttgcagtgagccaaaatcgccccattgcactccagcctgggcaacagagggagactccgttattcaaaaaaacaaaacaaaacaaaacaaaacaaaaaaacattgccgggttgcgttgggcttcacaccgttgtaatcccagcactttggggaggccgaggcgggcagattcacctgaggtcaggagtttcgaccttggccaacgttgggtgaacaccctgtggttctctactaaaaatacaaaaatttagtggggcattgggggcagatgcctgtaatcccagctactggggagactgagcacaggagaatcatttgaacccggggggcggaggttgcagtgagctgagatcgtaccatggcactccagcctggggaacaagagcgagatttcgtctcaggacaaaaacaaaagaatttcccgggctgggtgaaccaattgttttattggtcccaaaaacccgggaaggcatgaggcgaggaaatttcctttgaaaccggggaagcgtggaggttggcgtgacgcgaaaccgggcattggcacttccagccggggccacaggagtagaactcatctaaaaacacaaaatttgccaacgtggttggtgtcacgtggtccacaactggggcgaagaggagaactggagctgggaaaagatgcggtaccagcagggc

SEQ ID NO: 558778 - DNA, 237 bp, Homo sapiens
tgtaggaacagattcaagagatatacaggtggcaaagtccatagactccatttgatggattgaatatgagggggaaagaaggcattgacaaaagcactctccaactttctcagcttacagcagctagcatacaaggtcaaatcccattccactgtggccaggcaaatcactggcagtccccagcatttcaaagcagcatcaccaggttccaattaggcaggcagctataacacagct

SEQ ID NO: 558779 - DNA, 1166 bp, Homo sapiens
  misc_feature (201)..(201): n is a, c, g, or t
gtgtacccccgtcggacaaagtccaaataggcggggtcatatccttttgatacctgcgtataggccctctgcaaaatgggttataaaaaacatgtggatttttttatgggcaagaagcttctggaacaccggtttttaccagccctagtttcccagatcctcaactctttttccagggggtaattttaaaaattcttcgcntgagagtttctattactggaaaacaacgcatgttccaagaaagggagttacccgggggatccacccaatggtttcaaactcggggacgcccccggggattgaaccgggtggtgacatttgtatactgtccaccgtgggaccccaccccaactcccgtggtaaaagggccccacacgagaaggtttaaaaaagtggggttttttcaaaaattccaaaaaggagtgcaactgttttggggattaaaactgtggccccttgtgtgcccccccacgaaaattgtaaccttctccacggcaaaagcacttgtgtctttataaaggcttaattaaaaaggggaggtataaatacatttggagtaccttaaattggaaattggcacaccttaaataagcgcaaaatgggtttcttaataaatgcttaccctgagattttttaatgaaaaaaggtggtttgaccaagccccagaaattttatggaatgtaagaaatattcgggaaagtttcacttttcccgggatattcacactttcttcccgggatattttttaaaagtgtaaatttgggaaaatattaccaccccgtttcaccctttatttgtggagttcttttgccaccacatttgaactgaaattgaagctgtcacatttggaacacatttataaagcacagcctgtttttggggtctgtgaagaagtaacacatgtaattaataataacacagcgaccaacacacgggcttgcacactaaaagcaattgtcacttgtaataacacctaacttggtaccctaaacttcaataataatgtaatttttaaattgcaccacaaaagtcacaataaatttgtcacccttggggttttgaaatgtttgctttaaagtgttggctatttttatgttttataaacccaaaccaaatttcccaaaacaatgaagggaacccaccactcaatatttttgcatttccca

SEQ ID NO: 558780 - DNA, 196 bp, Homo sapiens
  misc_feature (88)..(88): n is a, c, g, or t
  misc_feature (133)..(133): n is a, c, g, or t
  misc_feature (139)..(139): n is a, c, g, or t
  misc_feature (167)..(167): n is a, c, g, or t
gtaaggaagtgattgtgggttagaattttaagtttctattcctgataaggatttcatttgacctgaaaaaatggagagacaaaggatngggggcaaaagagtagctaactctttgatgaggctagtattaatngggtcntactatgccaaagagatggatccagaantaagaaagatcaaagaaaatctcctcaga

SEQ ID NO: 558781 - DNA, 150 bp, Homo sapiens
cggcacacacacgcacacacatgcacacacagcacacacacaaacgcacagcacacacaaacgcacagcacacagcgcacagcacgagcacactacacgatgcacacagtcacacagaacgcacagtcacacgcacacacatagcacaca

SEQ ID NO: 558782 - DNA, 690 bp, Homo sapiens
aatgagagtttgcaactccgtgtccaacagctggtggccaaggaattggggccagacagggacacggctcactccagctgtcaaagcagagcacatgaagcgacaaagacatccatgattgcgcccacagtcagcccagtcttctttccctccctcccctggtccatctcctgatgtgcaactggcaactctggctcagagagtcaaggaagttttgccccatgtgccattgggtgtcatacagagagatctggccaagactggctgtgtagacttgactatcactaatctgcttgagggggcggtagctttcatgccgaagacatcacaagggaatcagtccctaccccagcctctgcctcaagtttcccagctatggcccagccagggggggggttttgtaacacccatcagccaacagccataacatttgccaagtcttcctgggcccggcaggagagcctgcaggagcgcaagcaagcactatatgaatacgcaaaaaggagattcacagagagacgagcccaggaggctgagtgagctcaaaggaacaggatggcacccagagccgcaggacggagactgggggcagccctcacccaactcacaacaggctggatgggtgggtggtaaaaagggaaggatgaggctcccccaatgtcacattaaattcatggttttcattcaagg

SEQ ID NO: 558783 - DNA, 1537 bp, Homo sapiens
ctttttaaagcaattgtcctcacagagaccacatatttcagtatattacatgtggtctctgtgaggacaattgctttaaaaagcgtgaggcgtagtgcttagagagatatccacgggcgaattgtgggtcacgagtagaccagagtgtaatgatagcgtgaaatatgtacgatgttggtaataggatttaggtgaaaatgaaatggaaatgcatgaaaaaaaattattagacttgtcaggatggagggagagggagcacaatgataatagttagtagcagttagcttaaagcgcgtgataaagagttggataggaagttagtggagcgatcagagttaatatcaagtcagtgtgatagcaaacgacaagacgaaactagagaaaataattgtgaggtcaacgcgcaaagggatataccaaatcagcgattcatgtggacagatgagtctcttttaaaatgtcgaaaaagtaagagtgggtactgaacatcaattaatacgattaggagacgtcaagaacgatgcaaagaaacaatggtgaattgaaacccgttaagagaacaccaacgcggaccacgcccgatcgggaatgcgaatggcttcaacacaaaactaccagacccagacgcatcacggaacgaaacacggcaacttaaaggcatcaccttatagaatggcggagccaatgtagcacaaacttaggtccaagcgtggacaagagcacgtcacagatccgctcatacaattgggccacacaacaccagggaccgagagcaaagataacaacacaaaaaaggaggcgaggaccatagaacgacgacgaacccccaagacacctaggaaacaagcgacacaagcaacggtcgcgcaaccgcagacaacaccagtaacacggcacaagagggcagaccaagacacggaccacgaggcaaaaaactcaacaacgcacacacctaagacacaaatgaaagcgccacaaaaaaaacaaagagggacgaaaaacacaagaacgcaaaagccaaaaaagcaaaccaggcaaccacaaggaagctgaaacagcaaaacagaaacaaagagagacagaagagaacaccacaacacatttcgacagacagactcgaccacaagaagcgcacaccacacagaactcacgaagtacccacacacgaaaaaacacacaacgaacaccaacacgagcagaagacacacgtacaaacgaaccgaagaacaaaacagaaactagacaaccacaaagaagcaaaggaccaaacaacaactgagagcgaacagcaacagaccgacaacacgcaatacgcgatagagaaagagacaaagacaggggaaaacacataaatagaaaaaggtgccagaaaaacacaaaaaataggagcaacacaaagacagaccaagagaaaacaacaagagcaagacagaaagcacagagaacgcagcacaaaaaagatggggacaaaaacgaaccaagcaaacagacgagaagtaacgaaccaaagcgaggagacgaacagagcaaatcagaa

SEQ ID NO: 558784 - DNA, 98 bp, Homo sapiens
ccaattgaagaaactgccattactgtgatgtttttggggactgccccccagccaaacatgtatccaaccaaaagatttattaaattgtggccattttg

SEQ ID NO: 558785 - DNA, 363 bp, Homo sapiens
tcatgcaccgcgggatcaaatcagcatacaaaaatcacgtaggcatgaccaggtgcagtggctcatgcgtataatcccagcactttgggaggccaaggtgggcaggatcacttgaggtcaagagttcgatgaccagcttggccacatggtgaaacctcgtctctaaaaaaagtacaaaaattagccaggtgtggtggtgtgcacctgtagtcccagctactcgagacgctgaagtatgagaatcacttgaagcggggagggggaggtttcagtaagccaagatcgagccactgtactccagcctgggcaacagagcgagatcctgtctcaaaatatcagtagcatttatatatgccaatagtg

SEQ ID NO: 558786 - DNA, 854 bp, Homo sapiens
ggctacaagttccagcccacagtgaacaacccgtacctgcagctcccccaggaggacgaggaggatgttcacgatggacggcaagtacatgacaagctacaagatggcagcatcaaaatgaagcctctgatgggggtgatatacgtgcctttaacagatatatgaaaagcatgtggtccaggtgcacacgtgattttatcttctgctcttccttcttccacacatgcaaggggatgcattgtaaaatgcaacatcagcttgaccagtataaaactccactagtggattgctcagtctcagtcctcaaaagctttttgaaaaaccaacaccatcacagcttgttttggactttgtttgacactgttcacttttcacgcatgaacatgtgttgtccgacactaggggcttctgattcttcaagaggaggcacatgaggccaagattggtagagtgaaggatgcaaccgtataaattgtgtgtaatattacttgtaacatgcccatattttacttgcgaatctcttaacacgaacacgggttctgtaaaattggaaaacttaggtgtgaattgctttgaggagtgggtcccctattcttggacacataagtctgggcctgagtggtcattgatcagattgcttgtgtgcgtggaatagcaccaccattcccaagctacgctcctgcgctgggaatactggtagaagctacgtaggagatgaagatgaccttcctttttaaagctttgatggggggcaagaagagctggtgggacatcaccaggggtggtaccctaactaagcttgggagttaccaaaaaggaggggagccgctaacacgcggcgaggaaagcagagc

SEQ ID NO: 558787 - DNA, 339 bp, Homo sapiens
ccccccccccccccgggggggttgggagggggcccagttttttttaacaaaaccaccctttttccaccccccctaccaaaaagttttttttgggaaaaaaaaccccccggggtttcaagggttttaggaaaggttccccccccaattaaaaagccttaaaaatccctggggaaagggatggcccaaaaagaagggatttgggcccttttttcccccaaacccccctgggggccggtttaagttttttttgggggccccccattttttaattttttttttaaggggggggggggggggaaaaccccctttttaaaaaaataaagggggggggggggggga

SEQ ID NO: 558788 - DNA, 387 bp, Homo sapiens
ggcactacgagttatctagaggatcccttggagagggggtctcaggttatgtatcataaacagagaccatagctactagctaaggagaatttaaaaccaaataacccaattaaaaactggggcaaaagacttaaacaggatgggcacggtggctcatgcttgcaatcccagcacttgggaaggcagaggcgggcggatcatgaggtcagaagacagagatcatcctggctaacatggtgaaatcccgtctctactaaaaatacaaaatattagccaggcatgggggagggcgcctgtagtcccagctactcgggaggctgagacaggagaatggtgtgaccccgggaggtgaagctattgcgccactgcactccagccggggcgaca

SEQ ID NO: 558789 - DNA, 579 bp, Homo sapiens
atggcagtaacttggtagggagcagaaagggtcttggtgtttaaaagtcttgttagaatgactctcattctcacctgtgaacccagtttagcatttatgtacttaaggaaggacaaagaggtgagctggactgtgctgctgccatctcagtcactgcaacctccctgcctgattctacctgcctcagcctgcgagtgcctgctattgcagagcgccgcacacggccacgacctgactggtttacagatataaaaatggtagagacggggtttcagcatgtgtaggccgggctgcatcatccagctcctaaaccgcgagtgaccctgacagaccttggacatcccccgacggatgcccaggcgactttgcaagaacggaagtcatcgagcttccacctcaagatgctccaaatggataggccccaaggctgggaggcttgcacacgtaggacgcataaatcatcaggagcatacgctaatcaaccccttccacacttcccacaccggcacttgccatctgtgcccttacccaacaggtggccgaggattagcgaggcccacttgccccggccagcaaccg

SEQ ID NO: 558790 - DNA, 1046 bp, Homo sapiens
  misc_feature (330)..(330): n is a, c, g, or t
  misc_feature (348)..(348): n is a, c, g, or t
agcggagattgcccggagattgcgctgtgactggcagcctggctgtcttgcctatgagggttcccagcaccatgtacggccaggatcttcttcctccttcggcctgggccgggcaggcgaccgttgggcagcctcacatactaacacaagaagcctccctgcgcgtgatggagcacaggaagggtaggctgagaaatgataatatgtagagcatgaagcgtagactagacgtgtatgcttggagtgcgagctgaaatctctggtctcgacgggtgggaaagctaggagagaaacttctagaattgattgggtggcacgaagcgaaatgtnccgaaatcacgtgagtgntgtgtcgcgtcagtgaacaatcctctgaggagcaaccaacacgatgtggcaaacacaacggggcaaatgtgtagttgtcgtacactagtcagtgaatgaaagcaaaacaaccccccacaatggtagccggtggatgctcgaaggtactcgccagcacattattgacgcacaggctctgcgcattaggggtgatggtggtagatggaaagggtagtagcaaggcccacaatggaccaaacgataggacaccttgcggatattctgtcacctgtcgcgtctctactgtatgctcgaacaaaacgtggtcagctcctgggaaggagtcaacacaacgaaacgggtcgccaacagagcttcacgaccctgggaactgacaaatcgcgggaacttgcctgaagttacgttgcgcctactttgacgcctgggacatcttgcatgcttgaacacgaattttgcccccgttggtgcattgcgtgggactagaggctcgatggaacgttccgtgtgtcaggcccatgcaattgaagacggggatcgccgtgactgggcagacccttgctgaactggagaatacagaaaggctgggtgggagaaccgaagaatccaattgggcaaatgaggaaggccggcctggggaaggcaggcagaacgaggacccgggggaggcaggtggggcccgggaacttccgagaacgaac

SEQ ID NO: 558791 - DNA, 431 bp, Homo sapiens
  misc_feature (372)..(372): n is a, c, g, or t
ggctcatcctatgacgcgaaagtaaccgagactatcaggatccggagacggaacatgtcctgaatggccggcagtacctttgaacccccttggtttactttttcttggggggaagcttcgaaccggaggaactggaaacctgaaaggtggaaactcagtgaaacatggtaactggacagaagaaaaagcaactgaaaaaggaaaaaaacgaaagctttggcaaccacaaaaacaccgaaaaaacccgggggagtttcccaaaaccccggaaacggcttttaaaaaaccccaaaggggggtttgcccttttgcacgataattggctaacggcaaaggtggacccttctagggtttatgagagagattgcaaanagtcgtttcaccaacgcggactacggaacttatccttttccgaagaaaccacggactta

SEQ ID NO: 558792 - DNA, 130 bp, Homo sapiens
  misc_feature (101)..(101): n is a, c, g, or t
ttgtatggatgggcttctatggtcctgaaagtaaaagaaagttcccaagtcaatgtgtgaaagctccagtgcccagtgtcaccctgtcaaatgcccagctnaaaagcattcaaagcatgaggagaagtgc

SEQ ID NO: 558793 - DNA, 203 bp, Homo sapiens
taccccattatgtgcgtgatcataggcatgagccaccatgcctggcttccacatgaaatttaaagtcagcttctcaatttctattgtttggttctaaaatagatgtaagggttttaaatgtgagcaacaatctctatggagccagcattttttgagttttctcatcccaatagctgctttttccgcctcagtcttctcctggg

SEQ ID NO: 558794 - DNA, 141 bp, Homo sapiens
  misc_feature (122)..(122): n is a, c, g, or t
tcaaaccggaacagataggaagggataaaggcaaaggagctggccctaggccctggcaatgaaccgggcacccttacttatccccaacccgcgggttaatgccccataagggagcgtcttangcgagatttctcctaccat

SEQ ID NO: 558795 - DNA, 508 bp, Homo sapiens
aaccagaaaagtccctggtctgtcccttcttatggggaggcagtgcctcgacagctccagctcccttgacctaccttcctcgccgtcacaccgcccaacctacgccgcccctgattatcgacgcccaggagaactaataatctaggatgatactagtgtactgacactgaacacacgaactcgaaaccttaaataacgcattgatccaatgatagtaataactgacatacctctacttcatacacaatccaccaaacatactatgaacaacatcaatatacaattcaacaccaaatctaaataacatacaatatacataccacaaaataataaaacttataacaactcactaaaacaaacacaatcccaagtgaactaataatataacacaaatcatcactcaatcatctatatacacatatatcaactaacacatctacatcaatctaacacacaataacacatccataatacaaaccacactacctataccaccaaacatacaaaa

SEQ ID NO: 558796 - DNA, 830 bp, Homo sapiens
acccgaggcggaccgaggcagtcccgccgcatgcgcagtccgaagccagtgcggggcctgagagggacgcgcgccccggggcccccgccgcgggcaccatgggtcgctgccacgtccgtcgtctgaggaggtgcgggagctcgagggcaagaacgggttctcatcggatcaggatcgcgcagctccatcggggatttacggcatgctgagtggagatcagcctaccattgcgcataggagaacttcatcaatgtgcccggacctggagctcaaccccatccgatccaaaattgttcgtgccttcttcgacaacaggaacctgcgcaagggacccagtggcctggctgatgagatcagtttcgaggacttccctgaccatcatgtctctacttcctggcccatctgactactcaccatggactgaggaacaggtggagctgtgcccggtaatggagtaagctgagtatttctgtatccacatgtacgactcggacagacgacggtcgcttcactctggacagaatatcgaactgtggtcgaggagctgctgtcgggaaaccctcacatcgagcaaggagtccgctcgctccatcgccgacggggcatgattggaggcggcagctgtgtgcatggggcagatggaagcctgatcaggtgtgcgacgggatcagcttcgaggacttcctgaagatctgccaggggatcgaccttgaggacaacgatgcagtcggttcccttaacatggaaaccatggcctttggcactgacccacgcacctccgggagaaactggctttgcatgggggcggctcccggtagtgaggagcaggc

SEQ ID NO: 558797 - DNA, 841 bp, Homo sapiens
tccctccttttgtgctctggacctttcatggtaatatattcacacatctagtgttccctaacaatctgagaccctctgtattcaaagcatactttttcctgtatacaattaatgattaactccatttgctccctaaccaaaattgttttacttcttttatttgagcagatttgtgtgatgccatgttgatatacttaagttgtcctggggttaaatatattcgtatattcaatcatccgatcattcatctatttactcagtcattcaacagatttgccaagcattgtgccaagtaatgagtgtgcaattgtgagccagaaaagacaaagtccacatcttctcagaatgtacagtcttacacatgtaaatgttcatagtattgagtgataagtatcactggaaaaataaaagatactaagggcatcagaggagcctctgaactgaatataggccagaaagaaataaggtaaggtcactcaagaatgactgaagttaccagggattattttagctccatgagggtaggaccatgtttttctcaacacccccaacccttaagtctctaaggtcctatatttttactttgtaattaacttttaaatctgttaaaaaaagtcatccctagattcatattcatgatatgtgaaacagtatgatcaagagagggtatcagtgaaggtaataatgaataaatcagaattgatgaattacagagataaaacattcagataaaattctgtagaagataactgttatcatgaaatgaacaagtccattatgtgtgggatctcaaatttaataaacatggtatgtcttctcctgattaagttttatagaatat

SEQ ID NO: 558798 - DNA, 580 bp, Homo sapiens
ctaaaaaaaaaacaaacaacaaacaaaacagatttctcacagttctggagactggaagtgcaagatcaaagtgtggcaaattgtgtatataaaagagggcctgcttcctagcatggaaatggctatcttctctcggtatcctcacatggtagggagaaaagcagctctagtgtctcttcttataaaggaagtaatgccaccataggggctctattctcatgacctcatctaaacctaattctctcctaaaggccacgcctcccagtatcctcaccttgggggtgagggcttcatcatatgaatttttttttttttttttttcttttttttggaaacagagtctcgctctgtctgccacccaggcgggattgcggggacacaatcccggctctcaacaagccccgcctccggggtcacaggccgtactccggcgtcagccccctcagtagcgggaactagggcgcccgcaacggcgccggagaaatatttggtataaccagaaaagagggggttaaccaggtcagccaggatgaccccgatcccgtgactcatgaccaccgcccggcaccaaagggtggat

SEQ ID NO: 558799 - DNA, 554 bp, Homo sapiens
tacccaggaaacagctatacacagtggttgcaacactggagactcgtggcacataccatatgatgaagacttggtagaaagatgttcctgttgaatgtacctaaccaatctggatattgcctccaccaaaagacatagagattcttacctctatgctaagtttgtgtttgggtaccctctaggttggcatcagaggctcttgagctggtgtttgtttagggcattgcctctgtcctgaagataaaaggattctattaacagcattgacattgattttttaatgaaatgagatatatcttttcataaccagctgcgtttttttcccctaacatttgtttttggaggcttatcaagagttggagaacttagtgtagagcaaaacctgcatttctcctactgggccagctattccacttagcttgggtgactaatagtgcttttggtatccattttttgctacttctgaccttgccttccaggcctaccaatagcagaatcaatccatctgtccctgagatactcatgttgtttcaaatgcctcctcccatttctgg

SEQ ID NO: 558800 - DNA, 160 bp, Homo sapiens
aggtgatacctgcttctgcccctcacaagacctgttcaactacagcactctactctacagtttactggctaaatccaccttcgacccttaagtttcagtacgggctatcgtagttttcttggggcagaagcagtgaagcggggatccatctagaacgtcg

SEQ ID NO: 558801 - DNA, 436 bp, Homo sapiens
agtatgcaaatgcacatagcagcattattcattgtagccaaaatttgaaaacaacccaaatgtccatcagctggtgaatagatccattgtggtacatctatactgtgggatactactcagcagtaaagggaatgaactattgatacacaaacattatagatgattttcaacacattatgctaagtgaaaggaatcaaatacaaaagactacattctgtatgactaaatttatatgaatttttagaaaaggcaatatacagggaaaggaaagcagatcagcatatccctgaggctactaagccaggtgaagggcaggttccaaaggggtataaaaggctttagccaagtaatgaatgtgttctgtatctttattgtggtgccatttacatgcctgtatccaattacccaaagtcattaaattatccaattaaaatat

SEQ ID NO: 558802 - DNA, 767 bp, Homo sapiens
tgaggcccatttgagatatttggtttcaattagggagatagttggaattaggattaggattgttgtgaagtatagtacggatgctacttgtccatgatggtcaaagggtaccttacgggtgagtcctgccgattcaggttagaatgaggaggtctgcggctaggagtcaataaagtgattaggcttagtgggcgaaatataatgcttggttgttgggatatatggaggatggggattatggctaggatgaggatggatagtaatagggcaaggatgcctcctagttggttagggacggatcggagaatggtgtaggcgaataggcaaattatcattcgggcttgatcgtgagggcagggcgttgtactacaggggtagggctagggtataattggtctggagtcgccaaggaggtccggtgagcaatacgtgtgacatatcattaacggagacgaatgcgacagcagaagtaagccgaggggcgtcttcgactggtggtcagcacagggtggacaggtgattacatccggaaggggaagtgaatcccaaagcgggcgttgttggagaacccccggttgtcggtgcccaccaagtaggcggtgcgatttggctgcttagggctgtcacataactgaacgcgccaagtattgaacctggaaatcggtaacagaaattcgtgtcgaaaggctgggacaggtcttactgaggtagctccctcagaaattcgtcgacaccaagttcttgcccccaattgttggacgggcgca

SEQ ID NO: 558803 - DNA, 1756 bp, Homo sapiens
attgacttctagagatttaattctttactaggtatgatctcttgtgtggttttcaacttcctgctggaaactagcaggtggggcaaccgacgacaccaccccaccactacgcagtgatgtccttgcgcgatgtggaccagccctctcatcactgcgacacgcagagagctgaagatagtgagccaccaaggcacaaaccaacatgaacgccgcacgcacacacaagacagcatacccctcacactagggcagatacacactcggacgacgaacgcaagcagacccaagacgacaagaagagagacacgacaaggcctaccgagccccagcacacacaactgaccagatgcggcccacaaacacaatatggagcacaccagaccagaacaatcgcggatagaccaccccactgaaggcacaagatgccccagacaagacagaataagagaaaatgggaaacataaagaacacacataaaccacggcacagctcgcacacacaaccgaccacacaacacgaagcaaaacaggagacaaagcgagcatgaagaagacaacaccgaactgccgctcggcacaaccccaacggcgacgaccggcgagcagaccataacaatacaaatcagatccacaacaacataatgacaaaatagcaatgcagcaaaagaccagcagaatcacagtccactagcaacgcacagctaacccccagcataccgaagcagaccatatcaacaccggcagacgaacatcgtcccgatagtgcatctcaccaataacactcgcaatcccggtgccgtaaagcgaacaatatcgagatcataaccattctcacatcgacacacgacaacgctggatcgcacacgagcccaacggcgttaacctagaaccatgagcaggaatgggcgtacaaaacacatatacgtaagcgacaatcacgatctgctacggcgacaacacagacgcaggagcacaccggaactgacaccatgacaccaacacaacactcagagcgcgcacacgaaggcctcacatgcatcaagcatgacagacaccttccaactcacggcgacggtacaagtcacaagcacaacacaagtggacaaaccgacaacacaaacgagaaccagtgacccactgtggaccacacagcgcaacacacgcaagcagcaacatgaccacacccatggaaccaccacacacccacgacgagcctctcaataagacgaagtacaacatacatcagcacaccacccacgagaaatagcaggacagaggccccacagaccagcgtggacgacgaagtagataaataagtgaccagaaaaatgataataacaacaggactacagacgaccgtaaagtaaacgatacggaacacaacattatacagaaacagtataacgaacatatacgaacacaaccaacgataccacaacaacgaagcagattaccacagcgtaacaggatagatgtagacatccgcaactccactaactgaacacgaactggcacaaggcagtgacatacggacgagcaaacagaacacacaacgagaacagatgaactcccaacagcaccacgcaatggacgatctcagcgctcacgcacgaagagggaactgctacaactcacgcatcacgtgagcgctcacaacgtaactgactatgacacaagaacagaaggatcaacagcagtaaacgcacagcgaactacgcagaccgcgcacacacgggcaccacaagagacacagagta

SEQ ID NO: 558804 - DNA, 117 bp, Homo sapiens
ggtccagtatcaggtgagagatgaggatggctaatgcataaaggggtagtgagatagagaaagtgaacagatcctcggggatggattggggcttggaagtaacactcagaagtcaac

SEQ ID NO: 558805 - DNA, 110 bp, Homo sapiens
tcgagctcggctcccgactttatcgatcgcggagaagggtactcaagggaaaattgtggatttggtcatgagcttgacagagacacagtatttgctctggtgaattacat

SEQ ID NO: 558806 - DNA, 321 bp, Homo sapiens
tgaagtgtggtaggctggttcatatgtggaggtgggtgtgtgaagctagacaccaaggtccttaaggttctgaagagacttgaactgtggaaatgctcttagcatgcattccctaacccctgcttctgtgctgttttgaggagtaggatcttggagttcacaccaactatgactatcatttcctttactatctttaaaaacgcttttcttctttggaagagaatacgcgtttatttcaagtcttcctgacagtaacttggtagttcaaggttagctaatgtgcttttatggacatatattaagtggcccctcttatatgat

SEQ ID NO: 558807 - DNA, 673 bp, Homo sapiens
gtcggacttctacatccgactccagacaggagaggggcacgtacctggcgctactgagcttcctgcaaggactgcctccgtgatagtccccagagagcttgttcctgatagctaatgcaccctgctagacctagcagatccagccctcccctggaccctaggtcacggcaatcaatccccctgctgtggttcccgaaccccaatggccccgatgggtccctgctgggggctcgcggcgatctgccagtggcgctttattcggcgtctaccttgctctacttgcctgaatcccccggtaccggggccgcgttctacgtggggttcactgtcaacactgctctgtcgtggtccatcagcacaatggggtgccgcaaaaaattgcggtgcctggcggaccagcgggcgagggccctggtgagagggggaggccttctgtgcctgggaggaaggcgtcccacgagtgatggcggaccccgctgggggcacatgccttgttgataaggacctggcaggactgtgacagaggctggggcgatctgtgtgtggggactgttggcctgtcgcacggggaggcgcggtgacggggaggcggtgcccggggcatctccgctggcggaactcacgggcaaggaggctatctggggcgtgggtgcatgctccaggctgggttcca

SEQ ID NO: 558808 - DNA, 263 bp, Homo sapiens
  misc_feature (233)..(233): n is a, c, g, or t
tgcgggtctcttgctgagacatggggaagtgcaggaacgactctggcctctcagtcccacagaagggagtggtctcacactttacaagcggtgagggacacatcagagccctgggcactgtcactgcttgcaggcctgagtgtaactccctccttttctatctgagctcttcctcctccacatcacggcagtgaccacagctccagtgatcacagctccaaggagaaccaggncagtattgatgcccacgatggggatggtgg

SEQ ID NO: 558809 - DNA, 916 bp, Homo sapiens
  misc_feature (23)..(23): n is a, c, g, or t
  misc_feature (178)..(178): n is a, c, g, or t
  misc_feature (188)..(188): n is a, c, g, or t
  misc_feature (199)..(199): n is a, c, g, or t
  misc_feature (204)..(204): n is a, c, g, or t
  misc_feature (223)..(223): n is a, c, g, or t
  misc_feature (236)..(236): n is a, c, g, or t
  misc_feature (246)..(246): n is a, c, g, or t
  misc_feature (321)..(321): n is a, c, g, or t
  misc_feature (329)..(329): n is a, c, g, or t
  misc_feature (436)..(436): n is a, c, g, or t
  misc_feature (439)..(439): n is a, c, g, or t
  misc_feature (467)..(467): n is a, c, g, or t
  misc_feature (490)..(490): n is a, c, g, or t
tacgtcctcagcatatggttgtnagggagaaaattcttgatttggttatcagctgctttaaacgtcatggagcaaaggggatggacaccgcctatgtcatttgagctgaaggaaatctcctcgactgagtaagtacttgcgtagagtgcacgtctgggtctcatgtactgatctgaangatcaaggtngagagctgttntcccnccgctatgaccttactgtnccctttgctcgtnatctggccangaataaggtgaagaagatgaaacgttatcatgttggaaaggtgtggcggcgagagagcccaaccatagtccaagnccgccccngggagttctgcgcagtgtgattttgacattgctcgcgtcagtttgaccctatgatccccgatgcagagtgtttgtaagatcatgtgtgaaatgcgctaagtgggttngcnagttgggggacttgtctcattaaggttnatgccatggctttataacttttnttataagtctggatttggcctaatactgtttatgcaagtcccaaacttgggtgactccaacccttaagcctgcaactgtaggactttcctagtaaagctgttgtatttcctatatgtctgtactcttcctgtgaaatttccatcctttttgtgtgtcaggaaagtaggtactgccattgttttgagtggaagggcattgacaagcacttgggtcactgacattgagttctcaggtaaatgaccggcggattgtggatgggatgtttgctgtctgtggtgttcctgaaagcaagttccgtgccatctgctcctccatagataaactagacaagatggcttggaaagatgtgagacatgagatggtggtgaagaaaggctggctcctgaggtggctgatcgaattggggatatgtcagtgtcatggtg

SEQ ID NO: 558810 - DNA, 804 bp, Homo sapiens
cgcggtggctcacgcctgtaatcccgcactttgggaggcagaggcgggcggatcacgaggtcaggagatcgagaccatcgtggctaacacagtgaaaccccgtctctactaaaaatacaaaaaattagccgggcgtggtggcgggcgcctgtagtcccagatactcgggaggctgaggcaggagaatggcatgaacccgggaggcggagcttgcagtgagccgagattgtgccactgcactccagcctgggtgacagagtgagactgtctcaaaaaaaaaaaaaaaaaaattcagaaaaccctaaactagcaattttttttaaaattataaaacaccttgttggagataaaggcttatgccagggattttcaagggagggagggtgtacctttagacattttttccattaaaatttatccatccggagagattttaaaaaaccctatgcccttaattagacttaaattccaccacgccacttgtgacctaaaaggagaattcctggtaaattagattccctgattaaacagatttctagaaagaggcctatatatttagggcgggacacattaaagtcctcccctttaaaatttgggaaagactatgatccctaattatgaagtcttctagttaattgtggagaaattagccgtcaacctgtgcggaagtccctttcattaccgaaatggggaacggctcaagagttcccagaaaggctctttaaagggtaaccctatgtttaatacgacgaatttcttaaccaggaccgtgccaaaatgtgccgttttgagcgcatggtccta

SEQ ID NO: 558811 - DNA, 355 bp, Homo sapiens
ttatccgtacagctgtactgccaagccaaaggtctgtggatagcaactggatcgtgtgtagcacgtaggagaagaagctccgccctgccctgacactggccttggggcctcctgaaatcacttccccatccctggtcagtccaccttgccccgtccacttccccatctcctcggtataactcatgtacactaagttatggaagaaccgggacattttacagaaaaaaaaccaaaaagcaacaaaaaatatacgtggggaaaaacaaaggatacaccatgcttaatctagggattataagcactccctgtcaataagttgcatatattgccaaatggaggggcaccgacctaggga

SEQ ID NO: 558812 - DNA, 2939 bp, Homo sapiens
gaatgctggggcgtttcgaagcagaagcactagagtttatagaaacggaggaagatgtcaccagcctaagagaagctaaagaagtcttgaaaggagaaaagccaggtaaagaggataggtacaggagtatattgaagacgaagttctggcaaatgtggaaaacctggcctggagacctcaaagtggtccatattatggctcagagatacaagatgctgatcccgttcagcaaccccagggtgcttcccgggccctgcccacacacggtggtgctgcatggtcctgcgggccttgggaaaaccacgctggccaagaaattaatgctggactgggcagaggacaacctcagccagaaatttagataggctttctacctcacctgcaaggagctcatctgcctgggcccgtgcagttttgcagagctggtcttcaggaactggcctgaattgcaggatgacattccaaacatcctagcccaagcacagaaaatcctgttcgtggtcgacggctttgatgagctgggagccccacctggggcactgatctaggacatctgtggggaatgggagaagcagaagccggtgccggtcttcttggggaggttactgaagaggaagattttacccagggccgccgtgctggtcaccacgtggcctgcgggccctgagagacctccggctgttggtggagcggccgatctatgtaagggtggaggagttcctggagaaggacaggagggcatatttcctgagacactttggagacgaggaccaagccatgtgtgcctttgagctgatgagaagaaacgcggccctgttccagcctgtctcggcacccatggtgtgctggatcatgtgcatgagtctgaagctgcagaggttagaaggggaaggacccgccccacccgcacggggctgttcctgcgcttcctttgcggccggttcccgcagggcgcacagctctggggcgtgctgcgggcgctgagcctcctggcggcacagggcctgtgggcgcagatgtcagtgttccgtggagaggacttggcgaggctcggggtgcaggagttcaacatccgcccgtccctggacagagacatcctccgccaggacatagtctctaaaggctgctattcctacatccacctcagcttccagcagtttttcactgtgctgttccacgccctggagaaggaggaggaggaggaggaggaggacaaggacggccacgcctgggacaatggagacgtgcagaagctgttttctagagaagaaagactcaagaaccccgacctgatccaagcaagacacttcttattcggcttcgccaacgagaagaaagccaaggagttggagaccactttgggctgcctgatgtcaccaatatccctgcacttaaatgcagtagacattatgctgttttcaatctgcctcaagcattgtcgaaacttgcagaaaatgccactgcaggcagcaaaggcaaagctcccagagaatgtcactgtgtctgaatcagatgctgaagttgagagatcccaggatgatcaacacatgcttcctttctggaccgacctttgttccatatttggctcaaataaggatctgatcattctagaaatcaataatagctttcttggtgccacattagtaaggatcctgtgtgaacaaatagcttctgacacctgtcgtctccagagagtgatgttcaaaaacatttcaccagctgatgcttatcggaacctctgcctagctctttgaggtcacaagactgtaagatatctgacccttcaaggcaatgaccagaatgatatgcttcctgcattgtgtaaggtcttgagacactcaaaatgtaacctgcaatatctcgggttggtgtctttttccaccaccacttagcaatgggctgatctctccttggcccttgaagtcaaccagtccctgacatgtgtaaacctctctcacaatgagctcttggatgagggtgccaagttgctgtacacaactttgagacacccaaaatgcttcctgccgaggttgttgttggaaaactgtcactttatagaaggcaattgcaagaactttgctgctgttttggttgtcagcggggagctgacacacctgtgcttggccaagaaccccccactcggggatacatgggtgatgtttctgtgtaagggtttgagttacccccattgtaaactacagaccctggtgctgtgggactgcgacataactagcaatggctgctgttatctcgcagagcttctccaagaaaaatcaagcctaatgtgcttggatctgggactgaatcacataggagttactggagtgaagctcctatgtgaggctttgaagaaaccactgtgtaacttgagatgtctgtggttgtgggggtgttccatccctctgttcagttgtgaggacctctgctctgtgctcagctgcaaccacagcctcgtcgttctggacctgagccagaatcccttggggtctagtggagtaaagatgctgtttgaaaccttgacacatccaaattgcaccctccagacactcaggttgaaaatagatgactttaatgttgaactcgataagctgctggaagaaatagaagaaaacaacccacaactgcctgctgataactgagaaacatgatcctttgggggggaaaaaaggctttcttttcattacttcattatctgaatccccccagagtcattcattctcaatgaagtcatggattttccaggtgttggtgaacagcctgtgactcttcccctcccctatccccacttctcagggataatgagttgattgctgggctaggtgttttagccatggttctgcctctgttttacatagaatgtgcgcatgtccttaaccttgttatgtatgaaatatacgtatcacgggtatattgagagaaataaaggtgagagcattcac

SEQ ID NO: 558813 - DNA, 622 bp, Homo sapiens
  misc_feature (141)..(141): n is a, c, g, or t
ccagaaatgcattccagctcaaggaggacttaatttatggacccgtgtgtgccacggctgagctgggcaaggatctttctcaggacaaactctgccatgcagctaaagagcctggtataactagaaggcagttgtcattgntagataaactagtcttccaacccctgtaggacatcgatgaaccacaggcagcaggtttcagaaggctcaaattaaaaagggggccaaggagaagtaagcctctaaagccttaacagggcttacagttctgacagaacgctgggggttttttcccaaagggttttcctttggggtcttcatcacttagttattgtagactatcgggcacaggggccaaaaattttttggggaaaaacccttttccccccccccagggtgggaaagggccccccctttcccaaagggttggaaaggggcccccctttttcccaaaagggttttttaaagccattttcccaataacgttgttagaactgcaacgtaagtaacgtattcttaacttttccaaacaaaaaggggggccccttttggggattttggggaacaaaaggggaacttttacaaattgggagaatgggtgtaaaagccttagtgcagtgcg

SEQ ID NO: 558814 - DNA, 941 bp, Homo sapiens
tacagggtcagatctcacggaggtgtagtttagatttcagctcttgcttatggctatcttcagggctccaaccccttagtgcttaggggctcaaaggttgggggtaattaagcccttctgagcagtggggagtctgctggttgtttatggagctgccctctgctgttctgagcccaaggtaggagtttcagatagtaagtatgctgtcctgcatggttgagttgctttggatgtctgctaggcttccagtaccctgtcccctcctcatgctggagagtcacaatggcctgtgcttattcacagcaataatatatagggagcgtctgtgagtcccctttgtcctgctccatcactcttcatggatctcccaggagactgctgagtgggtcagttacgtggaaatctatttatgaagctctgggctgtgcaaagtcttgtcgtaggaggcaggtgagcagcccagccctgaagtatgaggaaggccatgggagtgccttccaccctgaagccacccttacctggaggagctgtaggccccagctttgtagcagggcctatgaagtggttaggactgtcttccaactggacagctcttgagaaaggtacatgaccagtttgtaagcccgttgctgctatgtctcgttagtctgtctctcccttttcattactgtgcacataaatataccggtgttgtgttctgggaaaaaaaaaaaaaaaaaaaagggggggggttaaattactcgagggccaagtttggtgtcccgtttttgaaagggccctaagggggtaaaagaggcagggggttaagttggtggaacgggctgggttggagaccctctgtgggcattggaaccccagataaggccggaaaatagttgtggacgcttgggatgttgttattatcgtacaaaaaaggagtaaaaagagcagattgagacatc

SEQ ID NO: 558815 - DNA, 339 bp, Homo sapiens
  misc_feature (139)..(139): n is a, c, g, or t
gaatgtgactgcctggctgatcttccaaggtccccttgcatctatgtgtggccttatgaatcaatccttgccaatggaaagtgaatggaagtgatgtgtgtcggtcccaggactgaccatagacctcctgcatgtgctnctttatgctatttcttcagttcagggtgggaatgggaatgcccagagcaactttggaagctatatgctgaggatgctagaactgccatcagcctgggaccctgaacaactgtatgaaaccaggtacctgtgggtgggaaaaaaactggctggaactattagatgaaagaaaaataaacatgtttttggtcattgcaaaaa

SEQ ID NO: 558816 - DNA, 106 bp, Homo sapiens
ttttcaaatcctcaacttgagacaggtttattagttaacttagtgatgtgtcacagtatcctttcgaggccgatccccactccaaccgtccctcagcaacccaggg

SEQ ID NO: 558817 - DNA, 349 bp, Homo sapiens
tgtgcagccgtggcgtaacgtccaagtggaaggtggtggcggggattatggtgctgacagggttggctacgtccagctggggtatgggacgtatgctgtattcgttgggggaatacggattgtcggagatgcagttaatgccttagaggtatatcaccgaagctgcgctgcgcattacaaatgcgtcctttctacctgtcaaattcgaggaatggcaagaacgcattggtgtgttggaaatgttaaaggacgccagcaccatcgccgcagaagtgtggagccagatatgaatgaaacacccgaggtctttagacccggggcttataatgtgagcccacttgcgacgcgc

SEQ ID NO: 558818 - DNA, 162 bp, Homo sapiens
cattactgtatttactcttaaggcaagatctaattcaggtctttttttttagacagtctcactctagcacccagcctggaatgagatcaggcggaggttgcagtgagctgagatcacaccactgcactccagcgtggttgacagagtgagactccatctcag

SEQ ID NO: 558819 - DNA, 404 bp, Homo sapiens
  misc_feature (5)..(5): n is a, c, g, or t
  misc_feature (15)..(15): n is a, c, g, or t
  misc_feature (238)..(238): n is a, c, g, or t
aaaanaaaaaaaaanaaaagaaacactactctggactgagcagcatcggcaagtcaagtctgctgctggaattttaaaagaaaaggaaaaagaaagaaaaagaaacactactctggactgagcagcatcggcaagtcaagtctgctgctggaattttaaaagaaaaggaaaaagaaagaaaaagaaacactactctggactgagcagcatcggcaagtcaagtctgctgctggaattntaaaagaaaaggaaaaagaaagaaaaagaaacactactctggactgagcagcatcggcaagtcaagtctgctgctggaattttaaaagaaaaggaaaaagaaagaaaaagaaacactactctggactgagcagcatcggcaagtcaagtctgctgctggaatttta

SEQ ID NO: 558820 - DNA, 488 bp, Homo sapiens
tcttcaatcagccactatcagccctcgtagtaacagcaatactcataccaaaacccctgtaagctatcacgcggcgcagatcattctcactacatcgcccacggcacttacatcctacattactcattctgcctcagcaaactccaacactacgcaacgcactccacagtcgccatccatcactcctactctccaaggacttcaaaactctcactccccactacatcagcttttgagatgcacttctcagcaagcctcgctcacacctagccttcacccccactcattcaacctcactgggcagcacactctctgtgctagtaaccacgttctcctgatctaatcacactctcctacttacaggactcaacatcctagtcacagccctatactccctctacatatttcccacaacacaatggggctcactcacccaccaaatttaacaacataaaagcctcatacacaagagaaaacaccctcatgtg

SEQ ID NO: 558821 - DNA, 398 bp, Homo sapiens
  misc_feature (106)..(106): n is a, c, g, or t
cgcggcccgcatacggtgcgagaagacacagaaggggggagccggcaggggcggcttccattcctccagcaacccatcccaccgtctgggcttgtgaaaaacctgnccgggcgcatggcgcacactgtagtcccagcattggggaggccaggcagtcgtatcacttgaggccaggagttcagaccagccaacatagtgagaccccatcttgacaaaaaaatagaaaaattagccgggtgtggtggtgcgtgcctgtagtcagctactggggaggctgaggtgggaggattgcttgagcctaggaggccgtggctatagtgagccaagattgcgccacagcactcccacctgggtgacagggtgatcctctctctaaaaaataaaaacgtaaaaatgtt

SEQ ID NO: 558822 - DNA, 227 bp, Homo sapiens
gagccgccagcatggatggacatctacaaggctgccggtagagcagctgaacagaaggaggcagaaaaatgaggttcaagggcaggccttcgacatcttcgtgctgggcgctgagggatggctgcatcagcacccaaggagctgggcaaggtgataaggatgctgggccagaccccaccccttaggagcttcaggagatgatcgatgaggtggacgaggacggcacg

SEQ ID NO: 558823 - DNA, 311 bp, Homo sapiens
aaggatccctctgtggctccattcaggtgggcctcggtgaagcaggttggggtgctcctctgggagccacgcgaagctcgttgtaggggtgtggggccagatcttctccatgtcatcccagttggtgatgatgccgtgctcgatagggtacttcagggtcaggatacctctcttggtctgagcctcgtcgcccacgtaggagaagagttccgcgaaggacgaggaacctgcgggcggtcatggggctcagaggctccaggttgctctgtttgcaatgtccagggcgtacttccacaagcgggatgccgcgc

SEQ ID NO: 558824 - DNA, 133 bp, Homo sapiens
tcaagcttctaacgatgtacggggacatgagtttctagtcccacctacttgggaggctgaggtgggaggattgctttagcccaggaggtcgaggcttctgtgagctgtgattgtgccactgtctcaacgaaaa

SEQ ID NO: 558825 - DNA, 233 bp, Homo sapiens
gtcaggtagactaacgttgatctcttatacgtagactgtgcattctttcacacgcttgcattggcggcgaatgtatgtctttgtcggtgattgtccatccagctgacgatgcctctgtttaaaaacaaattgcttttgtgtccctgaagtatttaataagaagcattttgcactctagaaagtatgtttgtgtttggttttttaagaagtctaaatgaagttagtctacctgg

SEQ ID NO: 558826 - DNA, 265 bp, Homo sapiens
ttaactgaaattttttttccccttggacccttgccaggtgaaaaaaaaccacatgggagtaataatgggtccaaattttgccaaataaaggcctgttttggggtgggagttgtcatgaggctgtgttgaagtgacttatctatgtgggatattgagtatcccttgaaatggatttgttcccccctttccattaatgggcctttaaatgccccagatatcatttcaggtgacttaacatgaatgaataaaagtcaatgcttttgga

SEQ ID NO: 558827 - DNA, 399 bp, Homo sapiens
aataccctgtttctacaaaaaaaaattttttaattagccacacattgtggtgtgagcctgtagtcccagctacttagggggctgtgatgggaggatcacttaggccaaggaggtcgaagctgcagtgagctgtgatcaagccactgcactccaagcctgggggacagaacgagatcctatttcaaacaaaacaaaacacaacttattaggaatctaggcctagtaatctgaacttttagtctcctaacaagtgttgaaattgtaaactaaaacactatcaaccatttgggacaccaactcttttagactgactacattaggaagactacagagtcttacaaacaaagagccacgctgttttaccttttttttttttgagacaaagtctcaaaaaaaaaa

SEQ ID NO: 558828 - DNA, 82 bp, Homo sapiens
aaacccggccttttttttgggaaccccctgccccaaaatttttccccaaatttttggccccccttaaaaagtttttttggga

SEQ ID NO: 558829 - DNA, 239 bp, Homo sapiens
ccatgtggacaagcatcatcccatcagacacaaacaccgtccttcccgtggatcagacccgttgtcgtgtacgcgggggacaggaagcatgcgggagcttgtggaggtcgagccacgtgccatcccagacatcaagaggccccaatgggtttttaccatctgtacactcgccagtctgaagagggacagaccatagaaacctcccagcgccccttggcataacaaaggcgatgccccag

SEQ ID NO: 558830 - DNA, 211 bp, Homo sapiens
tgtcttaaaaaaaaaaaaaattagtcggtccggcaggattatggccaaaaataaacactggagtggtatcatactctaaagggtatgggtgacagcgggcaaattagagtattggtaagtgggccttataaataggagtaacagggacctcctgccccatttttggagttcctggtacattggagacaacaaatttggggaatgggctttc

SEQ ID NO: 558831 - DNA, 302 bp, Homo sapiens
gtctggagcaagggtgaaggaaaaaaaaaaaaggacaaatgtctgtctgtatttagccagttcttgttttttctttccacgcagctacaaggccaccagctatgcaaagccacaagttatgccaagtcatcagttatgctatagattatgtgacctgtcattatatgattaactgcctgttttgcttctgtaagcctgcttataaaaatcctgctcagtctttgttcaatgctcagctttttggatgtgaatccactgagctaatgcctaccttaaaataaacatcgtcctgtttttccaaa

SEQ ID NO: 558832 - DNA, 152 bp, Homo sapiens
  misc_feature (58)..(59): n is a, c, g, or t
gccaaggtgcaacttccttcggtcgtcccgaatccgggataatccgacaccagccganncaccaatgcgacgagttcgacccgaacgagataaagttgttatacctgaggtgcaccgagttaagtcggtgccattctgcatgtacccagtat

SEQ ID NO: 558833 - DNA, 327 bp, Homo sapiens
tcagtcggtccggtgtatccctttgtctcagagaacacaagttagtcggacgaggtagtgcacgcctgtaatcccacccacccgggtggctgaggcaggagaaccgcctgaacccaagaagcggaagttgcagtaagatgagattgtgccactgcactccagcctgggggacaaagtaaaactctgtctccaaaaaaaaaaaaaattacacacacacacacagacacacacacacacacacactttccgttatttgctaagtactcaatgaggtgggggagatgataatcaagaaatttccagaaggaaggagacaatctttgcaac

SEQ ID NO: 558834 - DNA, 154 bp, Homo sapiens
ccggtccgcatctgctccatcaggtctgcatgccagtgtgctcctctagttaaagtcagtcacctccccagtaagggccacactccaggaggagtgttagagagtcatttgagtgtagtcttgccacctgttttccctgatgggagaagatgcg

SEQ ID NO: 558835 - DNA, 318 bp, Homo sapiens
  misc_feature (6)..(6): n is a, c, g, or t
  misc_feature (122)..(122): n is a, c, g, or t
agcccncccgagtagccggggcttaaaaagcgcacacgccactcccaggctttttttttttggcagaaacggggtgtcagcatgttagccaggctggtctccaacgcgtgatctcaggtganccgcccgcctcggcctcccgaagttctgggattacaggcgtgagccactgcacccggcccttctatttttttaaatagcgacggggtttcaccatgttggccaggctgctcctgaacacctgagttcaggtgatccgcccgcctcggcctcccgaagttctgggattacaggagtgagccaccgcgcccgactgag

SEQ ID NO: 558836 - DNA, 378 bp, Homo sapiens
ggtcaacatggtgaaaccccgtctctgctaaaaatacaaaaaaattagctgggcatggtggcaggtgcctgtaacagctattttttaggttgaggcaggaggatcgcttgaacctgggaggtagaggttgcagtgagccgagattgcaccattgcactccagcctgggcaacaagagtgaaactctgtctcaaaaaatatatatatatatattgtataaaattactttcaagctatgtatatgaaacattaatggtatatgaaacataaaggtataagaaacattaatgaattttgtgtttagacttgggtcccatccagaatatctcattatgtgtatgcaaatattccaaaatctaaaaaaaaaatcccaaatcca

SEQ ID NO: 558837 - DNA, 117 bp, Homo sapiens
gtggtagatgtatcatctgcaggtgcggtctcgatctcactcattgcatacgtgcttcacggctgcgcacaggtgaactctgactctccagctgttcttgagctaggcatctctcgc

SEQ ID NO: 558838 - DNA, 1124 bp, Homo sapiens
ttgctagaccattgcgttcggcgcgcggggccggttaggtgagatgaagcatggctcataggtctgtgtcctgaggtagcatctctggatcatgagctacgtgcttcggattctcacgcgaataataaagactgcgccggtgggacaatgcagacgcgttcgtgagacaacatcacagaatggtagttcgtgagggttcaattaacatgggatcgtaatcacagcagtgagttccataagacggagtgtcgtaatattgaatgaattaagtgcagccgaccacggaaattctttaaaaggagaaagagaataaggaaataaagaagagagggatgagatgagaaaagggaaatgaaggatttggaaaagatagattggaaaggaaagaaggaaaaagtggaaattctaacagaaaaggagcgaggtcgcagagtaataaaaagataaagcgaagtagagatcaaaacgtatatgcagaacgatagctcaatggattacaaggaacaagaacgagggatatataccccaatatgagagggggacatataaggaagagcataaaaggagcgtaaacacaggaatggggatagttataaacggggattaggaacggatgatggagatgagcaaggagcgccaccaagaatggaacacttaattataaagatagagacaaccaggacaaacattattaacgataatgcggcatggatgacgacacgacgaaaagaaacatagacaaaggaaaaggttccaagcggaaaacgacagtggaaacaggaaacgagcaagagcagagcgaacagactgaagacagccgtccatgaacagaataatgtcaaatcagatgggaaacaaaagacagggaaaacatggcgccacaacatgagacaacaggtggagtacaggacaaagaggaaaccaacaacaaagagaaaaacaaaacgagaaaaaacaagattaggaacagggatagaaaatgcaacagcaatggaaactggacacacgaactcgaacagaaaagtcgcacgagaaagaggcacaggaaaggaaataagaaaggaacaagtaaaggacaaacgaacaagcaagaagaagaacgaaaagaaaaagaacaaggaaga

SEQ ID NO: 558839 - DNA, 103 bp, Homo sapiens
  misc_feature (103)..(103): n is a, c, g, or t
gggttacacgcgggttcaacatgcggtatcggaaaaggttgttatttcctgtttcggggcccattctataccttggacacggccatgatggttccgtctcccn

SEQ ID NO: 558840 - DNA, 772 bp, Homo sapiens
  misc_feature (644)..(644): n is a, c, g, or t
ggcattgccaaagcatggcatcaggcatattttggggaagggtctggcccagttatgttggatgaagtacgctgcactgggaatgagctttcaattgagccgtgtccaaagagctcctggggagagcataactgtggccataaagaaaatgctggagtgtcctgtacccctctaacagatggggtcatcagacttgcaggtgggaaaggcagccatgagggtcgctttggaggtatattacagaggccagtggggaactgtctgtgatgatggctggactgaactgaatacatacgtggtttgttgacagttgggatttaaatatggtaaacaagcatctgcctaccattttgaagaaagcacacggcccatatggatggatgacgtcagctgctcaggaaaggaaaccatatttcttcagtgttacaggctacagtggtgaaggcatgactcgcaccaccgacaatatgttagcattgcctgctaccctggcggcaagggacacaagctctctctgggtgaggactggctgcagctctcaagtttccataattcaatgtccattgcccctctaacactgaccttgaatatgaaggggttctaatctttgagtatattcgggggctatcccccataactcgctnatttttcaggagctcttatagcaataaaaataatcttttgaacctgtgcgccaacattttgaaaattcaccccctaactgtttttcttacataagaaaataagctacccactacaaggttgaccatat

SEQ ID NO: 558841 - DNA, 214 bp, Homo sapiens
cgcagcgcaggcggccgcggcggaggcgtgtggcgccggagagcagcagccagcagtgcgggctcgtggcgcgccgcacacgccgagaccccgggccagcccggagctggcccgccacccccggcactggcgggggacaatgggccaggtcccgcccggttcgggccagagccagaagacacatcgagtgcgtggtgtgctgtgggacacagtc

SEQ ID NO: 558842 - DNA, 462 bp, Homo sapiens
  misc_feature (2)..(2): n is a, c, g, or t
  misc_feature (7)..(7): n is a, c, g, or t
  misc_feature (303)..(303): n is a, c, g, or t
  misc_feature (336)..(336): n is a, c, g, or t
gnagacnaggctgagcacggagaatgtcccagaatcaacttcggccctttgatggctggtggccccactggttctggtggccccctggcctgcttagaagctacagcgtacatggccacgatctgcgcacaggcctggctattaagcccttccaacttggtcctcttccaaggtggtggcaattcaaaaaataattactggaatggcaagtgggcctgtgctcccgaaagttaaccctgagagaaagcacagaaaccatgattaaagaggggatggagtctgggtgctaaagcaatcccaaanccaaaaactgtaaaagcaaccccttcagatgtncagactaccctctcatgtccagagaggaagagggctttctccaaggtccccaagggagtctgtaaccagccaggggctagaagccctatttctgcccccagcttcacctcatggaatccagcctac

SEQ ID NO: 558843 - DNA, 245 bp, Homo sapiens
gatgtggtgactgggacgacagtgatactgactgactcctgaccctgtgttggtctaggctactgtatgtgttagactcttagtttgtcacacaaagttcaacaatgtctattcaaaatacgcttatagactaaggatataacgaaaatatttatgtagagctgtacactgcattcgtgtttacagctaccgtgttacttaccacacgacgtaacgacgttaacacaaacatacacaacaactac

SEQ ID NO: 558844 - DNA, 571 bp, Homo sapiens
  misc_feature (48)..(51): n is a, c, g, or t
  misc_feature (59)..(60): n is a, c, g, or t
  misc_feature (64)..(66): n is a, c, g, or t
  misc_feature (101)..(101): n is a, c, g, or t
  misc_feature (118)..(118): n is a, c, g, or t
  misc_feature (121)..(121): n is a, c, g, or t
  misc_feature (177)..(177): n is a, c, g, or t
  misc_feature (179)..(179): n is a, c, g, or t
  misc_feature (181)..(181): n is a, c, g, or t
  misc_feature (206)..(206): n is a, c, g, or t
  misc_feature (235)..(235): n is a, c, g, or t
  misc_feature (242)..(242): n is a, c, g, or t
  misc_feature (249)..(249): n is a, c, g, or t
  misc_feature (255)..(255): n is a, c, g, or t
  misc_feature (295)..(295): n is a, c, g, or t
  misc_feature (299)..(299): n is a, c, g, or t
  misc_feature (307)..(307): n is a, c, g, or t
  misc_feature (337)..(337): n is a, c, g, or t
  misc_feature (347)..(347): n is a, c, g, or t
  misc_feature (349)..(349): n is a, c, g, or t
  misc_feature (352)..(352): n is a, c, g, or t
  misc_feature (361)..(361): n is a, c, g, or t
  misc_feature (436)..(436): n is a, c, g, or t
  misc_feature (568)..(568): n is a, c, g, or t
tgacagtcactggagctaccagaagcatcatggggccctggggagaannnnagctcctnntgtnnngccccgaggcggtacttcagagcctccattgcctntggggctggaggtgaanttnggggccctggtgctgctgctggtgctcaccctcctctgcagcctggtgcccatctntntnctgcgccggccaggagctaaccatnaaggctcagcttcccgccagaaagccctnagcctantaagctntttcgnggggggcgtctttttggccacttttctcctggacctgctncctnactacctngctgccatagatgaggccctggcagccttncacgtgacgntncanttcccactncaagagttcatcctggccatgggcttcttcctggtcctggtgatggagcagatcacactggcttacaaggagcantcagggccgtcacctctggaggaaacaagggctctgctgggaacagtgaatggtgggccgcagcattggcatgatgggccaggggtcccacaggcgagtggagccccagcaaccccctcaggccttggcgtncct

SEQ ID NO: 558845 - DNA, 427 bp, Homo sapiens
  misc_feature (21)..(21): n is a, c, g, or t
  misc_feature (30)..(30): n is a, c, g, or t
  misc_feature (48)..(48): n is a, c, g, or t
  misc_feature (61)..(61): n is a, c, g, or t
  misc_feature (90)..(90): n is a, c, g, or t
  misc_feature (143)..(143): n is a, c, g, or t
  misc_feature (147)..(147): n is a, c, g, or t
ctgtaaatgtttccctaaccntcctttacnttgttccctattataacnattttccccctcnagagcacccagaattgccagaattccacngaacaaaattaataagaaataaagatttccttatactggatatgaccttttancccnggattcctcctaaaaacccaacttatactctgcctcctatatccttaatatgtaaaattaagaaatatccaggctgggcatgcctggctcatgccctataattccagcattttcgaaggccgaggtgggaggatcatttgagctccgaagttcaagaccagactgggcaacatagggagactgtctctacaaataaaggaaagacagagagagagatcgagagagagagaaatcaagagagagacagatctaacaattagcaataaagagaatacctatt

SEQ ID NO: 558846 - DNA, 330 bp, Homo sapiens
attcgcgggcgcgtcgacctttgggaggctgaagcaggtggatcacttgaggttaggagttcaagaccaaactggccaacgcggtgaaaccccatctctactaaagtgctgggactacaggcgtgcaccaccgtgcctggctccaatttttcatagttcttgcttttgttaactgttttatcaactgattagaacttctagaacaatgttagataacaaaggaaatggcaggcttgtggacattcttactttgtttctgacttaataggactgtgtctaggagcttacagttaaatatcagtcgacgcggccgcgaatttagtagtagta

SEQ ID NO: 558847 - DNA, 654 bp, Homo sapiens
ctttgtgttatgtgaagaaaatgtgtatccccaatgggggtgtacgcttttaaatcaaaatcctgatcacagatgtccaattaggcttaatcagaaagcctctccagagaagtttggtttctttgctgcaagaggaatgaggctctgtacccttatctaagaacttggaagccgtcagccaagtcgccacatttctctgcaaaatgtcatagcttatataaatgcacagtattcaattgtaaggcaggccttcggttgtaagtagccagatccctctccagtgacattggaacatgctactttttaattggccctgcacagtttgcttatttataaattcattaaaaaccctacaggtgttgaatggttaaaatgtaggcccccagttcattttcagttattttttgagtgggcagacagctatttcgccctgtattaaatgtaacttatttaatgaaatcagaaccagtagacagatgttggtgcaatacaaatattgtgaggcattttttttaataaaatgctaaatgtcaatttatcccggggcatgtttgactttagactgtaaaaaaagatcagtttgtttctttttgggctggtaccaatgagcgtcgcccaaacatggtttcaggtaaataaattttttttatgata

SEQ ID NO: 558848 - DNA, 127 bp, Homo sapiens
  misc_feature (22)..(22): n is a, c, g, or t
gggcagccgtctgcaagccaanaagaggggcctcagaggaaaccaatgctcctggcaccttgatcttggacttcgagactccagaactctgaaaaaatacattgctgttgtttaagcgccccagttc

SEQ ID NO: 558849 - DNA, 207 bp, Homo sapiens
ctctacttctgtgttctaatactataatctttctttcttgttctttctagtaatcacctcgttcagcctccatagactatatgcttctgtagttgttgcttattagtagtatttctctatagttccttcagctagattatatgaaaatatcaatctcctagtagttttagatctaagtttcttatctccactatcatccagtattgt

SEQ ID NO: 558850 - DNA, 1184 bp, Homo sapiens
  misc_feature (382)..(382): n is a, c, g, or t
  misc_feature (832)..(832): n is a, c, g, or t
ttggcgcgtgcgcgaggccgtacataccttgcctgctgtgtaatgttaattgttcgtcggcttcttattaagtcgcctcttgtttcgccggtattttactccgcctcatttgtcttttggctccgcatcttgtcacaacgctggttgcccgctatcccagtttcgacaccccccgcggggattttttttccccagtatgcgccgccctgttccgcttgtgccgttgctcgcaccgcccccgcaatcttaagtggtacaccaaaggcccccatttcccacatgaggacttacataagggttaagttttggagagtttagtggatccacgggataaccatgtggcccggaagccgaagtgcccccttctcccccccctggaagnggccgacaagaacacccaggagtgcacaggtgtgactcccgtgcgtggactgtttcctgggtaccaccaggtcccttttgtctctcatgggcctagcataggtatgagccagggatcctttcctggtccctaaggtccttaccccctggagccgcccgcgtttgatgcccccccccccctgtactctggagagactttgctgggacactggtacccctgagcctgagatgggcgattaggcccgagagaaggggaggccccctcttgcccctccgttgttcctaactcacgaactgttgcacctctataaacctatgggaggttgttaagaaatgaggacccctctataggttttaaccccgcagatcctcgaacacccacccacttctatatatagggtgcccacacacttgtggttatattgtatggcacacctcttcctttcttctncctctggttgtaagaagacacgttcccccacgccccgcagatagatagtttataactaccacgctgtgttgtccgtcttggccacccggcagttccccactccccctatgtctctattcccgggcgagaaggagcttatactttgggaacccttttttactagatattcctggccccctgggcttgtgacaccctcctatgccaccactcacgctatcacgtatcacgtgaggtgagcccccgcctcctgcctatcccccacgagtgcccctcccccaccctggaccctgcttactgtgtgtacatatatattctacatatatgtatatttacactgccctgccctgtccca

SEQ ID NO: 558851 - DNA, 92 bp, Homo sapiens
ggaagacagaagtacgggaaggcgaagaaaagaatagagaagatagggaaaagaagataaaaacatacagaagaaaaaagataaaaaacctc

SEQ ID NO: 558852 - DNA, 1180 bp, Homo sapiens
gtgtcgtgaaaactacccctaaaagccaaaatgggaactggacaagaactccatatccacaccattgtcagtcgatcggcaccacgtcagcattccggagcaagtcccaccgactcactggcccatctgcatctcatcaacatgcggtggcatcgaccacaacagcacacccattgcaacaaatcttgcagcaaggcaggctgctgcagcatgggcacacagggctccattcaacgtcatgcctagggtccttggatcaacactgacaagctagagcgtgcaacgatggtaatcacccatttgcatcatctccttgctggcacaattctgcagacccagccaacgtactcatgtgactatcatatgctgccaccaggacacagaagactttatcacaaaacatgcattacaggagacatctcacggctgcactgtgctgtcctgactagtagcatgctggtgttggtgacatctgaacgctgcgtctctccaacgcatggtgcagacccgacgagcatgcccttctggcttcacacactgggtgtgaaacaactcaatgtcggacgtcaacacacaatggcattccacctgagccaccctacagccagcaacagcatatgcaggcaaatagctccagggcacagtccgcaccccacctcacgaacacattggcctcacaacccggcacacagcacgccccgcgccaaataccaggatagggaacgcgtgcacaacaactgcctgcgacagccaacgtgctaaacatgccctgcgcccacgcggcctggcaagtcacccgacaggatgccacatgcccagcgaccccacgcagcatcaaggcactggccggcaaccaacaccaacacgtccaaatgaaccacgcccacagtagcctgaccaccacacccgaacgtcaaaaaacaacagcgccacgtggagcaccgccccagcacgaccgacagaccagaatcagcgaccaacaacagcacagcacagcaacccacgccaaccaccgctcacacgcaaaccaaacagtgacacaccgaccaccacaacaaccccaccaaacgaacacaacggacacccacaaacagcatgcaacaaacaaccacacgatcgagacaaacccacccactcaccaaacacaacaaaacacacaagcccaaccgaaaccacaaac

SEQ ID NO: 558853 - DNA, 373 bp, Homo sapiens
  misc_feature (64)..(64): n is a, c, g, or t
  misc_feature (347)..(347): n is a, c, g, or t
tttgaagacctggtagcccaaggaaaaaatttacaatttaagccccaaatttgtagaaaatagnaaaaattgaaaaacattaggcaagatgagaatcctaacaataggtgtactataattttggaaacataagttttatctctccagtttcctatttttgctaaagacaaatcatggtagaattgtcttgctttattccacttggcctaattgtttgtatacagtgcagcaagagtaattattttttacataggcttttaaattggctttgctgggactttgtttcatagaaggaatcttgggtaacacttttttaaagctgagccaagccatggatgtgtgccatnaaactacctgtgagttgggtgattct

SEQ ID NO: 558854 - DNA, 136 bp, Homo sapiens
  misc_feature (65)..(65): n is a, c, g, or t
  misc_feature (73)..(73): n is a, c, g, or t
catgggtctgtaggaagaatcacgtttctacagactgcagcactgcggccagcaggtgggcaggncacacccnacagcagccgtggtgacggagaagccagtagatactggagaaggcagcaccttcaggatgtcc

SEQ ID NO: 558855 - DNA, 240 bp, Homo sapiens
attcgtccggtcaacatctagattcatgacactggtctttgtactggggtaagccactatcatcaaggccaccttgtcacccaaatgtggtctagacagtgcagacttctcctcctgtatggttgttgatggctttcactgtgtaatgacaatgcttcttctctgtggagttgggtgcttaattccatcgctcacttttccatgatcctgatggggtggcttgtcaattagaggtgtgga

SEQ ID NO: 558856 - DNA, 172 bp, Homo sapiens
cttagaggactcggtgtcatccccttcgtgttcataccccttcgtgtgtcatccccttcgtgtgtcatcccccttcgtgtcgggctctggagggtgggaaagccttcctgagcctgcggacagcgcatgcacctcagcctgccgcgtcaggaacaccaggatgccacctgtg

SEQ ID NO: 558857 - DNA, 310 bp, Homo sapiens
cacacaggcctgagcctggccagcctcggcttgccagaaggtgcctttgctagtgcccggagccgttggcccgggcggcttgccctattcctctcctcctcctcctcctgggtccccccagggtggcttgggcttgggctatgtgggtggtggtggcggggggtctttgggggcctctcagctacccgcccatgcctccctgatgggtgggccagggcggcctctctctgaggagaacctcaccccaactcctcgctccagttttgacccactggtaagtgccctgcactctgtattctattaataaact

SEQ ID NO: 558858 - DNA, 220 bp, Homo sapiens
cccaaagaagggtgcgagaagaaaagggccgttcttgccatcaaccgaagggttaaccccgaggattacaccattcaaccattcacaggcgcattccattggagttgggctttcaaggaaggcgtgccaccttgggccacttcaaaggagattccgggaaattttccattaagggagattgggaacctccagatgttccgcattgacaccaggctcaaca

SEQ ID NO: 558859 - DNA, 950 bp, Homo sapiens
atggcacatgcagcgcaggtaggtctacaagacgctacttcccctatcgatagagtgagcttatcagctttcatgatcacgccctcataatcattgccttatcgtgctccctagtcctgttctgtccctttggcctaagcactcacagacaagaatgtaatcatagtacgtagcatcgtcagatgctcaggaaatagaaccccatctggaaaatatcctgcccgaacatcattcctagtgcgctcatccgccctcccaatccactaagaaatcactttacagtgacagacgaggtcagacgagttccctcccttacctttcattattcaatttggccaccaatggtatatgaacctacgaggaccaccgaaatacggcgggataagtcttcaacttcctacatagttttcccccctttattcctagaaacctaggggaacgctgcagacttccaattgagtgtagcacaatcgaagtacgtactcccggtggaacgcccccattcgtataataatttacatccgcaagggagtctgtgcactcaatgagctgtccccacgttaggctgacacaacggatcgtatggcacgggacgtctatacccaaaacagttgaactgtacacggacgggggtatacatgaaggccagtgcgctgaaatcttggggttgcgaccacagtgcatgcccatcgtcctagaattaagttccctagaaatcttgaagtagggccggtatttaacctatagtgccctctaccctttaggatcaaagcgaagcacgtcacaaaaaattgcgtgggtcggccgaaaattcaaacattcgtgcgccggcccggagaacgactccggccagaacggcgatgtcggtccaacaggcgggcgcggtaacaggtcgggcggtaacagtaccacccggcgtctagccgggcgtggcgaaccgagctacaacc

SEQ ID NO: 558860 - DNA, 133 bp, Homo sapiens
ttttcaaaaattccccccccttttaaggggccctttaaaaccccacttttgggttccgggccaaaattttttttccccccgccccttttaaaaatttttttgaaaaaccccggggataaaattttgggttcca

SEQ ID NO: 558861 - DNA, 116 bp, Homo sapiens
  misc_feature (66)..(66): n is a, c, g, or t
  misc_feature (73)..(74): n is a, c, g, or t
taagcgtggagaggccccgttcgctcagcgtatcgacccgactcgggagaagctgacacccgcacnaactccnnagatctgcaagcgagaatctaacacagctcaagagcaacatg

SEQ ID NO: 558862 - DNA, 111 bp, Homo sapiens
gtgagaatccatctctacacaaaatttaaaaattacgcccagtatgtcccatgctactcaggaggctgagcgaagaggatcacatgatgcccacggatggtcgacggctgc

SEQ ID NO: 558863 - DNA, 690 bp, Homo sapiens
ttctagtaatgtggcaatcaagatttcctttcttaagacggccagtggcgcacggcattggtccggcttcgggcccttataggccaccctggcttccccagtgttggcccgggttgcaatctgctgtggactttggccctaggatagttctcctcacaatacatctagatccatatttgtctatgccatagttcatcttatccatcttagttaaaactaagggtacccagttgcgaggggttccttagactgggtctatcaatggggttctcgaaatgggcatggtctctcacttcaaacatttatccccaccccgtgtacatcatatcaaggtgtccagggtatccaaggtccttgtcatggcgctttctaagggcaagtgtaacagcgtgcgagtggaattgaggagatctcagagtggctccttcatttcaagtgtataaggctccgtgaaggtgggcttcgtgatcacccattttgatttataacgataataccgagcgtttagataaaattgatagttcgctgggtcttgaatgttgggagcgggccctggtttccatgggactgtcatgaatcagtgtgatcctgttttgggcccagcacgggtgtggggactgccccctgaaatcacacctttttgttacaatgagattgaggtttccctttgggttatgcgtttaagaccag

SEQ ID NO: 558864 - DNA, 494 bp, Homo sapiens
  misc_feature (294)..(294): n is a, c, g, or t
gtgggtgagtaggggttgggagtctgaactgaatctaaacaaataaatggatggagaattatgggagccaagtttttcactgttggtgtggaagtgtgcagatgaacaaggacataaggctataatccatctattcacacagaatgctccacctggtaatggattacagctgaagacattagtataaacaaatgtttagcttaatctggatatagaatgtttcataaaaatatttatagatatctatattttcatggtttttatatatattatatataaatatatatataattntcttgctctgtcaactaagaggatgtagaagaacaatgacattccagtagcaatgagcatatctagtaccagatcttgattttcaatatcctccagtgaaaggaagcagggttccctgaagaaatagctgattctaggacaaaggcaggaaatatacatgagtctgggtcttgtagttccagaaagtaaggaagtaaaaa

SEQ ID NO: 558865 - DNA, 253 bp, Homo sapiens
ccgaattacacctcatctgcataaccacggcacactatataagcacgactaaaacatgagttccctaataccccacatcctataccagcacatacgataaacactaacaaaaaaactcatacccccattatgtaaaatccattgtacgcatccaccttatataatcagtctcttccccacaacaatattcatgtgcctagaaccaagaagttattatctcgcaaactgacactagagaccacaacccaaaaca

SEQ ID NO: 558866 - DNA, 479 bp, Homo sapiens
acatggtggttatcacgtgaaggttaatgccgtgtggcctcaatgtcggggtaaagacttcgttataatcttacttcaatcgacaaggtccacattctttgggcgaagaggtagacagctgtgctcctataatagagcgcacatacttggcaaagatgctgtaatggtattcttggatgtgccaagtacctagtcctagggctcctatagggctgacatgttagtcgcacatatgtacgcatgtgcccgtgtacaaagtacaatgctgtagcgtagcaccagagtgggttcttccgtggtgttcagtgcaataggtgtcacacggggagtgcggtgtggcctcacatatgtcctcagagctcttcgggtgcgcaagcaacgcgtgtcaccgtaaaggggttgagtattgagagatactgcaagtagcgacacatttaatgcatatgacggggtatatgattgtgtcgttgagcggaagt

SEQ ID NO: 558867 - DNA, 510 bp, Homo sapiens
cagtagaggatccctgcagctctctctgatgtatctccatcgacgcactcatcgtcatcaactgggacgacatggagaaaatctggcaccacaccttctacaatgagctgcgtgtggctcccgagtagcaccccgtgctgctgaccgaggcccccctgaaccccaaggccaaccgcgagaagatgacccagatcatgtttgagaccttcaacaccccagccatgtacgttgctatccaggctgtgttatccctgtacgcctctggccgtaccactggcatcgtgatggactccggtgacgggtcacccaaattgtgcccatctacgaggggtatgccctcccccatgccatcctgcgtctggaccctggttggccgggaccttgaattgaccacctcatgaagatccttcaccgagcgcggttaaagcttcaccaccacggccgagcgggaaatcgtgcgtgcgattaaggagaagctgtgcaacgttggcccttggactttcgagcaag

SEQ ID NO: 558868 - DNA, 111 bp, Homo sapiens
atggtgttctgctaatgaatggagcagacatctaatatattctatgccttaagagcagtgtaactaaatattgggatacttaacaattggttttattatgtatttgataaa

SEQ ID NO: 558869 - DNA, 533 bp, Homo sapiens
  misc_feature (114)..(114): n is a, c, g, or t
  misc_feature (154)..(155): n is a, c, g, or t
cagtgatccgcccgccttgcctcccaaagtgctgggattacaggcatgagccaccacgcccggcctggagtagatgctttctaaaggaacttccacctttaaaatctgtgatgnttgtgttctattataaagtggcaccattggagtctaaggnngcttgattgcccttacactaaatggtcccaagtgtttatgtggttctgacactgccgtccagtgtgagttgtccccgataccattgtcaatatgcctgagaaaaaaagtaatttcctgccttattctacacacagcattttatacctagtctgagcgagaatctgagagtgatctttcctatagtatagagtagggtacatggatcttttcacaataagctgctgctcggaggcatttgtcacttctgagtttgcaactgtgtcagaggcccccagaaggctgcttccagtgaagtgaggtattaacactgaatagatttggatatactcctggtcacagtccgttcatcctgagccagaatcaaaaaaaaaaagctt

SEQ ID NO: 558870 - DNA, 627 bp, Homo sapiens
  misc_feature (114)..(114): n is a, c, g, or t
  misc_feature (154)..(155): n is a, c, g, or t
cagtgatccgcccgccttgcctcccaaagtgctgggattacaggcatgagccaccacgcccggcctggagtagatgctttctaaaggaacttccacctttaaaatctgtgatgnttgtgttctattataaagtggcaccattggagtctaaggnngcttgattgcccttacactaaatggtcccaagtgtttatgtggttctgacactgccgtccagtgtgagttgtccccgataccattgtcaatatgcctgagaaaaaaagtaatttcctgccttattctacacacagcattttatacctagtctgagcgagaatctgagagtgatctttcctatagtatagagtagggtacatggatcttttcacaataagctgctgctcggaggcatttgtcacttctgagtttgcaactgtgtcagaggcccccagaaggctgcttccagtgaagtgaggtattaacactgaatagatttggatatactcctggtcacagtccgttcacttaagagagaagtatttgtgggggaaaaaagttgcctataaagcatatttcccagttctactctcttacttaagttttcaattactaaactgccgtctaggagcgtaatcggtaccgagctca

SEQ ID NO: 558871 - DNA, 299 bp, Homo sapiens
gtgacgataaccagagatcatatcggattgctccacacgtataccaaaatgcccatggcattggacatggaccgcgaagaccgggtatattcagctcggatgccggtgtccaggtaacccgaagccttcatctccatcgcgacaaagcacagtgaacgaatagttgaccaccacgagtttgaccggcaattgcagctgcgccagtgtaaatgcaatcccacatcaagatggtgacaccaccgtacccgagacatcgcgatcacctgtcgtccagggaacgccgcctgagcgccgatcag

SEQ ID NO: 558872 - DNA, 1004 bp, Homo sapiens
  misc_feature (44)..(44): n is a, c, g, or t
  misc_feature (714)..(714): n is a, c, g, or t
catacaggaaaaagaccaccttttttaaacccccggcccccttncgggaagttttttaggcgagagggattttcttggccaattaattttttctttttccgggggaaggtgtttttttttttttttaatttttccccgaaaacccaatggggttttttgtgcgctttttcccttttttttagaaaaaggttttttccgggcctctcccttttcttaaacggttttacacaccattttagggggttttttttaatttgacattgtgttttggggaacccccccaccttggtttttttttggcaaagaggtttttttgtgtttgtttccttttggcaaaatttccttttcaaaagactgggaaaaggggttccttgggttttgggtttttcttaaaaaacccttccagttagtttttctgagtattcctctttgtatttgaagaaaagtttgatttaaatgaaccaccagaaggggaccgtttttttttatcaaatgtgattataaatggataatccccagttattcattgtgaggtgttgagactatgaaagaccattgtctttgattcagctcttaaatagtgtaactatttccccccctcggcttgctttctttccctcccctccaatgataaagaaaatgataaattttttgttgggccttccatttttattttaaataagactaaggataggccttggccccgcccttgcnacgtttttaccagtgtttcaatttaaaggggtagtgtttaaaaacattttcaagggataaggccttttgtcctttgctttttttaaaaatcagtggtaggaccagtgaagttaattttttgggggcccttttttaaaacccccctttttgaaatcataaataagttttttcaggttttaacccttttttgtacccaaacagacaaaaatgcttttttttcataaattaaaaaaagcttttttgtttatggggcatgcttttttaatccttttaaaaccctccccctttta

SEQ ID NO: 558873 - DNA, 150 bp, Homo sapiens
ctaaaggaaacgctatgtgaggactacatcaagaaggtggccatctgcaagccgggaagtgaggcctcaccagacgccagccctgctgactcctgatcttggactttcagcctccaggacagaaataaatttctattgtttaagccaaaa

SEQ ID NO: 558874 - DNA, 416 bp, Homo sapiens
aattattatcgtttgtttttttgagggggagtcttgctttgtcacccatgctggagtgcagtgacatgatctctgcccgctgcaacctccacctcccaggttcaagtgattctcctgcctcagcctccggcacagctggaattataggcatcaggcatctgccaacacgcccggttaatttttgtatttttagttgagatggggtttcgccatgttggccaggctggtctcaaattgctgacctcaggtgatccgcccactttggcctccccaagtgctgggattataggcgtgagccaccgtacccagccagttattgcttatattaactaagatacaggttgcatcctatggcttaagaagtatttattcttatcttcttatttgaccctcacaccaagtctgtgaggaataat

SEQ ID NO: 558875 - DNA, 154 bp, Homo sapiens
  misc_feature (127)..(127): n is a, c, g, or t
gattttcagcaagtttcaatcagccacatgctgccgtggggcagggggtgcatctcaacacaccatctttcacgccggtttctcatagcactgggttcaatcgtgtgcacgcggtggggggcatccntctcagcagtcgcacctgccaggccat

SEQ ID NO: 558876 - DNA, 144 bp, Homo sapiens
atctaacacatacctgatcactacttcggcactatgtttctcatgtactagtgcatattgtccacagtatcaaagaagaatgatagcattgaaggactcggggtatgggtaccgatgcctcgaacttctgtaatctatggctca

SEQ ID NO: 558877 - DNA, 245 bp, Homo sapiens
ccgcattccctcggcacccatctgcgctcccttgcaagcttgaactaatcacatggtggctaccctttccctggagctggtcggcttcgtgatgtgcaccatgtgcatcggtctgacctcctgcccccattcttttgcccgcttccccttggcagcgcatagccagcagagatggctcgggccatgccaggtctcccagcgagcgcttctgttgggtcaggttgttctcgcccaaacgctactgg

SEQ ID NO: 558878 - DNA, 194 bp, Homo sapiens
  misc_feature (39)..(39): n is a, c, g, or t
  misc_feature (61)..(62): n is a, c, g, or t
  misc_feature (190)..(190): n is a, c, g, or t
ggaaagggtgcctcatcccagcaacctatccttgtgggngatgatcactgtgctgcttgcnnctcatggcagagcattcatgccacgatttaggtgaatcgctgcatatgtgactgtcatgagatcctactagatgatcctgactagaatgataattaaaagtatttacttcgaagcaccatttgaatgntcat

SEQ ID NO: 558879 - DNA, 173 bp, Homo sapiens
ctgatatcgagcggatcaacctacacctaagccttagccgcctgattttaggccgaattttttccatcagttacggtcagattcgtgaatttttatgttgacgaagtaagttggtaccgttacgaaattttggcccccaaccggttgtctcaccacccgggaactttactttt

SEQ ID NO: 558880 - DNA, 402 bp, Homo sapiens
attgcggagccatcgcagctaataatgcaaggccacacaatggtggatcgaatagttgtggaaccaaagagagctgtctccagtagaagattctcaaagaccaggtgcccacttaactgttaaaaagatattcgtcgtggcattaaagaacacactgaacaacatcacctaagagattattttgaacagtatggatcaattgaagtgattgaaatcatgactgaccgatgcagtggcaagaaaaggggctttgcctttgtaacctttgacgaccataactccgtggataagattgtcattcagaaataccatactgtgaatggccacaactgtgaatttagaacagccctgtcgaagcgagagatggctactgcttcatccagccgaagaggtcgaagtggt

SEQ ID NO: 558881 - DNA, 334 bp, Homo sapiens
  misc_feature (8)..(8): n is a, c, g, or t
  misc_feature (51)..(51): n is a, c, g, or t
  misc_feature (72)..(72): n is a, c, g, or t
  misc_feature (259)..(259): n is a, c, g, or t
  misc_feature (305)..(305): n is a, c, g, or t
gctggagncccaacccgggtaaccatagcaagaccctgtcctataaaaaantgtttttttgcccgggtgcgngtgtcacgcctctaatctgagcactttgggaggccgaggcgggcgggtcacaaggtcagtagttcgagaccagcctggccaacatggtgaaaccccgtctctactaaaaatacaaaaaataataataataattagccgggcatggtggtgcacgcctgtagtcccagctactcgggaggctgaggcnggagaattgcttgaacccaggaggcggaggttacagtgagccaagntcaagccactgcactccagcctgggcgac

SEQ ID NO: 558882 - DNA, 352 bp, Homo sapiens
attctagagtgatccctgtggattggcgaccagtttcatacatgaggggacccactgtacagtacttgtccggtataaatacacgtatacaatacaccgtaaaggagctttctcaaagatggatgagaatttcgtgctaacaggtcacatctgttcttcagactaagggcaaacctggaaattagctatgccagaggacttcagtaaactgtcaagcgtgctgcacaaagcattacagaacacgagaaaaagttgtgttagcagtgcctgggcctgggcctcagagggaatgaaatccacagcggacctgcatcaaaaacttggcaaagcaattgaaatggtcgccaatccg

SEQ ID NO: 558883 - DNA, 164 bp, Homo sapiens
  misc_feature (75)..(75): n is a, c, g, or t
  misc_feature (105)..(105): n is a, c, g, or t
gtaataaacatttatttcaagtgttatttgttaaacatttaattgttgagatttgaaaacgaacattaccattcntttacacaggttagtaggcccatccaaaanccttatcttttgagttcctgctttcttcacagcagtgcactcactactttctggtatac

SEQ ID NO: 558884 - DNA, 192 bp, Homo sapiens
cctctgtcatactccgacacctgaaccagctgaggtggagactcgcaagggtggtgctagatgcagtgcaacattgagtcggtggatggagggagtcaaatcaccaccatgacacttcatgctgaagtaaggaggacaaactagaaccggaaccatgagctgtgacctgactgccaacatgagaactatccc

SEQ ID NO: 558885 - DNA, 291 bp, Homo sapiens
cctcgtggatgtccctgccttatgacgggccgcgcggtgacatcaccacatcagaccgcgaccgccatacgtatggactgctggcgcgcttggcactggaggccggctttgactggttgtcttacgagacaaaggcccacgtgtattgctccgtctcgtccgagcactcggccgcagccaagacgggcggctgcttccctgccggaccccaggtacgcctggagagtgcggcgcgtgtggtcttatccgccgtgaggtcggaagaccgtgtgctgaccatgggccatcggg

SEQ ID NO: 558886 - DNA, 531 bp, Homo sapiens
cgatctagaggatccctgggagtgcaggtcaggagggagcatgttccagacaaagagaatggcatgtgcagaggtgcagaggcataaaactgcaggctgtttccagaatgttatacatttctcagtctggttgcaaggaggggtggagactggtgggaaagaggccaactgggtccagtcatgaattcagggccatggctacaggacctgagccgttcctggcatgtcatggggaactgccttaagggtcttaaggggcctctgacagactgtttttagcacattctctccagcagctggaggcaggaatgccagtaaggagtagggtcagggtctggacagtggtgacgttcgatggcttggaaggacagtggtgacgttcgatggcttggaaggacagtggtgacgttgtaaagcggctttgatggcacgatggtgccagaactacaactgtagtgggctgagaagggatgggtcagtgaggagacagagactcctggaagggtcagcttcacaaacgaaatctggctt

SEQ ID NO: 558887 - DNA, 401 bp, Homo sapiens
aagaggatccgtgatgtatcccaacacacacgggttgcttagcagctattgagaatcttttgtggcatggaagaggtacagaggacgtctacaaaaattgtgagcagatagtgctttttggtttgtttgttgagaacaagagttcttgctctgtcccccaggctggagtacagtggcgctgtctcagctcactgcaaacaccacctcccggttcaagcaattctcctgcatcaacatcctgagtacttgggattacaggttcccactaccacgcccagctaatttttgtattttttgtagagatagggtttcaccatgtttggtcagggctggtctctaactcctgaccctcagggtgatctgcccaccctcggcccccacagtgttgggcgataacatca

SEQ ID NO: 558888 - DNA, 374 bp, Homo sapiens
cggacgaaaggtgacgctcgatggctcggaggacagtggtgacgctcgatggctcggaaggacactggtgacgctcgatggctcgggaggacactggtgacgctcgatggctcggaaggacagtggtgacgctcgatgacttggaaggacagtggtgacgttcgatggcttggaaggacagtggtgacgttcgatggcttggaaggacagtggtgacgttgtaaagcggctttgatggcacgatggtgccagaactacaactgtagtgggctgagaagggatgggtcagtgaggagacagagactgcaaaggagaccaaatggaatgatgcacaattaaaatacctgtaaacatttagattagctttccttgca

SEQ ID NO: 558889 - DNA, 847 bp, Homo sapiens
gattccatatttcggctgttgtgaatagtgctacaataaacatgggagtgcagataccaattgcattgccttcggaatacatacccagcaagtgggatggctggatcatatggtagttctatttttaactttttgaggaatctctatatcgtgttccatagtggctgtactaatttataatcccatcaacagggtgtaagtgtgcccttttgctccacagttcttgagcaagcacttgtttgtcttgttatgcttgttatgagtgactagccattccaactggaactaaggtgataactcattgtggttgggatttctatgttctctgatgaagtagcaatgtagaagcattcttttgcatcaaacctgttggccatgtgtatgtcttctttctgagaaatgcctattgaaggtctcttggcccattgttagaaatcaggtgatcttgtgttactcgggtcgctcaagctcccgccattttacaaatcttatttccacaaaatctctgcccagacctgatgttccagcatttcctgctacattattcttctagtaggttcagtagtctagggtaggacatctaagtcctcgtaatccatgtggcagctagatcttgcgcatatggtgcagaggtaggaatctagtctcatctcctggtatgtggctgttcaagtccactccaggccacatttatcgaacgagactttttcccaaatgtgtgttccttgtcaccctttatggagaactcagtgggctatcagtggcacacatttgcgagggggcctacatttcgcgcccatcggtttatgtcgtcatctctatgccataccatgctattggtctacaa

SEQ ID NO: 558890 - DNA, 1295 bp, Homo sapiens
  misc_feature (13)..(14): n is a, c, g, or t
tggtccggaattnntgagactcgtggccctgcctggcggtccgcgctgagagtcgccgattagtcggcatcgggcctcgggcgcccccggggcgggttgggttgcagcccagcgggcggctggaccgccgcggtggggcggggacaatggggtacaaggacaacgacggcgaggaggaggagcgggagggcggcgccgcgggcccgcgggggtctagactgccccccatcacaggcggcgcctccgagctggccaaacggaaggtgaagaagaaaaaaaggaagaagaagaccaaggggtctggcaagggggacgataaacatcagagtcagagcctgaagagccagccgctttcttcctcctttcatgacatcttaagtccttgcaaagagcgtggcccgaaaccagagcacagacagagcaaagtggaaaagaagcacctcccttctgactcctccaccgtcagcctccccgactttgccgaaatagagaaccttgcgaatcggatcaacgaaagtctgcgttgggatggaattcttgctgacccggaggcagagaaggaaaggattcgcatctataaactgaatcggagaaaacggtaccggtgcttggccctcaagggcttccaccccgaccccgaggccctcaagggcttccacactgaccccaatgccgaggaggcccctgagaacttaccctacctctcggacaaagatggcagctccagccacaggcagcccacgtcgaaagccgagtgccccaatctctgttttgaaggaaaccttaccccaaagcttctacactctgacttagctcctactctgctggagtgaaaatctacccacgacgctcacaaacttataattcctcctcaccacaagtttatgtgttaaaaaccatcatcataaaaggaaatgagacccgtatctgaaggaaacagatgttcggtacacggacgacgccgactctcccatcaccaagctgccctcggttgcccaggagagccacagtgccttgagaacataagcaatttagtgaacagagttcttttcagaatttcctttttcttaagtaagcatctctgttacttaatttctcaccacagctagatgtctataatctgccccaaaaagaaaagaaagcgtgtagatgatttacctcttaagtctcaatctcatggtgaaactcctcacacggtacctgcttctgttggccggaggacgatgccctgaacctcttggagcctttttctgttttaattaaatgcatggcctgcctttatatggcctcaaata

SEQ ID NO: 558891 - DNA, 386 bp, Homo sapiens
cggaggacacatagtaaagaagcacaaagacacgggacatcaaaacattaaacccagatggaactgccatatagataacaaatgggtctcccacaccacagaattcatatacaaaagccctatcggtatgtagctattcctgaacaaatacattaatacacttttagtttatatacatttgtaaaaattcaaggttttaataacatttctttgcaagacatttggtctaaggtggttactcaatattaggaaacaaacactgtaccaaaatggatatgacttgtgaataaaccctaaataaagtggcttttggaagaactggattttgcagcaaccaactttataaagaggtccatccgctctcaatggaaaacacccaagcatac

SEQ ID NO: 558892 - DNA, 1386 bp, Homo sapiens
  misc_feature (13)..(14): n is a, c, g, or t
tggtccggaattnntgagactcgtggccctgcctggcggtccgcgctgagagtcgccgattagtcggcatcgggcctcgggcgcccccggggcgggttgggttgcagcccagcgggcggctggaccgccgcggtggggcggggacaatggggtacaaggacaacgacggcgaggaggaggagcgggagggcggcgccgcgggcccgcgggggtctagactgccccccatcacaggcggcgcctccgagctggccaaacggaaggtgaagaagaaaaaaaggaagaagaagaccaaggggtctggcaagggggacgataaacatcagagtcagagcctgaagagccagccgctttcttcctcctttcatgacatcttaagtccttgcaaagagcgtggcccgaaaccagagcacagacagagcaaagtggaaaagaagcacctcccttctgactcctccaccgtcagcctccccgactttgccgaaatagagaaccttgcgaatcggatcaacgaaagtctgcgttgggatggaattcttgctgacccggaggcagagaaggaaaggattcgcatctataaactgaatcggagaaaacggtaccggtgcttggccctcaagggcttccaccccgaccccgaggccctcaagggcttccacactgaccccaatgccgaggaggcccctgagaacttaccctacctctcggacaaagatggcagctccagccacaggcagcccacgtcgaaagccgagtgccccaatctctgttttgaaggaaaccttaccccaaagcttctacactctgacttagctcctactctgctggagtgaaaatctacccacgacgctcacaaacttataattcctcctcaccacaagtttatgtgttaaaaaccatcatcataaaaggaaatgagacccgtatctgaaggaaacagatgttcggtacacggacgacgccgactctcccatcaccaagctgccctcggttgcccaggagagccacagtgccttgagaacataagcaatttagtgaacagagttcttttcagaatttcctttttcttaagtaagcatctctgttacttaatttctcaccacagctagatgtctataatctgccccaaaaagaaaagaaagcgtgtagatgatttacctcttaagtctcaatctcatggtgaaactcctcacacggtacctgcttctgttggccggaggacgatgccctgaacctcttggagcctttttctgttttaattaaatgcatggcctgcctttatatggcctcaaataagtgggttccagaactccatccctgggaagttaccatgggaagtcccaagaggaatactgcttctttcataaacatggtcctctcctaaaa

SEQ ID NO: 558893 - DNA, 523 bp, Homo sapiens
attcaaaacccagcgtgccagttagtattccaaaaaggagtttctaatgaaagtgtacctgatcaaagaaagacaataaaaaaaagaagaaaaaaagagggggggggccggacggatccaaggaatccaggcatgaggagcgtaccgaacatcgcgataagcatagtgtccaatcgcagagggagtgcgtcatagtagacggacacgccaccatacatagtagagagaagacaaagttagttgtgattagagaatgattgtaatgtgatggagaaggcaggatcataaatattttagtatgggagtgagggaagatgattatatttggtagaaaaaaacaactaactactgaaacagaatcatatttaaaagggggtgatagtagagaagaatcaataataaaaaaatacaagtgagtagaaaaaaatagtagaaaacaagaagatcataaagttaatatgacggtgagagagaagaaaaaaaaataaacacaaaataattttaatatataaaaaaatatatt

SEQ ID NO: 558894 - DNA, 221 bp, Homo sapiens
atgcagtatgagtactaagggaaccaactgtcttggttctgacgggcagagctgggaattctcccagatgatttgattctcatttcttttattatttagggaaaactgacttttcgcccttttttgcccaggctgagagcgcatgggcaaaattccggctcaccacaacctccacctcccaggttacaagcaattcctccgtgcctcagcggggttaccga

SEQ ID NO: 558895 - DNA, 1573 bp, Homo sapiens
  misc_feature (13)..(14): n is a, c, g, or t
  misc_feature (721)..(721): n is a, c, g, or t
tggtccggaattnntgagactcgtggccctgcctggcggtccgcgctgagagtcgccgattagtcggcatcgggcctcgggcgcccccggggcgggttgggttgcagcccagcgggcggctggaccgccgcggtggggcggggacaatggggtacaaggacaacgacggcgaggaggaggagcgggagggcggcgccgcgggcccgcgggggtctagactgccccccatcacaggcggcgcctccgagctggccaaacggaaggtgaagaagaaaaaaaggaagaagaagaccaaggggtctggcaagggggacgataaacatcagagtcagagcctgaagagccagccgctttcttcctcctttcatgacatcttaagtccttgcaaagagcgtggcccgaaaccagagcacagacagagcaaagtggaaaagaagcacctcccttctgactcctccaccgtcagcctccccgactttgccgaaatagagaaccttgcgaatcggatcaacgaaagtctgcgttgggatggaattcttgctgacccggaggcagagaaggaaaggattcgcatctataaactgaatcggagaggtaccggtgcttggccctcaaggcttccaccccgaccccgaggccctcaaggcttccaccccgaccccgacgccctcaaggcttccaccccgaccccgaggccctcaaggcttccaccccgaccccnaggccctcaaggcttccaccccgaccccaaggccctcaagggtttccacactgaccccgaggccctcaagggtttccaccccgaccccaaggccctcaagggcttccaccccgaccccgaggccctcaagggcttccaccccgaccccgaaaacggtaccggtgcttggccctcaagggcttccaccccgaccccgaggccctcaagggcttccacactgaccccaatgccgaggaggcccctgagaacttaccctacctctcggacaaagatggcagctccagccacaggcagcccacgtcgaaagccgagtgccccaatctctgttttgaaggaaaccttaccccaaagcttctacactctgacttagctcctactctgctggagtgaaaatctacccacgacgctcacaaacttataattcctcctcaccacaagtttatgtgttaaaaaccatcatcataaaaggaaatgagacccgtatctgaaggaaacagatgttcggtacacggacgacgccgactctcccatcaccaagctgccctcggttgcccaggagagccacagtgccttgagaacataagcaatttagtgaacagagttcttttcagaatttcctttttcttaagtaagcatctctgttacttaatttctcaccacagctagatgtctataatctgccccaaaaagaaaagaaagcgtgtagatgatttacctcttaagtctcaatctcatggtgaaactcctcacacggtacctgcttctgttggccggaggacgatgccctgaacctcttggagcctttttctgttttaattaaatgcatggcctgcctttatatggcctcaaata

SEQ ID NO: 558896 - DNA, 238 bp, Homo sapiens
  misc_feature (230)..(230): n is a, c, g, or t
ggtagtgtactgtgaaaagggtctggtacatgaaacattatatacttgaggacagcattcagaactgttaagacaaaagacaaactatgattttaagactcgagtcttgatttaagggaaaggctataattattggctgaaaagtattcagcgtgaactcagattctatattagcatgaaagagtacaaaagatgttggagtccagtaagccctattaccttaatttaanctgtaaag

SEQ ID NO: 558897 - DNA, 1319 bp, Homo sapiens
  misc_feature (13)..(14): n is a, c, g, or t
tggtccggaattnntgagactcgtggccctgcctggcggtccgcgctgagagtcgccgattagtcggcatcgggcctcgggcgcccccggggcgggttgggttgcagcccagcgggcggctggaccgccgcggtggggcggggacaatggggtacaaggacaacgacggcgaggaggaggagcgggagggcggcgccgcgggcccgcgggggtctagactgccccccatcacaggcggcgcctccgagctggccaaacggaaggtgaagaagaaaaaaaggaagaagaagaccaaggggtctggcaagggggacgataaacatcagagtcagagcctgaagagccagccgctttcttcctcctttcatgacatcttaagtccttgcaaagagcgtggcccgaaaccagagcacagacagagcaaagtggaaaagaagcacctcccttctgactcctccaccgtcagcctccccgactttgccgaaatagagaaccttgcgaatcggatcaacgaaagtctgcgttgggatggaattcttgctgacccggaggcagagaaggaaaggattcgcatctataaactgaatcggagaaaacggtaccggtgcttggccctcaagggcttccaccccgaccccgaggccctcaagggcttccacactgaccccaatgccgaggaggcccctgagaacttaccctacctctcggacaaagatggcagctccagccacaggcagcccacgtcgaaagccgagtgccccaatctctgttttgaaggaaaccttaccccaaagcttctacactctgacttagctcctactctgctggagtgaaaatctacccacgacgctcacaaacttataattcctcctcaccacaagtttatgtgttaaaaaccatcatcataaaaggaaatgagacccgtatctgaaggaaacagatgttcggtacacggacgacgccgactctcccatcaccaagctgccctcggttgcccaggagagccacagtgccttgagaacataagcaatttagtgaacagagttcttttcagaatttcctttttcttaagatgaatagccttggaagatagagatcgtgtctccctccagagcaaagggcagattagcttcaatgatgacagaagatctcggttcccgggctcagagtccgctgctgtaacgtaagcccttctgtcctcatgtcacctagagcctcttcctgtcaccctgtgggaagtgattctgaggaaaccaggacaattgcaaacactctggctactgctttgctgtgactaataaacatcctttgtcttgtca

SEQ ID NO: 558898 - DNA, 500 bp, Homo sapiens
gagctcggttccctccgcgttcgcggttgggctgggggtggtggctcacgcctgtaatcccagcactttgggaggacgaggcgggtgaatcatgaggtcaggagttcaagacaagcctggccaacatggtgaaaccctgactctacggacgtctgtaatcccagctacttgggaggctgaggttgcagtgagccgacattgcaccactgcactctagcctgggcgacagaggaagactccgtttccaaaaaaagacttttggtactaagctttctcgtatgatttttctgtaatcttatattaatagacgtgggatgacgattatgaaaaataactttttagtcattcggtaggttgtcatgtagtcagagttaagtctctctttactttgaagatttagagttctgaatagttgatttgtgcctgcagtatctcttagtgtttaccacaagtcatttctcagagtgtctgtagatgtttaggctgtacttaagtactgc

SEQ ID NO: 558899 - DNA, 1175 bp, Homo sapiens
  misc_feature (13)..(14): n is a, c, g, or t
tggtccggaattnntgagactcgtggccctgcctggcggtccgcgctgagagtcgccgattagtcggcatcgggcctcgggcgcccccggggcgggttgggttgcagcccagcgggcggctggaccgccgcggtggggcggggacaatggggtacaaggacaacgacggcgaggaggaggagcgggagggcggcgccgcgggcccgcgggggtctagactgccccccatcacaggcggcgcctccgagctggccaaacggaaggtgaagaagaaaaaaaggaagaagaagaccaaggggtctggcaagggggacgataaacatcagagtcagagcctgaagagccagccgctttcttcctcctttcatgacatcttaagtccttgcaaagagcgtggcccgaaaccagagcacagacagagcaaagtggaaaagaagcacctcccttctgactcctccaccgtcagcctccccgactttgccgaaatagagaaccttgcgaatcggatcaacgaaagtctgcgttgggatggaattcttgctgacccggaggcagagaaggaaaggattcgcatctataaactgaatcggagagatggcagctccagccacaggcagcccacgtcgaaagccgagtgccccaatctctgttttgaaggaaaccttaccccaaagcttctacactctgacttagctcctactctgctggagtgaaaatctacccacgacgctcacaaacttataattcctcctcaccacaagtttatgtgttaaaaaccatcatcataaaaggaaatgagacccgtatctgaaggaaacagatgttcggtacacggacgacgccgactctcccatcaccaagctgccctcggttgcccaggagagccacagtgccttgagaacataagcaatttagtgaacagagttcttttcagaatttcctttttcttaagtaagcatctctgttacttaatttctcaccacagctagatgtctataatctgccccaaaaagaaaagaaagcgtgtagatgatttacctcttaagtctcaatctcatggtgaaactcctcacacggtacctgcttctgttggccggaggacgatgccctgaacctcttggagcctttttctgttttaattaaatgcatggcctgcctttatatggcctcaaata

SEQ ID NO: 558900 - DNA, 431 bp, Homo sapiens
gccatcatgaacgacccgtgaactatccgcactagaaagttcatggccaaccgcctacttcagaggaaacaaatggtcattgatgtccttcaccccgggaaggcggcagtgcctaagacagaaattcgggaaaaactagccaaaatgtcacaggccacaccggatgtcatctttgtatttggattcagaactcattttggtggtggcaaaacaactggctttggcatgatttatgattccctggattatgcaaaaaaaaatgaaccccaacatagccttgcaagacatggcctgtatgagaaaaaaaagccctcaagaaagccccgaaagggacgcaagacccgaattaagaaagtccggggggctgccaaggccaatgttggtgctggcaaaaagtgagctggagattggatcccaacccaaggagtaaa

SEQ ID NO: 558901 - DNA, 1149 bp, Homo sapiens
cggacgaaaggtgacgctcgatggctcggaggacagtggtgacgctcgatggctcggaaggacactggtgacgctcgatggctcgggaggacactggtgacgctcgatggctcggaaggacagtggtgacgctcgatgacttggaaggacagtggtgacgttcgatggcttggaaggacagtggtgacgttcgatggcttggaaggacagtggtgacgttgtaaagcggctttgatggcacgatggtgccagaactacaactgtagtgggctgagaagggatgggtcagataaacatcagagtcagagcctgaagagccagccgctttcttcctcctttcatgacatcttaagtccttgcaaagagcgtggcccgaaaccagagcacagacagagcaaagtggaaaagaagcacctcccttctgactcctccaccgtcagcctccccgactttgccgaaatagagaaccttgcgaatcggatcaacgaaagtctgcgttgggatggaattcttgctgacccggaggcagagaaggaaaggattcgcatctataaactgaatcggagagatggcagctccagccacaggcagcccacgtcgaaagccgagtgccccaatctctgttttgaaggaaaccttaccccaaagcttctacactctgacttagctcctactctgctggagtgaaaatctacccacgacgctcacaaacttataattcctcctcaccacaagtttatgtgttaaaaaccatcatcataaaaggaaatgagacccgtatctgaaggaaacagatgttcggtacacggacgacgccgactctcccatcaccaagctgccctcggttgcccaggagagccacagtgccttgagaacataagcaatttagtgaacagagttcttttcagaatttcctttttcttaagtaagcatctctgttacttaatttctcaccacagctagatgtctataatctgccccaaaaagaaaagaaagcgtgtagatgatttacctcttaagtctcaatctcatggtgaaactcctcacacggtacctgcttctgttggccggaggacgatgccctgaacctcttggagcctttttctgttttaattaaatgcatggcctgcctttatatggcctcaaata

SEQ ID NO: 558902 - DNA, 1474 bp, Homo sapiens
tggtttttccaaaaccccggaaattttgtgcttcaccttgtgcaaaccagggttctccacaacccacaatgtgggagaacaccgaagaccaagaaggaggtgggcgacacggggaggggccgaagaggggcccgttgcgttcgcggagaacacgggagagggcgaaacgggagacaacggggggagaccgggaccatatctcccgcgggacatacaatcacaacagaggcacagagagggtggagagaggcccgtgtgtggcgaaaccgcggcgaggtgtgtgcgcgggaggaagcgcgggtgtgggccgccgtgaagaagcccgcggggaggtctccgccgcgtgccccgcgggacccccgcgagagagccgcagagagacacatatgcgaggcacttgtgggccccccagacacacagcggatcacgtggagtgtggggacaccaagagcgcggtgtgggtgtgggccccccccgcggtctcccaacaagagagagaaagggagaggaacaatcgcggctccccatagaaaagtgtgagcgccaagggagacaaagggggagaacaaagtgtgggggggcgccgagtacacgcgccacggacactctcactccggctcgctgtaggggccaaggccccctgacacacacactgtgcccggcccctcccaacaccccccgggcgcaataaaccccatgggtgaggaacccccgaataatctccaccagcgggtgtctcaccagtcaaaccccaccggggggcactctacaacagcttattttcccccgggcgaaagagaaccgaggggataaaaccactggagcacaccagtgagccactaacccgggatggccccccggtgcccgcgcacacgacgccaaaaaaaccccacacgtgggaaaagcgaccgtgaaaacccaagccgccactccacagcaaaggggacccacaagaggataaagcgacccccaaaaggaaaaaacccggagaaggaagaagcacaagagccgcacacacatgcgtcccaccacccgccggcaggatcgacgaaacacccaacaagatccaccaccacacaactccagcacccacacacgtccacacacagagaaaggcggccaattcacacaccccccaagaaagaagacagcggaacacagtatgtaccccccacagagcaagtcccccggggaacaacaccgagagaacagccacggcgacaaaacagacaccgaaaacagcagccgcgaaaaacctccgtcagaagccacgcagaagccccacacacaaaacaaaaccacacgcagacaccaaacaacaaacaacaatccatagacaagacgcccaccaagaggccacaccgcaggaagaccactactcctccacccaaaaaaaaaagattagcgaaacacacgacagccacccaatgcagacgacacacgacaccccaccaaacgacaagcagccccacat

SEQ ID NO: 558903 - DNA, 687 bp, Homo sapiens
tgacgacaagaactcaacaaaactagctaggtacgaggctgggtgttagttggagctctggatttgcctgggggtgacgaggatgagactgaggcagtgggacagccaggaggtcccagaggggacactgtttcagcctctccctgcagtgctcccctggcccgagcaagcaggcttggcagacctactgttgaaggaagcgtcctacagcgtgtatccaccccagaggccccagagcctccatctcagtgagcagatgggccatccctgttggacgcctacctcgccctgtcgtgtgatttcatatcggacctcattaccgctcagtccagcgcttcctagatgggcattttgagccatgatgtgtttcaggaaacaggtcctatcctgcactttggaatcggcatgactctgtctattgtcgcagctcacacattctgcaggacaaaagcagattgtggctgaatgccattgccctggcccagaaacacatgacacgcaccatctacacttcgcccatcgaaggccctgtagcaaccagaagttccggtgacttccgaaacacattcgtgggatgtggggctgctcaccggggatgtacagctgcatccggaggcctcctgtctcatcatgaccacagagatccttcgctccatgctgtacagtggctcatatgttattcgggac

SEQ ID NO: 558904 - DNA, 433 bp, Homo sapiens
  misc_feature (170)..(170): n is a, c, g, or t
  misc_feature (217)..(217): n is a, c, g, or t
taggcatatctgtcttgtggatgttaggcatgatgtctggtcagtcctggcgtgaatcgtgagcgtgtgtgtgcatatggaccgctgatctgctagacccgacctgctatctttgcatgttcgtgctggtcggtgtgccacacagggcgcgcgtgtgcgcgcatgtgtgngcatacatgcatcaggtagtgtgtgtgtctgtgtgtgtgtgtcaggngctatgcctcacacacagactgcctggggtgctggccattcctcctcgccatgggtcccctgccttcgtctgcagctccgtcctccatcctcccagtctagctgtctggccaggccccccgtgcccactgcagatacggtgccgtctagcactgatagtggatgtgctggtggaccttgccctccacgtgtgagtgtgtgtgagagtgtgtgtgtg

SEQ ID NO: 558905 - DNA, 208 bp, Homo sapiens
attttaacctcaacttttttttctacatttttggacccactcagtactttcacctcctgtgctagttctttctactctacctagaatataactatcggatttctttaattgctcagtcctcttcccttatcttttccattataagtttcctgctatatcacacctcatatctcctttttgttcccaaaattgtttcttgtgccttttc

SEQ ID NO: 558906 - DNA, 2120 bp, Homo sapiens
  misc_feature (1117)..(1117): n is a, c, g, or t
  misc_feature (1662)..(1662): n is a, c, g, or t
  misc_feature (1779)..(1779): n is a, c, g, or t
ttgtgtggtagatctgtttgtgtgtggttggatctgccgtgtaggatgcttgtgactgctgtggcggtcgtgtggttgtgtgtcgttgtgggcttgctgtcgtgcctctagtgtctgtgtgtgtgtcgggtgttgctgtctgtgttgttgtgtctgtgccctctcgtgtgggttgtcgtctgctctctgctcgaatttgtgtgtcacctgcatggctggctcggagtgcatgcacagggggggtggcgagcggggccgggcaggtggtggtgttgggccggcgacgaggtgtgggcgtcccgcttctcctcttgttggagcacacacggggggggtgagatgcgctgctgtaatcgttcttttttttgatggtttcgtgccgtcgggttcatcgagtcgtgtggtagtttgttggggttatggtgttgggtgcctaccagcgggctagctgtcggtgacccactctctttatgtggtggcgagctaagaacgacttgtcgccgacacacccatcgtgactctacgttggtgtagtgtggtcgacgatggaactgttacggtgggacaccaccaccaatggtgtgcatgacagatgttctggggtccacctcaatagacttaaaagtggccactgatagtttgtcatgattgtgataggtgcaagcaaatgactgttggtttgtagagatggacgcacctgctgctgtttggtgtggttatagaagagtgcgaaagtactgtgtggcgagtgaggatcgattgctgatgatagatgtcgtccgcttgtgggtggggcaccagaccgtgtgagataagtaatgcgtgtgctcctcgcgcgcttgtgtcgtgcgcaacgacggtgtgtctggtgtgagacgttgatgttgggtaggacaaacacgctgttggagtgtgttttctgcattagggtgggaagtggggtgcgtatgattgtgtgtcatacccactcaagtatggtggcccgcaagtgtggggtacgccactcacacagcagtgctcggggggtccgccacgaggagtgggtgagaaccacccacagagtaggtgtgggctgcgtgtttggtgtgtgtgtgtgttctattttagaatgggtgancatgagtgttgagaccacagacacacaaaatgggggggtaattgtgcttcgctggagcacacctcaggtaacacacatcgttgtggtgaggcacaccacgatggtgttgtcgtatggttgacagtctcatcgtgtgtgaagaatagcccaggaggtctgttaagactctgtaatagttgtgtggctgcgcgcagttgactgtggggcttactcataggaagaggacagtggtggagaatacccccgcaggacaccacagagggtgtgtgtgtggccacgcaggtgcactgtgtctcgctcttcgttggaagaggtttctcgaggagaaagtttctgctataagatgtgtgaagtagtgtctcacaccgcgggtgtgtgtggggacacagacacagtctcgcgggatagagttgtgtgtctcgcagctcagtggtacacgtgtgtagatgagttgtgtgtgtgtgagtgtaatggtctcacaaatgtgtgtatgatgggacaaagagggctctccacattagttatgccactgtatggcgccaacncagaggtgtgtgtgggtgtgtatatgtgtgtggcgcagatataaaagatgtgtgtgatacacactcaacacaccctagaacacaatatggggatagtctcagtgttgtggagaatanagaccctgttagtggtggtggtttgtaacaccttagttatagagttgtatgtagaagaagaaatagggtagtagagatagcacgaaacaataataagacgagggtcaagagggtagagtgcaatcttgttgtggtagtttctaagcgctggcgtttttctcagatggactcctaactggcctatgtccaggttttgtacattgaccgtagcctctacattttgtttccaaatggctcccaatgatttttgtactgcccaaattatatcccaattttggaagaaaaggtaaaatatactcgagcattaactcgggccgagaagagtatcagccccctggctg

SEQ ID NO: 558907 - DNA, 446 bp, Homo sapiens
aacaaggatcattgatgttgtctacaatgcatccaacaacgagcttgtccgcaccaagaccctggtgaagaactgcatcgtgcttattgacagcacgccgtaccgacagtggtacgagtcccactatgcacttcccctgggccgcaagaagggggccaagctgactcctgaggaggaagagattttaaacaaaaaacgatcaaagaaaattcaaaagaaatacgatgaaaggaaaaagaatgccaaaatcagcagcctcctggaggagcagttccagcagggcaagcttctagcctgtattgcctcacgaccaggccagtgtggcagagcagacggctatgtgctcgaaggcaaggagctggagttctatctgcggaagatcaaagcccggaaaggcaaatgagcctcatgtgtagtgtaataaaggtgtctgctgttctatctgt

SEQ ID NO: 558908 - DNA, 713 bp, Homo sapiens
  misc_feature (3)..(3): n is a, c, g, or t
  misc_feature (64)..(64): n is a, c, g, or t
  misc_feature (117)..(117): n is a, c, g, or t
  misc_feature (179)..(179): n is a, c, g, or t
  misc_feature (189)..(189): n is a, c, g, or t
  misc_feature (212)..(212): n is a, c, g, or t
  misc_feature (214)..(214): n is a, c, g, or t
  misc_feature (216)..(216): n is a, c, g, or t
  misc_feature (236)..(236): n is a, c, g, or t
  misc_feature (421)..(421): n is a, c, g, or t
  misc_feature (428)..(428): n is a, c, g, or t
  misc_feature (613)..(613): n is a, c, g, or t
  misc_feature (629)..(629): n is a, c, g, or t
  misc_feature (676)..(676): n is a, c, g, or t
gtntaaatttttttacactatagcatttatgcaatggtttacagaattcatggagttatttttntcagtttgggatttatttaaaaccttgaatctttgttttgtctgcttctctgngcacaagcctggtcagctggtccctgcgggtccttccagccagcttctctgttgggctctcngccgcgtccncctctgctctccccccccaaggncncnaactcccccgccgtcctggntccccccgccgctgctctgggggcttggctctgggcgtctcgtggccccggtgctcccggttgggggtttctgtgggcctcgtgttgggggtgccgtgctgggtgtgccaccctttctgccttttgttctcctttgtgggttctttttgtgccttcctgccgttttcccgggtctccaccccccngctgtcngggcctccctcccgctgggtgggttcattttcttctggggtctttaagtagccagcatcctcaaaaagtgtcctcagcaacttctcatggccctggggggtgatcagctcatcggccaggtcctgctctacctggtcccactgccgctgcagggcctctggcagggttgggtacactagcaaagngtgggggtggcagacnaggggggtctcggacgtcagcgcgtagacgcaggtgctcggctcggncacatgggccagccggttgctttttccacacgccagc

SEQ ID NO: 558909 - DNA, 126 bp, Homo sapiens
  misc_feature (47)..(47): n is a, c, g, or t
cccgcctccctacggacgacggagggtgcactggaattaagggtgtncgctcatgccagctcgtgcaggtgcgagatagtagtagggtcgtggtgctggagtttaagttgagtagtaggaatgcgg

SEQ ID NO: 558910 - DNA, 666 bp, Homo sapiens
gcgtggagagcagcatgccatgtccgtacgcggtaccctatgccgtgggcctcaacaagggccacaaatgtgatcaagaacgtgagcaagcccaggcagcaccgacgtccgctgggcgtctgacaaacacaccaagttcgtgcgggacatgattcgtggaggtgtgtggctttgccccgtactgatgcggagcgcctatggagttactgaaggtctccaagggatccaatgcagggtgccctcacaatttagtctatggaaaagggtgtgtggaccgctaccatcgcgcctaccgaggaagcgtcgcagtgagcgtgaagctattgtttcttggccgccgtgaggaacgtgtgctgcaccaaggaaagacttaggcccctcgccgtgcctctccttcgcgtgaaaacttagaggaactagcttgaacgatgagtcagtcaatccttgggtccatttgccttactatcctcatggaggcagtaacccactttcttcaggtacggtgccaagagcctgtgatccggcaattcgtccagtggcgctgtaactggatgctggccccctggcttgtctgtgaggacccgtgggtaatggtcctgaggggtgcgattggaggaaggaggctacatgttgtggatgaggcgaggaaccctggggttttataag

SEQ ID NO: 558911 - DNA, 1129 bp, Homo sapiens
  misc_feature (499)..(499): n is a, c, g, or t
  misc_feature (557)..(557): n is a, c, g, or t
  misc_feature (570)..(571): n is a, c, g, or t
  misc_feature (595)..(595): n is a, c, g, or t
  misc_feature (616)..(616): n is a, c, g, or t
gacggggcgaaggcgacaggggtctgtggacgagactgtcggcggagagcggtcacgttttcctggagaaagacgaggccccaggcaggagcgcgggctgcgctgggcctttacttcgccgcccgttggcggggagacggccccgtacccgaggggacgaggggacgagggggccatgcccagtcattttaagccgaggcctggaggggcttccgggagcaggtgctggagctcctctgccaggcagggaggctggaccagacacccggcagagggaggcggcgagggcccccagcaaggattctccccagcccctgtgcctgcgtctcctgcggcttctgtgcgcggaccgtgtcctgtgctgtgtagggaacgctgctctctgctcgggacgtggattcctttcccctcctcctcgcctggtactgctgacgcaggtcgtcggactccgcttgggtgtcacccgtgcaggaagcctcccttagtcagggccctcggnacccgccccatatgtgactagcagccctcctgtgtatttcatcgcgcccccgtatgtntatatcagccatnnccactcaccacccttctgggcaanccctttatctcccggtctganatcccatcgctgagggctgggacccctcctcagtgcttatccctgtttccccgcgcgagtctggcgccgtggcgtgtggaaggcgctcagtaaacgttgtggagcgaagaaacgacgcaaaggtgatgagcacgacgcagttaggaggctattggcccggcgcgggggaacacagggggaaggtcgggctcggggtggcaggacccagagggcaggggtggctgccgggatgcactaggggcaaggggggcgtcaaggccccagcaaggtcgggataaacgtttgctcgtccgaggcacagacgtgcgcctgcgggctcaggattacctctcccataactcctgtcctaaacgcagcttcagcggagggggctgagggctctactgggcattacctggaaaaacttatttgcactcccacggcctaacgaaggtggggcttatctattagccacggccagggatagggtgagggcactcctccaggcagaaattcagggaggtgccaaccccg

SEQ ID NO: 558912 - DNA, 448 bp, Homo sapiens
cccgatctctctgtgggggaccaccgaaaatcgttactgtcatctcacctggagcactccagagctcatggaactctggcccaaggctctctgactgactccttaccagatacttctatggcttagcggctgaagaatgacactacctgatcgcctcggaagccccctggaccatcacggatgccgagcttccggtaaactctcaaagtggaaggtaagaccgtcccctacttaatcaatatggaggctaaccaatccacattaacttcttttcaaaggactgtttaacttgactccataactgtatgtgggtattgagacgctctctctgtgggggcaacagtaactcccatttgacccaaaccatgactcacctgggcatacagcacgggcatgggcctgggcccaagctatgatgcaccaggacttcattcacctctcagacacc

SEQ ID NO: 558913 - DNA, 255 bp, Homo sapiens
accccgcagtctttccgcgccgctactacaagagcgcgagagcattttgaaaggtttgcgattataaacaggggttttggccttcaatattaagtcaggccaggatctgggggacaatgactctggcttcggaggaccatcaatgtcacgacggagacacagtaatcagataacgggcgcttgttcctgacgatctcagacgtagggggaggcatttctttttgccagctggctgggcagctggggccggctgac

SEQ ID NO: 558914 - DNA, 457 bp, Homo sapiens
cgcggtgtatctagaggatcccgcgacactcttgggtagaccaagaagacgctccaaggcacttcccaaagccaaacttgcacccaaaaaaggttatggtcactatttggtggtcgtcggctcgtctgatccactgcagctttctgaatgccagtgaaaccattgcctctgaggagtgtgctcagcaaattgatgacatgcactgaaaactccagcgcctgcaggcagcattgatcaacagaaaagcccaattcttcttcatgacagcacctgaccacatgtcacacaactcatgctttaaaagttgaacaaattgggctacgaagtttcacctcatctgccgtattcacctgatctctcgccaactgactactacttattcgagcatcttgacaactctttgcagggaaaatgctttcaggaccagcaggatgcagaaaatgcaaccaaggtgtcg

SEQ ID NO: 558915 - DNA, 131 bp, Homo sapiens
attagctcttagtaagattacacatgcaggcatccccgttccagtaagttaaccctctaaataaccacgataaaaagggaaaggcatcaaggaacgcagcaatgacagcttcaaaacggttaggcctaggc

SEQ ID NO: 558916 - DNA, 279 bp, Homo sapiens
tagcttctttaagatgttctatgtccttatattttcttctaacatggttcctctatttgatttttccccttcctataaataataagttacttctatggcacaaatggcacgtaccctaggatatagattatatgaggaaggtctttgatatttactaactttatcttattctattttttttactttctgaatttcttaaaacttatacttaatgtctgtacagctagaattacttttttgcatgtacatgttgtttcacctttgtttacgtacatttgt

SEQ ID NO: 558917 - DNA, 106 bp, Homo sapiens
acacatggtgtgtatccacgcatgggtaaacactccacgcatttgtggcacatgaatggtgtgtatctaaataaatatttatataacctgataaataaatgaaata

SEQ ID NO: 558918 - DNA, 521 bp, Homo sapiens
cagactccgaataatggcctgcgctttgcgctaccattttggtcctccataatgatgggcaattgcatgacctgtaaacttccctgtagctagagttcttcccactgtgctcttattatgaattaacaagatgtgtcaccttgcacttacctacaatgaccctatctgagatatatattctgaaaatcgtcatcggtaaataggccatcagtagggcattccgccattgggatatccttctcgtagtcacaaaaagacatgcttatagctcattcgaacatgtatacggctgtaggtacactgtgtgaaacaatagttacagcaagtgcgtatgtgtttataaattctatcccctagactttcggccacgagttcaagtgcacctctctctttgttttccaaatgtattgaactgtacaccacgtctcccctattcaatgttcaatgggtgttgtaaatgcccaagtattgtccactcgctcctcaaccccaaccttccatccctagaaaccaccctgaaa

SEQ ID NO: 558919 - DNA, 343 bp, Homo sapiens
  misc_feature (265)..(265): n is a, c, g, or t
  misc_feature (271)..(271): n is a, c, g, or t
  misc_feature (290)..(290): n is a, c, g, or t
atctagaggacccatattgcttggacgaaggatgggaatgactgcttaatcagcatggggtttcattttggggtgatggaaatgttatggaactagatagatgtgatgaatgtacaacactggtgaatgtactagaacgctacttaacttgtttgctttaaagtggttaatttatgttatatagaatttaaactcacattaaaaacaaaaaatcagggctcccttgagcccaggaagttggaggccagccagacgcaacatagtngatacncctatcgctcgaaaaagtnccagtgtccaatctggagctggggcagcaggatagagaggatgctctagcttc

SEQ ID NO: 558920 - DNA, 552 bp, Homo sapiens
aacttcagccatctgttctgtcctttgaatttcatgtttgcaaggctcctatgttcatgtatgtataaatatatttgtgtgcccttctcctgttaatctgtctattttaagtttggtttatagaataaagttatcaaaccttcagaaaagggagggaaggaaattccttttgctcctacagtttaatattagtctttttgtaataaaaaaaatcctaatttttttttattgtaagcagaccttccctgtctgcttacaattttaatatttcaaggtggattttctcagactagaggtagaagcagcacagagctattatgctgatgattcacgtttttgactcttgggttacacatttatttaattatcatgatcaaatatttacttttgtggaagttccctgacgagaaggcttagttcttgccctctgagagctagagaaaaatctaacaaatctgatacaggttactttcccagatcctgtgtttgaatgctgtggaaagaaactactaggtatacccaaatattctagatgattaaaaaaaaagttca

SEQ ID NO: 558921 - DNA, 341 bp, Homo sapiens
tcagacagggcttccctttgttgcccaggctgaagtgcagtggtacaatcatagctcactgcagcctccagctcctgggctcaagcatcctcccacctcagcctcctgagtagttgggactacaggtatgtgtcaccacatctggctaatttgtaaatttttttgtagaggcaggggtctccctgttgctcagtcttgtctcgaacttctggcctcaagtgatcctcctgcctcaatcttccaaagtgctgaaattacagtcataagccaccttgcctggccttagttttttttttcttttcctttctttctttgtttctttgtttctttgtttctttctt

SEQ ID NO: 558922 - DNA, 242 bp, Homo sapiens
tctcgtcagataaaagcttcgctccacttaaagtggatgatttttaaatttgtttgtaaaacctttgatatttgactactaagaaattataagatccctatggacaggcaactaattttctacatttcctggttctttaaaaataaataattgtcataggtccttattaaagctctcagaattgtacttttgatttctaataaatgccaaaatatatcttatcaaatattaaaaaaaaaaaa

SEQ ID NO: 558923 - DNA, 170 bp, Homo sapiens
acttctattttactggttctgagagggaggatcacccagtggatcttttccctacactctccccaccaggctggtctcaaactcctggacttaagtgatcctccctcctcagctcccaaagtgttaggattgcaggcatgagccactgtgcctggcctcagctttgagtg

SEQ ID NO: 558924 - DNA, 336 bp, Homo sapiens
aggtgggccaggctggtctgaactccggacatcaaggggatcggccggcctgggcctctagaatttattttatttttatgatatagtgtaaagtcaggatctaacttttttccccaataaatagttttttaacacggtgtatggaaaattggtcctttcccggctaatggaaaaggcggcttttactatatgcggcattcttatgtatccctgatctgtttggggaagctggggagtcttctcgctggtctcattgcttctggtgatatcctaattgagtctcttagatcacagtcatggtcctgaaacacagatcatatcatacccctctccaga

SEQ ID NO: 558925 - DNA, 883 bp, Homo sapiens
gatgtggtgtcgcgcgccgattggggcagactgaaagagacgttggggtgtagaaaaagcggtgtttttacagcttagatggtggggagagtttgtttatgcgcaagccccctatttttggagtgaagagcgttgctttgaattagcggagaaagaaggtccatcgtaatgtagggccccccccgcgagtcttgtattttgcccaccccccccgtgcgtgcgcattcgatgtgcgtcctctccaagggggtttacagcccaccgacccttggaagagcaggcgttgaagacttgggccgccatgacaccatgagcggtgaaaacacttccccgtttgccaccaaggacgccactttttaatctcgcccccggccatgtccttccagcaacatgtttggaacagatcaagtgtgtcaacctccctcgtttttgaaaacaaaatatagttttctcattacgagaccattcctgaacaacctcattgttctgtcaaaaagttgagtaaaaactttgtactcgcggtctttcacacgattagtcggctctctcagcgtgcgaccccctcagattattaaacatcaccctcagatactaacccctttctcagccagactttggcagggaccccgaatcaagatggctctgtggcatcgacgaaagaacgacaattgtatagaagaggtgtacctccctggcgacggcaaagagtcaagccaggtccgcattcgcagcagggagggacccattttttactgtacccatatggatggagatatagtctgtgaccgtcgtctcgggacctggtacacccccccctgggtctttgccacaacaacatccacccggtaaggttaagtcccaaaaccatttttcagcagcccac

SEQ ID NO: 558926 - DNA, 162 bp, Homo sapiens
tatagagtcttctctgccttgactccagagcatgcttctatcctgagacttatatcttactgcagctgagctgaccctatcttacttacagtccccttcaatttgagagttttttttttttttttttttttttttttttctaaaaggggtgggtttaaagaa

SEQ ID NO: 558927 - DNA, 144 bp, Homo sapiens
gaatgaattcaggtttctatgtccagatttctcctgggctctggagagcatctcagtgcctgctgagagattcaattgaaggagttttgtttgtcttcctattggctccaggaatgaagtacagagtactaggtccactttatg

SEQ ID NO: 558928 - DNA, 90 bp, Homo sapiens
gacagcagcttctacatctgcagtgctagacaccctagccccggggtcggggagacccagtacttcgggccaggcacgcggctcctggtg

SEQ ID NO: 558929 - DNA, 220 bp, Homo sapiens
gaggatccgggtaccatggctctctctttcttttttttctttttcttggcggatgtgagagctgcctgagattcaaggtcatccggcagctcagtccccaccacctctgtctctggctccactgtggcatcttgctgtttttctttctcagtcttctcttagggagctgccagagctgcctggacctgagaattcattccttctggctgttgagaccccg

SEQ ID NO: 558930 - DNA, 325 bp, Homo sapiens
tcctgatctgctgtctcagaaaaaaacaaaaaagtatggcagtagccctgattgagggggtatggacttagagtaggattctaaaaggggagaaacagtgtaacttggtggattccagaaatattggtaagtggtaaaaagataagccttagggaactagggtggatctctaagttgggggcttacgtaccgggggggtggatagtccattttataagaagtgcggaaagacggggttaaaagcacaatttattttttttccctgaaggaggagatagtgtaaagtgaaagacaaccaaatgtgtgacaaatgtgtaccaatggg

SEQ ID NO: 558931 - DNA, 288 bp, Homo sapiens
gtttgcaattacagttgtctctaggtatccatgggggattggttccagaactccctgctgataacaaaattcatggatgctcaagcgccttacataacttggtgtagtatttgcgaataacctatgcacatcctcaagtatactttatatcatctctaaacatataatacttaatatgtaaatgctatgtaattagttgttattactgtatttagtgaataatgacaggaaaaaaaaaggcaaataaatgaattagggccataattatttctgttataataatcatga

SEQ ID NO: 558932 - DNA, 175 bp, Homo sapiens
cacaagcacgcaggtgtagttatatcagataaagtagactttaagcaacaatagtaaaaaaaaaaccaaagaaagtcattacataataattaaaggatcaatccaacaagaggatattacaatcctaaatttacatgccccataactctgagagctcccagaattcatcaaaaca

SEQ ID NO: 558933 - DNA, 81 bp, Homo sapiens
ggcagtttttgcttttattggtcaagaattctttacaaaacccacacacacatccacacacacacacacacatgatgcctg

SEQ ID NO: 558934 - DNA, 175 bp, Homo sapiens
tggttgatctagaggatcccattatggacgtaggatcattccaattacaggacctcgaaagagtcctgtatatgtaataaatacgtcactacctccccgggtcgggagtgggtaattatgcgcgcctgctgcctataccttaggatagtggtagcctgtttactcagtgctccct

SEQ ID NO: 558935 - DNA, 278 bp, Homo sapiens
gggggctgtaaaaacctaaattaatgggggtttggcctggtggttcctgttttggccataacttttcgaggggggcaggttccacccccctaaaggggaagcttcccgggccaaattggggggggggggggggaattttttcctttcccttttctcctttaatgggtttttagacatatcgggtccaggggtgggttctggggccttggattttgttttacaaaattattgggggtttttttttgttattacaccggtgggaggggcgggacccccca

SEQ ID NO: 558936 - DNA, 308 bp, Homo sapiens
tcccactaaaatataatgtgagaggattgcctgaggccaggagtttgagactagcctaggcaacatagtgagaacctgtcgctacaaataataataataataatcaaagctctcacctcaataacctaggaaaaaaatagcaaaataaatccaaagcaagcagaaggaaggaaataataaagataagaacagaaatccatgaaattagaaaccgaaaaacaatagagcaagccaatgaaacaaagggctggttctttgaaaagatcaataaaattacaaacctctagcaagactgacaaaaaaaaaaa

SEQ ID NO: 558937 - DNA, 201 bp, Homo sapiens
ctagaggatccacccaccgccagttgtactcgcttgcctttggagcactctagagacgcttaagtatcaggtggtgtccttttaaaatgttctagaatgactttactctgcatagaccggctaagtggattataacaccacatgtattttgtcttatgattctgcagatatgcagtacttttctctatctgattcagccat

SEQ ID NO: 558938 - DNA, 181 bp, Homo sapiens
atctggcatggctacctgtgagatgtgtgggaccgttggcgtccgagatgctttttactctaaacaaagcgtttctggagcgtttcatgttcaagaattactcgtaaaactccaagaaggcaagcatttctgccagacttcagggtaagcctccacaaagaagcaaaagttcttcagaaca

SEQ ID NO: 558939 - DNA, 190 bp, Homo sapiens
  misc_feature (61)..(61): n is a, c, g, or t
  misc_feature (70)..(70): n is a, c, g, or t
  misc_feature (85)..(85): n is a, c, g, or t
ttagaagttcaatagcaacggagtatgtgttcaaaggaatctccttccttttttgtgtgtntttcctttngtcccaatggggaanctaaatctgttttaattgcacagacacatggacaaaaagtcatttgtatctgccaagtgtggtaccttcctttgtttatttgctattgaaacttctaaaactagg

SEQ ID NO: 558940 - DNA, 1124 bp, Homo sapiens
  misc_feature (1124)..(1124): n is a, c, g, or t
ggggcgacggcggctgcggtggcctgaggaggccgacgcggcggcggtggctggcgatagtgccgaggcggattcttctcatcggcagtgctccaggtagccactaccaatcgatggagttagcctgtgaggaaactggcagaggcagtgtgcatggaccatgatcatcccctcgcgatgatgagcaaggcttcactccttccccacaaatcaaccgttgtcgcactctacagcccatgaatcggtcactttagccactggaccctcagggcgcacatggtaacaggaggccgagagtccgggaaccagtgtgaccggctgctggcccgtcgtccgaccgtcgatcgccctcgagcccatgtgcccccaaggcccgggcaccaatgaatgctcccgaagactcaggatgggcaatccatcgacatggacttgcgtattcaataggcctaggaactgatgtgtcgcatgcagacatgtgagccctcactgtcatcttctgtagagacgggtctacccgatacgcacacgtgccagctttcctgcagacgtcatggccgtggagctacgtcactggccggtactgcataatggacattctcgagcttgctggagtcggagagccaagcaagtagctagccactcgtcagccagatggcaggcacggagtccaaagagaaaggttggtgtccctcctgcttgtcccaacacttccccctggttcagaccaaggcaacacaggagggcccaaagtcaggagtacactgaagggctactgcagaaaagtgctcgggctactcaattcgcagagccaatgctattcatccggaggaggagtcgccagcgttgacgtttcctagtgcccctcgatccaccccagggctaccacacttggaagggacctggaaccgcaactgggcctactggagctgagtccaccttgggaagagcgggattggctagtcggcttccggatccccggcgagaagccgtccttaccattcacgttcaggctccagatgatcgaggggggccctgaaagagctaagcacctaggaaaggcagagacaggcttggcaggaaaaggctgcccccggacaattggaccgtgtcttccaaccattccn

SEQ ID NO: 558941 - DNA, 123 bp, Homo sapiens
ctcgaaaagctagagcggagaagtcgcttaggccgaagaatccgaactacgatagaccttagtaccgtagccgaaccgctacgctccgacctaaacggcgcgacggagccctatctcgggggg

SEQ ID NO: 558942 - DNA, 134 bp, Homo sapiens
ttgccacgctgtctagatggtctcaactcctggcgtattaacgcagtccgcccacctcgtcccttccaaagtgctgcgattaccgggatgaaccactgtgcccggccctccctaatttttgtatttcttgtaga

SEQ ID NO: 558943 - DNA, 340 bp, Homo sapiens
aggccggaatcccagcactttgggaggacgaggtaggatgatcacttgagggcaggagtttaagaccagcctggggagcatagctagaccctgtttctgccaaaaaagaaaaacattcatttgtaactgctgctaatcggagtgtatattcagggcagctccaatcaatgcttccaggtggccattctcaagtttgtggcttaaataaactctgtacttaatcatattttctgaatctcttaaggttagcatacgtatcaaggacagtaactaccatggctcccgaaggtttggccaaaccccggatgcgtggccttctggccaggcgtctgcgaaatca

SEQ ID NO: 558944 - DNA, 708 bp, Homo sapiens
atgtagagctggaacatgataagtatttgtgtgtctaaacatagaaaaggtattgtaaaaatactgggtaaaagattagattaaaaatgatatacctgtatagggcatttaccgtgaatgaatgcaccttacaggactagaagttgctttgggtgagtcagtgagcaagtggtgagtgaaggcctaggacattaccgtacactactatagactattaacactgtgcacttaggctacactaaagttataaaaatgttttttctttcttcaataataaataaccttagcttactataatttttttactttatacgtttttaaaatttaatgttttgacccttttgcagtaatacttagcttaaaacaaacacatacagctgtacaaaaatatttctttatattcttaatctataagcttttatctgtttttttttttaactttaaaactttctggttaaaaactaagacacacacacattagcttaggcctacacagggtcagaatcatcagtatcacggtctttcacttccacatcttatcccatgggaaggtcttcctgcatggagctgtcacttcctatcataacaatgccttcttcggaatatctccgtgaagaacctgtgctgaggcaattttacagttaacgtgtatatataagtagaaggcgaagtacatctaaaataatgatttacaatatagtatggtaa

SEQ ID NO: 558945 - DNA, 275 bp, Homo sapiens
aaaaaaaccccctttttgtgggggcatttggatttttttaggggggggaacccccaatgttggaccccgccgccccggtttgggaattttttttttttaaggggggttttttttttaatgggggtccccttttttgttttttttttttttgggtttttttttttttttgggggggggggggttcccgggttttgaatttttttttttttttccccatgggggggtttggggggggggtaaaaaaccccccctttttttttgggggtttgccccca

SEQ ID NO: 558946 - DNA, 553 bp, Homo sapiens
agcaggtacacggcctggaagccgagtggatttgcgatatatagagggaggctgacaggctggatggacagattctcgctgatgctgattgccgggggaagggaggccatggctgtgtcgagacgatcttcgatggttttgagtgcctcctttgaatcgcagattttctcttccagcaggatcatccaccaatctgaatacggatcatcctgctgggcgccacgtgacattcgattgactacagtgcagaagccagacaatccgatgatgccgaccttgagatcgttttttgggcgtcccatccagatccgtgcagcgtgatgcgtgtgaagggtgagcttcacatcgctgcgtagtgagccaatattgagccgataattgtcagccatggtgcagttattccttggaaagaggattgacatggccatgctgcaattgggctgctacggacgcagcaataaatccatagtcagacggaaggggatttgttgaggcgtctatatacagaaagagcctgggaggaccgactgcctgagttacattgtctttgtcg

SEQ ID NO: 558947 - DNA, 193 bp, Homo sapiens
  misc_feature (26)..(27): n is a, c, g, or t
  misc_feature (37)..(37): n is a, c, g, or t
  misc_feature (144)..(145): n is a, c, g, or t
  misc_feature (151)..(151): n is a, c, g, or t
  misc_feature (160)..(160): n is a, c, g, or t
  misc_feature (174)..(174): n is a, c, g, or t
  misc_feature (178)..(178): n is a, c, g, or t
agtccgtcattgctacgcgatattannccttccacgngcttcagcagtaggttcgttcgctaatcattcaggttgtagcgcttccacatacatcgtcgctgttgattccggcgcatcgtatagtacgttttcagattgttccanntttaangttaggggntttgacttcacgantggnctgcgttaaggcctg

SEQ ID NO: 558948 - DNA, 329 bp, Homo sapiens
ccttgatgtcctgcagaaacccgagcagggttcgtgtatcacgtggatcaatcagcccgtcgtcccacgggtttgcgctgccgtagagggcggtggactggctgtcgagtttctgtgcggtgacctgttcgagcatgtcgagcacattgggatcgggcaccaggccgtctttcagttgcttggaaagaggattgacatggccatgctgcaattgggctgctacggacgcagcaataaatccatagtcagacggaaggggatttgttgaggcgtctatatacagaaagagcctgggaggaccgactgcctgagttacattgtctttgtcg

SEQ ID NO: 558949 - DNA, 189 bp, Homo sapiens
ccaccacatttcatcatggccgcgtcaacaggcaccaagcacagttcaacagtgatttatgctggataagaagagcaggcagaatagacatacaaatggtgcaggcttctcaaaaccatcagtgaacgaggcagtgtggcaccagcacagggactacacaaacagataaagggcggagactggcgaacc

SEQ ID NO: 558950 - DNA, 940 bp, Homo sapiens
  misc_feature (662)..(662): n is a, c, g, or t
gttgaagcggggagcgcggggtcgtgtcccgctagaggctgcgcagtggtatgctcacatgcgttctgccgcgtgggttcctgtggtcccggtgcgacgtccagggacgatcggtcggtctcataggctgttggtcccggtggcaacgcaggcatctcctcgctcaaggtgctggtccctcgccgagtcggctgcggtgtgggcgggccgagagcacccaagtgtcggctcactggctgcggcgcactgagtggcaggaagggaaatcctagcgctcgggcgattctggagccgagaagcacggatgctgtgcattccatggggcacttgggaaggtggtcccatggaaggcttgtgtgcaatagttgcgaccgaagattgcgggtagccgcacccacttgggaagggaaaggggtcgttggactaccacgaccgatccttctcggtaagcgaaaccaggaggacctgactgtccggttgggtctctcgcggtgtaagaggaggacgaacgcacaaggtggcgtagccatggtaactctgaagtgcacacgccgcttgtaaacccactcgacatggtgccacatctacgtacccaagtagatgtactagtagcctactaggtaacttttattgatatctcgcacgggaacacatctaccaanacatgccactcggtgccccaattaggtgtcccgttagggaccaaattcgcggtgaggcacagtcgttcctatggtacgcctttcattaactgtcgtttcattgagaggcagtctaactcaactagaggaaatggagcttcccccttgggtagcatacctagagattgaaatccggagggtgccaatctcaaggcaagcgaggtaggctcgcaactcattagcagtaccgcgttgtttaattggttcccctttgcgcacgccctatggggacgcatgtg

SEQ ID NO: 558951 - DNA, 667 bp, Homo sapiens
tgggccagagcggcaagttaagtggaaatctcctaagggtaagtggggtgccaacgcaaaatcctactatcagagcggggtccagtaccggtaccgagagtggtgggttcacctgtgagatccagagagggccactccaggaggcaattttagaggtcctcaaagagggcagggggcggtcccaaaatctccgggtgagggagacggaggccgtcatccaacaagcaccgctcggccacctacggcgagcagctccgttgcagcagtgtgcaggccgtgccagccaaccagtgaccacgcgggtttcagccaccggaacaccctggtccccacctgagccagagtgtggtgggccttaaaatctcataaacagggcacctctgtgccagacagtgaagactggtgacagcacagattggtcctcctcgggacacctggcccgctcttcccggggactacacagcctcggaggggatccggcaggtaacggtgatggcacggtaacatcgagagggctcccaaacatcggccagcggattggaaactcaaaagtaagtcgaagcacgtcctcccgaagacattacagaacgcatctaagattaaagcgcatcagtgcgccagctggtcaggaacaaaggatgatcacggcaaggggccccacagaaga

SEQ ID NO: 558952 - DNA, 127 bp, Homo sapiens
tcagtgtagagattctgtcaatttctaagcatttccaactattcctgtgaaaattggaaataaacatgggatgggcttgggattctcattgtcttcagtcaggtgaattgaggttaaaactcccatt

SEQ ID NO: 558953 - DNA, 1209 bp, Homo sapiens
  misc_feature (929)..(929): n is a, c, g, or t
cttgaactcctgacctcgtgatctgcccgccttggcctcccaaagtactgggattacaggcgtgagccaccgtgcccaaccatgaaatatttttacttaaaaattgggaataagctcgctttttttttttttgaaatggattcttgctcctgttgtgcaggctgtagtgcagtggcacgatcttggctcactgcaacttccacctcccgggttcaagcaattctccttcttcagcctcccgagtagttgggattacaggcttgcaccaccacacctggctaattttggtgttctgagtaaagacggggtttcgctattttggccgggctggtttcaaactcctgtgacctcagttgatccacccgccttcagcctcccaaagtgttaggattacaggcttgaaccaccgtgcccggccaggaattaagcgttttgacttaccccaattgtcagaatagggcttgaactcttggggggattctactatttctatgtttttgttagaaacagtggaacttgtacgcatcgtgttgtagttccgaggccgtggatagctgccacatgtgggcacgctgtgcttctcacccggatagacctttgtggccctcgcgtgaattcacaaggcatgatgtctctcgcttgtgccagtattagctctttctccacaaaggtgtgccgtggggacactatcaccgagggtgttgtttaaatcccaacgttgttggcccccgtgcccccagaaattaggttgtaggaatctatattagagttggttaacaccacaccgcctaaaaacactatcaatcgttgttcgttattgaggttccaaaggaactatgcgggggttacaaattaaaagcttcttccacaatcttcttcaacaacattatttttgcgtcggaccagtgtggggggatacgcttgcacanacctcgtttggttcacattagcgcccaacataaaccggttggcgcaccccttgtgtgatgccgatttttgcagggacagacgtgtcttttcattacacaccaccggtcggtttcattagggggggcgaggtgttattcaccaccgacgacgcgggccttatgatctccaccaggaaacaagccgcccagatggagaaacaaccacttctgttgggggccaccgatgccttacacaggttgggtctccacgctctgtgtccgtggtatcagcccaacgcag

SEQ ID NO: 558954 - DNA, 223 bp, Homo sapiens
ccaccgaggactcatgaggccgtccactcaaccgtcctagcatcaatcctggatgcatcatacgcctccgtacggttattacctgctccagtgtcttactactttgaccgcgatgatgtggttttgaaaaatgttagccatatactttcttcaccaatctcactgagggagagggaacaggctgagaaactgagaagcttctgtgcggccggggtaccgagct

SEQ ID NO: 558955 - DNA, 515 bp, Homo sapiens
caccaccactctggcgcttctgggagggataggagcgtgacttatgcattccttccttccgaattgcacaggcatcatgggtcagaacaccatctgcgtatatgggggagggggcagataaaccaagcagggcccctgccctcagcagcaaggcacctccaactgccacacatcggtatgaaggcgccttaggccagggctgaatgtggctgggagagaggtgtcaaagaaggctgcaggggagaggcaacagggctgaaccagccagggaagatggcattttctctggccactacagtgtctagttcatccctagacaccaaagagcccgataatctctccatttcaccgatgcgccatcagccacgctccaagttgagtaagtgacaggcgcaggacagaaggcccactctggaatggtacccaggaggcctccttgctgtaattacctcttcgcaggccctgggcttttctggctcttgaatgagcctcgggagccctccccatgtcctcag

SEQ ID NO: 558956 - DNA, 1552 bp, Homo sapiens
  misc_feature (256)..(256): n is a, c, g, or t
  misc_feature (534)..(534): n is a, c, g, or t
  misc_feature (824)..(824): n is a, c, g, or t
  misc_feature (885)..(885): n is a, c, g, or t
  misc_feature (896)..(896): n is a, c, g, or t
  misc_feature (965)..(965): n is a, c, g, or t
  misc_feature (1085)..(1085): n is a, c, g, or t
  misc_feature (1285)..(1285): n is a, c, g, or t
atcgttgttgtgctgatgtgtgaggtgtagctgttggtttcgtgcgatggttggttggttgtttatgttctctgcatgtgtgtcgattgcttgtggctggttgtgctgtggttgttgtgtgctttaagttgtgctgtctgttgttggttttgtcgtgatgcttgtatctgtgtgtgtgtttgttggtgttgtgttcgcgccccctccctcctctcgctgctcgtgtgttttgtctctcccgcgcgcgtcccccagnggtgttatgtatgccccctgcattcgtccccccgctcgtttgtatggggggtgtttggccagcgaaagccgaccccacatcagccgcgcactttttttttaaggggggggcagcccccaccgcctgtgtgtgtagggggaatcctcgtctcggctcaagggggggttcttctcccccaacaccaagaagtggtggggcgcccacaagacaaaatacgccctctgacggccgtctttttgggttgttataaacccgcggtccctggccgctcctccccntgttgtatccttgatttgtttacccccggggggtctgctctaataaaaagggggtaatttccctcgaggaggcgggccccctcttgggggggttttgtgcccgccgagaaagaatttttctccggggccccaccgcggagggcccccccccccccccattatgtgtggtcgcccccggggaaatgtgctgcgcgctcccgaaatgggtcgcggggaccccccccaaaagggggatatagaaaggggatgaagcgcccccccccgcggataaataagtaggtttctctctntaggacgccgccctgttgttaaggaaagacacacatcgggggagatttggtgtgccccccntttggggcgcncacacataaatatatatcgcggattatatcttttatataaggagaaaaagaggttgtatatatatgtgngagacacacatctccaaagagggatataggggtgtacatcggtgtcgcccacaatagagaggataagccccccgccacacagagggtgtgcaccctacggcgccccaacacatctgggangagagagtgtgtcccacccacagaggtgtgtacacccacacacccacaccgtctgtgtggcgccatcattgtgtgggtggaacacccgcacccacgattttatagaggcccacgaatattctctgtcccacagagagagaatattatataggtggcgcttattgggagccccactcttaagccccctctcttaagagacnccgcgagaatatagagctcttcctcgtgaaacactgtgaagagagaaatagactccacggaaaaagaaaagaaagccccaagaagaaaaggtcacaccggggtctcaactaaagcgcgccccgcctgcgctcccacccccgagaagccacaccctttggggggaacacccaagggaagagagacctgagactgctgggacctattccctatggattcctggccataattaggggtttaaaaaaaaaattaaggacctttgggcttac

SEQ ID NO: 558957 - DNA, 144 bp, Homo sapiens
  misc_feature (5)..(5): n is a, c, g, or t
ggatncgctggagcagtacaactaggcttaatagggacatgtctgtacccccccactttagaaggccaaggcagaaggattgcttgaggccaggagttcaagaccagtctaagcaacatagcaagatgctgtctctacacaaaa

SEQ ID NO: 558958 - DNA, 601 bp, Homo sapiens
tcttggtggctcctgccccgggtgtctcgggcttgtgttgtgtccccgccgtggctgtggtgcgagagggccggagtgagttttggtcgtgtcccccgtggcttccgcaattggcttgctgcagtgtgggaggtgcgcgtcgtgtcttcgccgcgcacgccgttgcgtggctgtcgtgtttggtcgcgcaccctcctgtgtggtgaaacgggtggggggcgctgggttctcttctgtcagatatacaatgaccgcccacctctccacgcgttattgttcaataatagacaaatgtcgatcggctctcccgggtgagtatagcagactagtatgttatagtgtgtcgaacaaggaggttcaccccgccacgtctatgtggcggaggtggtgctccctcggcttatgtgtgccaggagtcacaaaacatcaatgtgttctactttcagggccgccgcggcgtatttggctcgtcgagcggagtttcattgctcgttcttacactcctcatcagcaataggaataagttcatcaacatcaaaatacacaggacaggaaagaaaacagtgaaataaaaacaacagcccgacaaagacgcgaagac

SEQ ID NO: 558959 - DNA, 373 bp, Homo sapiens
gcttcttttactggtccaatgaagtagattctctactaccatccagacgctgtgtggctttttcgcgtgtgaactgagcagttattttcttttcctgctcacacctttaaaatcctcttcctccttctgccccctaaatcttgaaggtttgcttttgagatgtacttgtaccgtgagtaattagcctgttaccaagatattaattaacatgttggaaatgttttctttattaatgagaaattcacacattctctttaaattaatttgtatagtttgaaattaatttctcgtggcctttgatgacctccaatctactaagacaaaacccggagtattgtactaacggttaaaccattcattaaacattttatgc

SEQ ID NO: 558960 - DNA, 265 bp, Homo sapiens
cagaggatccggaaaatagcgaggtcctttttcagcaaaaagaaaaaaaggcagtgggagtcaatttggaggagacatgaaagaaaatgttggcagaggctaagtaggtgtgcatatgcaaatgggctggttgaatctaaggtaactggaacatataagtgggacatataaaggaaaaatgaatacatatggcacttaacaagctttcaaacgacaaaaatttcaaacatccctaaggatagtcattttccctcgtccggctaaa

SEQ ID NO: 558961 - DNA, 687 bp, Homo sapiens
agttcttcttcttctggggcctccacgagtctgtggtgagcaccagtcggaggacggagaccggggcagtgcccggaacagcctgtacatgttccaccccatctcctgccgcggcgtgctgcatggagcatggcccagtggttgtcctacccacaatttgttcgccctttgacctgccctgtccgtgttattgacgccagacgctcgctcactgctctgtccctacagtcctttcattgatacatgtgaccccgtgtcaggagtcgtcacagactgtgcgaaccccgagacccgtggtctcttcgatagatgcacgtcacactgtcacacaaccgggtgtcggtgtgaaacccgatttggtgtgccgcgagtggggcaagggcgatagtggtggataggggtgccctgacatcttggtggcgcttgtaggggcggatcgccgtgtccctaagggaacccatgtttggcagtggcggagacgccggccaatttccgtagggggggtgggaccccccggggtggttgtccccttcacgtctcgtcgccgttgggcccggaggcttcactcctctgtggaggggttggccacggggggcggtcgtgtgtggaggggacgggacacgacccccctggcccccgagggagaccctgtggtttgtcgtcgcgtcacgtcaccttcccctggca

SEQ ID NO: 558962 - DNA, 383 bp, Homo sapiens
  misc_feature (116)..(117): n is a, c, g, or t
  misc_feature (221)..(221): n is a, c, g, or t
caatgatggtaagattctggagaaaaaatgtctgggtttgaactccagtgtttctacttattacctgtggactatggacgagttatcctgatgggagcaagatggcgcatcttgcnnccatcaggtctgtattcacattgtatcaactgtccccttaaagtcctttatagctgtttgtgcctttcctgtgccggattgactcttacatcacacgctgcgtncggttttcatgctgcttcactccctttaacctgaaacaatgcccgtgccttgtgtatgtctcaccaccaagccgtttgtgaaaacataagcccttgtttggaaagtctctgaattgagtttggctgatatttccccagcatttgctgatgggagaagatgcg

SEQ ID NO: 558963 - DNA, 158 bp, Homo sapiens
gcggcgtcaataccctgatacaccacaacatgagattgcacagggaggaaaagacaaactttcagctgctttttcttaaagtacttaaaaggaattgttgtattttattacatttatattttgtacatatgtagggtcagcatttttatgatctcgat

SEQ ID NO: 558964 - DNA, 147 bp, Homo sapiens
attagagagacaagagacagcagttggcagacagcaagagacggtgaagcagcctgtgatatgaggatagcggtgaaacttgagtggacagccacgtgtacactagtacacgctgcctacgctgtgggaccccactgctactaaacg

SEQ ID NO: 558965 - DNA, 643 bp, Homo sapiens
tctgcaagtgtccatcttccaaggggccccttgacccggatcgcagggatggccatgtaacagagtggcagtgtggcggtcatggtcagttgcaaaggccttgcctcggggcccccatcacttgataaacaagaaatgccattgcctgtgaattctcccttggggagcgatccaaggaaaatggtctatcaggagagcccgcaagatccttccagttggcccctgggggggatggcctccctccctgaagcaagtggcagtgaagccccatttgtcccaggggggccaaacaacatgccttcccatgtgggctttccccagaatcggttaatgatggcagggccaaaacctgggccttggcccctttcagcaactcaggggggaactccccagcaaccccctgtaaattccctggccagtttttaggggcaccatttcccaaatgtgggggggcccaccccggacttttgggcccaaaaccccaaacagggccggccccaggcccttttttcctcagacccccaacaaccgccctcccgggccagaaccttcagaaatcggtttgtccccagaaaggctcaatgcctccataggggggtttttccctccccggattaattttcctttcccccctttagggcca

SEQ ID NO: 558966 - DNA, 488 bp, Homo sapiens
  misc_feature (150)..(150): n is a, c, g, or t
  misc_feature (174)..(174): n is a, c, g, or t
  misc_feature (185)..(185): n is a, c, g, or t
  misc_feature (195)..(195): n is a, c, g, or t
  misc_feature (199)..(199): n is a, c, g, or t
  misc_feature (246)..(246): n is a, c, g, or t
  misc_feature (253)..(253): n is a, c, g, or t
  misc_feature (255)..(255): n is a, c, g, or t
  misc_feature (280)..(280): n is a, c, g, or t
  misc_feature (445)..(445): n is a, c, g, or t
  misc_feature (448)..(448): n is a, c, g, or t
ggtacctccagaactgcttcaactctcagactcgcttcagactctccagactgcctcagactcctgagtagctgggactacaggtgcgcaccaccacacccagctaattttgatgtggtatttttagtagagacggggtttcaccatatnggcaggcggtctccaatcctgacntcatgatccgnccgcctcganctcncaaagtgctgggattacaggcatgagccaccacacccggcaattttngtatttntngtagagacgggggtcttgctatgtngtccaggctggtctcgaactcctgacctcaagtgatccacccacctcggcctcccaaagtgcagggattacaggcatgagccacctcgcctggcacccctcaccttctgaaaggagacagacatgccaagaggaagtttacaagctcctcgggctgccctgtctngtnttctggaactgtcttggtgtgagtctgaaggcagtctgga

SEQ ID NO: 558967 - DNA, 629 bp, Homo sapiens
tcatgcgagctcatcagtttgaaaaaaagaccctcaaacaatccgtgtatccatattggagtggaactccatacctcacatcctccctgccgttgcccacaaatagctcaagatgagctgagctccttgagcatagaacggcactgacagagcaaaaggcgtactacatgcatcagcacccaacactgacccaacacatcacaaacactacccacacacaaatagcacactagagcacgcaacgagaacgaatcgccacaacacccggcataacccccacaagccgtgctactcacacaggccacgtggcctaacaacgagctcctgacactacaccaacatacgacacccctcaacgctacaccccacagcctcaccacggcaaccaaaccaaccaaatgagctagactaacagctatcactcgaccccccaaaaaatcaccacccaccacacacatccaccattccccaaaaccaaacccaactccaataaccccaaaaaccatatagcaaccatacatagcacacacacaaccatactaccctcaaccaccttctaccaccacacaccacatcccacccattagcaccctaccacaacacctaccacattaacaaacacaatcaag

SEQ ID NO: 558968 - DNA, 711 bp, Homo sapiens
  misc_feature (690)..(690): n is a, c, g, or t
gtggtcagagaaggggttttctcagcaactagactggtccgtgacatgcttaactaggccagacaagcgacttgttacactagtaatgttccatgagaaaaccatagtccatttagtggggaagggtatccccttaatgactcagatctatactggcttaaaattgggtcagcgagttgcgataatacctcaaaaagccgtcctataagccgaaaagactagccggagaagggcctacgtatagtgactaagcaatgctagtactctcactacacctgctacggtagtctgcgccttataacacctcttgcagggagacgtgaactcgtagcaccaaagtacctcggctttattagactctacataggaacttctcaccataattgaagatggtataaacatgggaccactacagcgctaaagcggccaatatgcttgccctgcaagaacgatcaacagtgtgttaagcttgagctttgttacagaaaatgaggtagggtgcggtggctcacatctgtaatctcagcagtttgggaggccaaggcaggcgcatcagtctgtaggtcaagagtttgagaccagcctggtcaataatgatgaaatcccgcatcgtatacccaaaataccaaaattagctgggcattggtggcacacgcccggtatacccaagctactcaggaggtgataacntcgagcactaatcccccgtga

SEQ ID NO: 558969 - DNA, 1425 bp, Homo sapiens
  misc_feature (1140)..(1140): n is a, c, g, or t
  misc_feature (1148)..(1148): n is a, c, g, or t
gacgcatgtgtacgcttcgtgtgtccgtgtattgcttccgttcttcacggtaccgggttggcccgagatcggtctgcgcaggaaggagcgccacgtatgcccatggtcagtacagcgcccacataatgctgacaacacgggtcgacttgcccatatagagtctcaatgaattccgacgtaggcgtgaaacggtccagcacactggagtgtaccaccataccggtggcagcaacgcatgtactcggagcttgagagcagtttgaatgtctgcaaacacaattggacatgtccacgtgcaaatcgactgcgtcatttgcgatgcgtgataacgcagtgggggcaccacgttcatgtaccccagatgtgctgatgcaaacgactgatatgcaattgcgagacctgacgttagacagatccatgtgacaccttgacctgttgattgcgacatgcaagtaagtgaaacccctacaacgatccttcaactttagcaccatctttaactcggagaggttaactgggaggtggaccgtgaatggaacggcatattccaccaagggaatcctcgctaggttaggccaaccttgggcgcgaccaaggatataaacggcggttttgggcaatgtcgcttaggatccccacgccagtccttgttctttagcccggggggcgcgccgaaaatggccgtggttcgttgacctccttaaaggcggatccaattctgttccacattgggggggtatctgccctccggttagggcacactttctgctggaattaaaccctggaggcggtctttcccatttgtcgaacaccgtgtggggcgcgaaaggggtgtttgccagattccttagggccaggaggacaccgtgtgctttgggggaattgggctttgggcgacacggcggaacacacgcgtggcaacggaacgcgagacctctcctttccttaataggagaagttcgccaagcgggcgcgtggcgcaaattagaaacttagagacccccctttatcgatactagaagcgagaataggtatggaataggggtgtgaagcggaacacttgtaaagggaagatggcagatttggtttgggggggctgtgggggaaacggtttaaaatataaggcgcaattatggcaanattccatntgggccaaatctggggcgtggacgatgcggagcatacactttttaagagaaggcccacaggacaggaggcggagaattcgtggaaaccgttgtttcgccgcaaatttggcacattttcgcagcgcaatattgaattttgtatccaattccgttgcgacatttccgggtttcggaaacatgggcctatcggaaatactaggacgggtatgacccaagaaactaattatagcacacttagaagtgtttagaaacccgtggaatggatatctctgcgacg

SEQ ID NO: 558970 - DNA, 193 bp, Homo sapiens
aagtgtacagcatggatccatggagtacttgcagatagatacgagtttaaaacatttaataatttcccctatgaatgtagcttaagatcattattctctctcatatttctatatctttctactttttttgtcatttgagtcatggttgttgcggtcgtcgtcttcttcttttaaaaaagaagatctaactttc

SEQ ID NO: 558971 - DNA, 105 bp, Homo sapiens
agcatcctctgagaatcgggacaaatgggagagggggaagagttggagtgtgatgaagaactaggaggagctcaagagctgagaggtctagttccacttatattg

SEQ ID NO: 558972 - DNA, 453 bp, Homo sapiens
gttagaaagataaatgtttaaggtagcagatatcccagttaccctgattgatcatcacacatgtacgaatgtatcagaatatcagatgtactccaaaatatgtacatctatttggtttcaataaaaaaaacaggccaggcatagtggctcatgcctgtgatctcagcacttggggaggcctaggtgggcagatcacttgagtgcaggaattcaagaccagccggggaaacatggagaaaccccaccgggagtggtgttgcgcacctgtagtcccagctactcaggaggctgaggtgaaagaatcgcttgagctcggaaggcaagggttgcagtgggctgagatctggccagggcactccatccggggagacaagagagagactctccatctcaaataaaaaaaaaaataaaaggttcgggctatgggtctctggcctgtgccccgcgcttttg

SEQ ID NO: 558973 - DNA, 169 bp, Homo sapiens
acctactgtgaggctcacacaaatatagtcaactgactttttgacaggaagcaaacgcaatacaatggagaaaagacagtcttggctggggcagtggctcatgcctgtaatcccagcactttgggaggccaaagaggaaggatcacttaagtccaggagttcgagggag

SEQ ID NO: 558974 - DNA, 161 bp, Homo sapiens
aatacagtttcagtggggcaagcatgcaaaaagtctggcagcatgcactggtggtgttgcttgcacaatgatgtgctgttcttaatgccatagaatgtacacttcgtacatggctagtgcttacttcaggagcacgtgcactaaaattggacatgctacag

SEQ ID NO: 558975 - DNA, 840 bp, Homo sapiens
  misc_feature (135)..(135): n is a, c, g, or t
  misc_feature (143)..(144): n is a, c, g, or t
  misc_feature (157)..(157): n is a, c, g, or t
aggaaaaacatggattcagcttagactgaggaaaactctccattatgttgtaagaaattatagatgttttgagagacactttttgttaaaccagatattgaactccagcacactattgttggttattatttttangttcattnngttctcatttagnatgctaaatatttcctttatatttgctttaatagattttcttttttttctttttttttttataagaacgggagtctcgcctcgtgtttgccaggcttggagggcaggtggccacgatctggggctttcgtgcaacctctggcctcccagggttcaagcggattctcctgggttcagccttccgagtagctggggactacagggcggcttgccaccatggcccagctaattttgggtgattttaagtaaagacgggggtttcaccacgtgggccaggatgggttcagatctcctgacctcgggatcctcctgggctaatcctcccaaaaggcggggattacagggcttaagccaccggtgcctggcctctttaataatttttaaaataccctaaagggctggtgaatttttccaaggtctacggagtaaatcaggtatggccggggacattggatagccatgggtcagataccgggatttaacgcgggggtagacaggcgggaccctagggttgccaggtgtacagggggcatccataggccttcaccagaaataacctggggacgggtgccagaaactagaagtctacaatctctcactgctaagcagagctgtcaacggacatacggggtaatgcataaatagccggatgtacctataaaagcccttaaattaaaccattgg

SEQ ID NO: 558976 - DNA, 230 bp, Homo sapiens
  misc_feature (15)..(17): n is a, c, g, or t
  misc_feature (64)..(64): n is a, c, g, or t
  misc_feature (103)..(103): n is a, c, g, or t
  misc_feature (164)..(164): n is a, c, g, or t
  misc_feature (170)..(170): n is a, c, g, or t
  misc_feature (193)..(193): n is a, c, g, or t
  misc_feature (212)..(212): n is a, c, g, or t
  misc_feature (216)..(216): n is a, c, g, or t
  misc_feature (219)..(219): n is a, c, g, or t
  misc_feature (224)..(224): n is a, c, g, or t
agtgcggggtttggnnnattctgggacttgtaaggttcagggcgtgtgtccctggaccgggagnaccagtccccgaaagatggggagttgagtggcccagatngatacttggaccaaagaagctgaaatgacttcagagcagaaaaacttcctgctgctctctnttctcnataaaaccgtgtttacccatatntttgtgtgccccccatttngcancanggtcnctcaat

SEQ ID NO: 558977 - DNA, 149 bp, Homo sapiens
aaccatagaacagcatcatgtgggaaaagagcatatcgttgagattggaattatggtgctcttacatcagatgaagtgtagagagtactcatcacagggctgacacactgtagtcttctcaatagtatgttcgtttccctactggtgat

SEQ ID NO: 558978 - DNA, 495 bp, Homo sapiens
  misc_feature (8)..(8): n is a, c, g, or t
  misc_feature (61)..(61): n is a, c, g, or t
  misc_feature (93)..(93): n is a, c, g, or t
  misc_feature (98)..(98): n is a, c, g, or t
  misc_feature (146)..(146): n is a, c, g, or t
  misc_feature (152)..(152): n is a, c, g, or t
  misc_feature (159)..(159): n is a, c, g, or t
  misc_feature (165)..(165): n is a, c, g, or t
  misc_feature (175)..(176): n is a, c, g, or t
  misc_feature (187)..(187): n is a, c, g, or t
  misc_feature (203)..(203): n is a, c, g, or t
  misc_feature (207)..(207): n is a, c, g, or t
  misc_feature (213)..(213): n is a, c, g, or t
  misc_feature (217)..(217): n is a, c, g, or t
  misc_feature (278)..(278): n is a, c, g, or t
  misc_feature (282)..(282): n is a, c, g, or t
  misc_feature (285)..(285): n is a, c, g, or t
  misc_feature (294)..(294): n is a, c, g, or t
  misc_feature (326)..(326): n is a, c, g, or t
  misc_feature (328)..(328): n is a, c, g, or t
  misc_feature (348)..(348): n is a, c, g, or t
  misc_feature (369)..(369): n is a, c, g, or t
  misc_feature (387)..(387): n is a, c, g, or t
  misc_feature (420)..(420): n is a, c, g, or t
  misc_feature (426)..(426): n is a, c, g, or t
  misc_feature (492)..(492): n is a, c, g, or t
tgtttttnaacttgacaatcattacactaaaacagatttgataatcttattcacagttgtnattgtttacagaccatttacttcatatttccnctgtntattcctcctctccctccccttgcctggctcacccctctctgtctgtnaccctnccggccncgggcnccttgtctcnntgttgtctggngtcttactcgtctggngggntttggntggntgctgctggtgtctgcgggtgggctggggggggggtcctggctgggggggggggggtctgnctcntcnggtgcttgngccggctcttcttcctgctggctttcggtttntnggcctgcttctggacttatnccttcaggttctgcctccgcngattcttcttctccctcntcacctgttgctgtttcgtttgttgtgggtttngtgccngtgggtgttgtcgccattgggacaggttggggggcgtgttccggagcatcaggggtggtgctctcngtg

SEQ ID NO: 558979 - DNA, 281 bp, Homo sapiens
atttttgactcatttcttttccattgtgtggcttacaaaagttaccgtgaggctgggtaattcataaagaaaagaggtttattgggtttctaaaggctatacaagcacagtgccaacatctgcttctggtgagggcctcaagctacctccactaatagcagaaggaaaaggggagccagtgtgtgcagagatcagatggcgagacaggaaaataaaagagggtgctgccgggctgttttaccagctctcatgggaactaacagagagagaactcactcaca

SEQ ID NO: 558980 - DNA, 171 bp, Homo sapiens
ctagaactcctggactcaagcaatctgcctgcctctgcctcccaaagtgctgggactacaggcatgggccatcatgcttggcttcttttttttttttggaggtttggatggttgtgggtgaagtgggtggagaggggaactaccatttatttatggagtgtagaatttgaa

SEQ ID NO: 558981 - DNA, 422 bp, Homo sapiens
ggacctcactccacagcgtgcgcgcaggtgccacatcgatggggcgtggtgtgtttcctccgaaaacagcagggattctcgcgactcatgatccccatatgggttagtagtcagaggtgctgttacgtgagggatgtcgtcggtgctgtatccgccgttctttcgagcgccgccagtaagggtgccggcaacatctttcccctggcctcggcgcggcgcagtatcccggcgcacgccttcgcgctcaagaagtacctcggtgggatcgaacccgtctcgagcacttgcgacaacgaacacacgacggcgtcgttgggccaggccgaaatattgggcgtccaggacccgccacgcgattgttcttttgggtccatacacacaaccagcgtcctgccatttcttccctggctggtggaagggag

SEQ ID NO: 558982 - DNA, 385 bp, Homo sapiens
cgaccagctcgagcagctcggcgtcgtcaaccatgtcggccttgttcaggaacacgacgatgtacggcacgccgacctgacgcgacagcaggatgtgctcgcgggtctgcggcatcgggccgtcagcggccgagcacaccaggatcgcgccgtccatctgggcagcaccggtgatcatgttcttgacgtagtcagcatggcccgggcaatcgacgtgggcgtagtgacggaccggggattcgtattcgacgtgcgcggtcgagatcgtgatgccacgagccttttcttccggcgcggcgtcgatcgaggagtagtccttgaactcgccaccgaagcgctcggcaccgatcttggtcagtgcggcggtcagcgtggtcttgccgtg

SEQ ID NO: 558983 - DNA, 410 bp, Homo sapiens
  misc_feature (12)..(12): n is a, c, g, or t
gggggggggggntttttttgggtccccctcttgaattgggaaatccggtcctgacagtaatgaggcccctgctctaaagtagtttatacagtttttcagttggataaatagcccagagtagtttttgaaaggttaagaaaaataagtgaaaagacatacccgatatatgaaatggctcccaatgataattggtccaacccttataaaatggggttttggactcttatgctgccaaagggactttttaaaactcttctcgttttgggtttataagccccccccggaggtttgacagatgggcttggttttactacagagccaaagaatttgccccttagctatatgtgaaggatattattttaaccaattcctggttttaataaaggttttttttttcctggaaaaaaaaa

SEQ ID NO: 558984 - DNA, 488 bp, Homo sapiens
agcaaataaaagataaagaggcactccagccaccctggttcacgcgattctcctgctcagcctcccgagtagctgggactacaggcacatgcaaccacgtctggctactgttctcgagttttagtagagactgggtctcgttatgtagtccaggctggtctcgaactcctgtctcacgcgtctgtgtgaagagaccaccaaacatgctttgtgtgagcaacatggctgtgtatttcacctgggtgcaggcgggctgagtccgaaaaaggagtcaacaaagggtggtgtgattatcactggttcttatagatttgggactaggcggtggagttaagagcagtgttttgggggcaggaggtggatctcataaagtacattgtcacaggtgaggagaattacaaagaaacttcttaagggtgggggagatgataaagaaccttcttaagagtggggcagattacaaagtacactgatctatagaagtggtg

SEQ ID NO: 558985 - DNA, 175 bp, Homo sapiens
cactgtacttatgctctccacattgttgagttactgtagctttgtagtacgttttcaacatcgaaagtgtgacttctccagactttattctttttcaagatagttttgactattatgcggctctttgagattccatatgaattttaggatgggttttacctattatatttttttt

SEQ ID NO: 558986 - DNA, 587 bp, Homo sapiens
  misc_feature (501)..(501): n is a, c, g, or t
  misc_feature (506)..(506): n is a, c, g, or t
aaaagaaaaggtcaggctgtttaaaaatgaaaacagtcgcaaaacagaccctggaaacacggaaatggcgtgttctggaggcttaaaagaggaccattggcccataagccatatcgccaaaaggaaataaagcaacaaaggtgcccagatcataggaaaaagctttttacagtctcattgaatcccattaaaaaatatttagctaaagagcaccaatagagtaaaaagggaaataaaaaaaatagggcccatataatatagaatgaaaaatagcctaaatcacaagcacagcgtgggtaaacatacataaatccaagcattgaccactgaagccctagtataccaaaaccccagtaccaataagtcccccaagagtctacaagtaggatcctaaacaccatcctctaacaaaagaaaccaggcctctctggaggagaagtcgattccagggcagggacaaggaaaacacaagagcctggtggtgaaaaaaaaaaagaaagncaaancggcgcggggtggggtatcacagtggctgcctcgtggcgccctggggctctgacttcccacagcacaacaggcctcgtgca

SEQ ID NO: 558987 - DNA, 601 bp, Homo sapiens
  misc_feature (5)..(5): n is a, c, g, or t
  misc_feature (7)..(8): n is a, c, g, or t
  misc_feature (10)..(10): n is a, c, g, or t
  misc_feature (13)..(13): n is a, c, g, or t
  misc_feature (18)..(20): n is a, c, g, or t
  misc_feature (22)..(23): n is a, c, g, or t
  misc_feature (29)..(29): n is a, c, g, or t
  misc_feature (87)..(90): n is a, c, g, or t
  misc_feature (127)..(127): n is a, c, g, or t
  misc_feature (158)..(158): n is a, c, g, or t
  misc_feature (161)..(161): n is a, c, g, or t
  misc_feature (166)..(166): n is a, c, g, or t
  misc_feature (188)..(188): n is a, c, g, or t
  misc_feature (190)..(190): n is a, c, g, or t
  misc_feature (207)..(207): n is a, c, g, or t
  misc_feature (239)..(239): n is a, c, g, or t
  misc_feature (247)..(247): n is a, c, g, or t
  misc_feature (258)..(258): n is a, c, g, or t
  misc_feature (279)..(279): n is a, c, g, or t
  misc_feature (288)..(289): n is a, c, g, or t
  misc_feature (293)..(293): n is a, c, g, or t
  misc_feature (311)..(311): n is a, c, g, or t
  misc_feature (328)..(328): n is a, c, g, or t
  misc_feature (333)..(334): n is a, c, g, or t
  misc_feature (346)..(346): n is a, c, g, or t
  misc_feature (383)..(383): n is a, c, g, or t
ttcanannanaanaaaannnannaattanaaaaaaaaaaaaaaaaaaaaaaaaaaaaaaaaaaaaaaaaaaaaaaaaaaaaaaaaannnnaaaaaaaaaaaaaaaaaaaaaaaaaaaaccttgtggnccgcttgggcccagtcgattttaaactgggncangtttntgcttggggccgaatttggggntnattgggccaattccccntatggggggccgttttacaattaatgggccgnggtttaanaacgtgggaangggaaaaccctggggttcccnaattaaatnncttngaagaaaatccccttttncccagttggggtaatancaaannggcccgacccgntggcctttccaaacagttgcccaccctaaagggcaangggaaattgaaggcgtaaatatttggtaaaaatccgggtaaaattttggtaaaaccagctaatttttaacccaatgggccgaattgggaaaaaccccttataattcaaaggaataccccgaaatggggttgagggttgttccatttgggaacaaggatccccttttaaagaccggggactccaacgtgggcatttttggggtcaaggcgcttggcctt

SEQ ID NO: 558988 - DNA, 1184 bp, Homo sapiens
ggaaaggtggaacaaaaaaggggaagccaaatataggccaagagcagcctgtggatgatgctgcagaagtccctcagagggaaccagagaaggaaaggggtgatccagaacggcagagagagatggaagaagaggaggatgaggatgaggatgaggatgaagatgacggatgaacggcagttactgggagaatttgagacaggaactggaaggggatcctgcttccgtcagaccgagaccggctccgttcggcacgtgacaccgctggcatggcagcgggcacactggaaccacatcatccaggagacagacgaaagcagctggacccagactgggcctgaccgacgggacgtcacgagccgggatcggcgccaatgcctggcctctcacagtccactctcaaacaaactcatcacaaagactggaggcaaacacagagtccagagctggtgaagaagcacaagaacacacacgagggtcgtccccaaaaagcctcccccatcaccccaacctacagaggaggatcctgaggcaccagagtccgggtccgggtcaccaagctccgtctcgcgagggtcctacctcaggatctgaactgtccctcggacgatgacaccgggcaacaacccacagctgaacacaacactcgacggtggctcggtgcacggacgctgctggacgacggggacggacctccagcagctgtcgcggaaacatttgcgcatcacaagtcgttccgcccccatggcggcttgacagggacgtggaagccacgggggccgctatggcgtgaaccggacgacggacacctgaagacaccgtccacggaagacccccagccgctacaacaagggcagcccggcagtctgagaacaaggccagtcaaggaccaggcagccggccaacacaagcggcagagcaacacaaccgacgcgagcactgcacggcgacctactacaaggtcgtggtagcggggaaacagggaagccgacacgaaacttgctacactccaaaaaaccaaaacacacaatccaacccatcccacagcacgcagacaaactagcacaagagcagcccacacccagaccacaaccgaagaacacgggggcaacaagaaagagaatcgcaaaagcgtacgagcaaccgaagcacgaagcaacgagacaaaaccccatagacgacag

SEQ ID NO: 558989 - DNA, 1739 bp, Homo sapiens
  misc_feature (836)..(836): n is a, c, g, or t
  misc_feature (1362)..(1362): n is a, c, g, or t
tggtaaaggggctgatccggttaattgggcaggaaaacgagaacaatccagcagcccagggagggaacggggggactttatctcctctcctctccttcggtcggtctctccagagccccaagccccaaccctgtggccctttcttgtggatttctttcctctctttcaacgcgggcccggggcgggccaaccccccggtagtggagaagccgcagagagagagaaagtctcgagtggtgctctcgtgggaaactccgagggcggcacaagtgaaagggagcgggaagtgttctccaccaaccgtggctgtggcggaacccgtggattagtgggcgcgtgggcggaactcagaaagcgcgaagcgcggtggtgtggatgtggaactgtgtggcccaaagcccccgagactctggaaacgcacctgtgggactctgtggagaggagcgtgtcttctctctatagagaagacattcgcctctatattcctttacgagggccccgagagatctgggtaatctcacaagagcttttacaaatcttttgggcgccctttcaatatccacagagaaacgccgacaaaattggcgggggaacacattgcgccgtggcgcgagaaaaagcacagtgggggccgtgtttagcggcccttttcagagaaacaaagagaacgcggccgggggggaggggatcaccacttatccatccactaactcaacaaagaagggactgttccacacaaggaacgaacgattataccccgcagcagagggggcaggaggggggaccgcccataactgaggacgggagggagaaaaattatccgtatggtggggagncgcaccgaagggtgcgctgacttacacacaacatatctctgttgtggacgaacccgccttcctttgcacacaaaggaaaaaccctccttacaacaaagcgatgtcttatgtgtggtgtgaaaaccgccggagagggagaagcaccccacaaatattgaaatcatccacggccgcgcaccgagagcaagatcacaaaaagagcacatccaccacaagcagacactaccctgaggagggaggtccccacgaaaccgaaccgcgaggagagaaatacttctcagcctccccaacagagaagaaggggcgaggttccacacaaccagcggaggggaggaagggctcacaccccagcaaataacacgagtgtctctctgggggcggacaaacacaaaaaaacaccaccgaatgagcgtccccccggcgggggcccacaacgtctggggggccatatgctgcggcgggccaccacagcggagtatacaccccccgccggttgtatgtagggggcgcccctataaaagagggnaagcacaaccccacccatctgttacggggggagagaagcgcggcggtcgccacaaaaaaagcggtcgcggcgggagataataaaccccccgtacgaagggttcgagcgcagacgaacacaaccaacgagcggggagaaaacagaaccacacacaagaagcgaagcgcgacgtaggacgcaccgcggggcgcgagcagcgaaaggaagacggccacaacattgccgagagaaggcacctcgtgtggagaaaaccgacacggggaggagacaaaacatcatgcgggcctcggtggttcggaacaacacacatatcaatggatgcgccgaacgagaagagcacatgcatatctagccaacgaagcgagagaaaactccac

SEQ ID NO: 558990 - DNA, 363 bp, Homo sapiens
tctccagccctcctagggaagcctcttttaaaatgaggctgggctggccgggcgtggtggctcacgcctgtaatcccagcactttgggaggccgaggcgggcagatcaccgtgtcaggagtttgagaccagcctggtgaacatggtgaaaccccatctctactaaaaatacaaaaattagctgggcgtggtggcaggtgcctgtaaccccagctactagggaggatgaggcaggagaatcgcttgaacccgggaggcggaggttgcagtgagccgagattgcgccattgcactccagcatgtgtgacagggtgagactccatctcaaaaataaataaataaataaataaataaataaataaat

SEQ ID NO: 558991 - DNA, 167 bp, Homo sapiens
catccatgctaaccgagtatttggaggtcagcactggtgctcactgtgtcgacggaacttgtacatgggaggcatgcaccgacacgtggtgaatacactgtcgaccagtgctccagtgttatacgatattgtggacggtcatgcacgtgtgctcactgtgtctgacg

SEQ ID NO: 558992 - DNA, 335 bp, Homo sapiens
  misc_feature (21)..(21): n is a, c, g, or t
  misc_feature (32)..(32): n is a, c, g, or t
ccccatagaggtctgggattncctggaatatnatatgaaaaacattttttaggctggttgtggggctcacacctgtaatcccagcactttgggaggctgaggcgggcggatcacctgaggttgggagctcgagaccagcctgaccaatgtgaagaaaccccgtctctactaaaaaaaatacaaaattagcctggtgtggtggcgcatgcctgtaatcccggctactcaggaggcggaggcaggagaatcacttgaacccgggaggcaggttgcggtgagacgagatcacgccattgcactccagcctgggcaaaaagagctaaaaactccatctc

SEQ ID NO: 558993 - DNA, 359 bp, Homo sapiens
tcggccaacgtattatacacggcgaccactatactggcgatctgttaacggccactggtcaacaaggcatgtacatttacaccgcataacatttaaatcagagaaacagaatttacaaataaagtgttacattcggcctttagttacactatagtaccatgctgcagatagcagtaactgttaaagtatggcacgaatgcccaaccctctggtgcctgatcatgtatctagcaacatatgcagaatgaagaaaagagatgccccggtctcaccccatggactagttaatacagtgaagcaggttcctgtctataacccttcctgctcagaacataaaagattaaggactacaatcaagg

SEQ ID NO: 558994 - DNA, 610 bp, Homo sapiens
  misc_feature (183)..(183): n is a, c, g, or t
  misc_feature (320)..(320): n is a, c, g, or t
  misc_feature (438)..(438): n is a, c, g, or t
  misc_feature (490)..(490): n is a, c, g, or t
  misc_feature (532)..(532): n is a, c, g, or t
  misc_feature (546)..(546): n is a, c, g, or t
  misc_feature (589)..(589): n is a, c, g, or t
gcgagagatgtttacattcttcccattccaaatacatacaggccatgagttaacaatctgtcattttcctaaaacaccaacagatgagcttttttactttcatttgtaagttataatactcacaattaagtggatctaaataaagatatttaaggtatatatctataatatctatctatctanctagctatgtggattaaaggtcaatgctattgtctatgcattagccactcccatgtatgagaatggtctaaacttgttactatatatctcttaaatggtgtcaagtagccaaatttatttgctgaaaaacaagtgancatgcaacagtgaaaatgaaactgtgtacatacctcttatgcatactgcatacaccttaagctctctacatgcctgtcaagcacttatgcttacatatattgagatctcattacatanggacacactgctaaaatgaaggaaatgatggagtattttctagacaaatgtnatgaggctttgatggaatgacaatgtaaaaggataccaccanatacctatacttgnacttataaaatggatgatattctagatgggcataaaggggagnggtatcagctacgctgggttc

SEQ ID NO: 558995 - DNA, 81 bp, Homo sapiens
accgaggacacggccgtttattactgtacgagagcttttacgaagaattattggttgacctttgactactggggccaggga

SEQ ID NO: 558996 - DNA, 372 bp, Homo sapiens
ggtcgaccaccgagatattttctatacttctctgaggatagcttatgtttcacaattttaaaaaagaaaataggctgggcacagtggctcatgcctgtaatcccagcactttgggaggccaaggcaggcggatcacggggtcgggagttcgagaccagcctggccaacttggtgaagccctgtctctactaaaaatgcaaaaattggctggtcgtggtggcaggcgcctgtagtcccagctactcgggaggctgaggcgggagaatcgcttgaaaccacaaggcggaggttgcagtgaaccaaggttgtgccactgcactccagcctgggcaaaggagcgaaactccgtctcagaaaaaagaaaataggggc

SEQ ID NO: 558997 - DNA, 293 bp, Homo sapiens
ccgctacggacgcagctcagaaccaagcacggttttcagatcacacatgtagtataggcatctcgcccactctctccccacaatcacgatccccttccctttttaggtcttgttttccaaacggattctaggcgatagtttcccctctagccttggctcatttaaatggctcgaagacaccaatcaaaaatacattaaataattcattctcaccttagcagaggtgcatggattctgtctaccaaatattaatactacagggcccgccaggggttatttggttgttacaaaga

SEQ ID NO: 558998 - DNA, 320 bp, Homo sapiens
aagcagttatacagactcatcaacctatagaactggtagtgatctggagactcgagcatataaagacgttctgaattatcaatctccaacaacatgccagtattttaccagcaagagtagggtgcatgcgttgaataacgaggaaacagccgtacacccaaacatttgctttggctcttgagggaggggcagatcccaccatggaagcggtcaaaggttcctgaccttgtacattaacagcaggctgttgcattgtaacttgtggctgtccttaaagatgttgctgaggattgcgaagtcctgcagcatatttatactgt

SEQ ID NO: 558999 - DNA, 128 bp, Homo sapiens
ctccggggcccggttataggctgccaggtcagcaacgctagtcgccaccaggagttgaggcttctacccggaggaagtttccctggtagggtccagactaagggatttttattattttgaagagggga

SEQ ID NO: 559000 - DNA, 158 bp, Homo sapiens
tggaaaaaaacatatgttcaattaacatatgaagagctgctcagttttcatagtgatcagtgtatatgcaaaacatgatcagaatgtgatactattttacattcttctcgagtggcataaataaggaagcctaaaaaaatagtaaggggtgaagaaga

SEQ ID NO: 559001 - DNA, 819 bp, Homo sapiens
  misc_feature (327)..(327): n is a, c, g, or t
gaagacaatttggaaaacagcaattaaagcatctttaggtagggtgaaaaccccccgggaaactgtgcatccagattgaggagctcccacagccacttggcactgatggggtgctttctacactgcagatgaataccattgcctgcaggtctcttgggtgatgtccctacaaaagtgcctgttttgcatctattcttggtattatgtttagccaaagtttcactttccttatgtttctatttgctactggttatactgacactcagaagtcaaagaagagtaagtctgaaaactcccaactgtccaatttaatgaagacattacttnatcatcatcatcaccaagcatgtataaccgtccagtgccaggactggaaaaactggaagcaacccagccatctcagtgtgatttagaggaatgaaatgccattgtgccccctttcctgatgagaaaattgaggtagctaaatagaaaggggaagataaatgtcccacagcggatgtacttattcctgacttggcgcactctgtcgcttttccaaagtagtacccagtgaaaaagagatgatctgataaagttggcactgcacagggatatgagatgggaggtgaggcaggggagctgggatgggcgacagtcagtgatggtgatggtggtggtggttggtgatggtggtgacggtggcgcctggccggctcctctcccgtttctccatcacagcccgtcctctctgcctcctccgtccccgcgtggcctgcctgcgctgggccccgcgcgcccggcggcccgagacaaaggctgcgcggccgcggcgccgcc

SEQ ID NO: 559002 - DNA, 857 bp, Homo sapiens
  misc_feature (327)..(327): n is a, c, g, or t
gaagacaatttggaaaacagcaattaaagcatctttaggtagggtgaaaaccccccgggaaactgtgcatccagattgaggagctcccacagccacttggcactgatggggtgctttctacactgcagatgaataccattgcctgcaggtctcttgggtgatgtccctacaaaagtgcctgttttgcatctattcttggtattatgtttagccaaagtttcactttccttatgtttctatttgctactggttatactgacactcagaagtcaaagaagagtaagtctgaaaactcccaactgtccaatttaatgaagacattacttnatcatcatcatcaccaagcatgtataaccgtccagtgccaggactggaaaaactggaagcaacccagccatctcagtgtgatttagaggaatgaaatgccattgtgccccctttcctgatgagaaaattgaggtagctaaatagaaaggggaagataaatgtcccacagcggatgtacttattcctgacttggcgcactctgtcgcttttccaaagtagtacccagtgaaaaagagatgatctgataaagttggcactgcacagggatatgagatgggaggtgaggcaggggagctgggatgggcgacagtcagtgatggtgatggtggtggtggttggtgatggtggtgacggtggcgcctggccggctcctctcccgtttctccatcacagcccgtcctctctgcctcctccgtccccgcgtggcctctgcccagagaaacaggatttgcacccaagccgcacgtgcctgcgctgggccccgcgcgcccggcggcccgagacaaaggctgcgcggccgcggcgccgcc

SEQ ID NO: 559003 - DNA, 1194 bp, Homo sapiens
  misc_feature (295)..(295): n is a, c, g, or t
ggcactcgtgggtcgacccacgcgtcgggccacgcgtctgcgatggtctacagccgagtgacgggagaagggctcaaggcgtagtgttctcatgtgatgactcggagtgggagacagtaggctacaccagactggtggtagagtaccccagatgatctaagctactttgggaagtggaggcgaccgaatgatgttgcagagtctattgacagttgttcctgcaggattacattgcagtgaacggagaacgtatgcgcaatggtaccttgcctctactaggatgcaggggtcgggntagtgcacgcgaagcgtctttgcgaaatagctcgagggttccgcagtgtgtaggcagtcgcactgcaagcttaattgcatcccatggatagattgtcagcggggcggttagaaaccgggaaaagataggctcgatgagctgtgacgcatcgtcgaggccatgcgcttcggggatcatgactgcttgtctcaacaggccgaggaaccttctggtgggggtctcttgtgaatgaaaccggcgaattcgattctaaaacaagtgtggggtcacccccgcgtgagcggtaacgtcccaaccaagctgcaaatttggggggctgccgaccctgggtaacataggttggaaggaattgaacctggggccctgggttgggactgggttggttcgccacgcccccctggtagtcccggattggtggaaaagcgcctagtgacccaagtccttgggggcgtttggattgggtttggcaacccacgggggggggtttcttgtgtgaaagaggcattttggcgattttccgcgcggaaacttaatttgaggcgaagcgcgaattatgtcttggaagggtgtgccccgtggtgacaaagaatttggatggcgtatttaggttccaaatttggctctggtcgagaaggtggggctgcgctgctggagaaacgtgccgtaattggtcaatttgaaacgaaaacgaaaacggacccgaatgccgttgggaagggctggttgttggggccccacatgtatcacaaatgggcggcttgaatttgtttcacccaaatggctttggcgtttggccccaagattgacagacccctgtgttctgtggcccccttttgtggtggtggccaaggacctcccaaggtagagtatatcgacattataacgagaaatccacacaa

SEQ ID NO: 559004 - DNA, 445 bp, Homo sapiens
ccacagtttaagattcactttctaaccaatagggggaaaggcggagggtttaagagcttgttttttgtaagttttacttctcctaagaaggttcatgccctctggtgctgggcttcccaacagccctggggctctgtccctgtgtttgttctgaatggtcagccgtccctggggcccagtgaaaaagagatgatctgataaagttggcactgcacagggatatgagatgggaggtgaggcaggggagctgggatgggcgacagtcagtgatggtgatggtggtggtggttggtgatggtggtgacggtggcgcctggccggctcctctcccgtttctccatcacagcccgtcctctctgcctcctccgtccccgcgtggcctgcctgcgctgggccccgcgcgcccggcggcccgagacaaaggctgcgcggccgcggcgccgcc

SEQ ID NO: 559005 - DNA, 848 bp, Homo sapiens
caccatgaatggttctacccctctattaagaaataatgggaccataagcatctcgtttgcttatggctgtgtgtcactacttacaagagtcttgaaaataatacagaactttgccgttcttatttttaattgtcttccacaatgttgtgactgacttataaccctgttgcccctcagagaagagcgtatggctcagggatcatgtgttgactctggcattcagtggctttgtgaaggatcagaaatccattaacatgaagcctgacaaagactgatctcatgtcctttatacacgtagttgaatgccactttaagaatgttactcctcggtttgcttttgtctaattctaatggcttaaagccaagaaaaccatagtataaatctttttgtgtacctatgctagtgtttaaatggcagttcgtgtgataaagtatcagtcacttcaagttttctgtgaaagtttttaattaggttaaaaataatttggcatacgtctctacttcagtttataaagcagttccaaccatgcaaaaaaatctaacagcaaaggtatctttgacctgatgttacttgaatcttgaggacaaaaggtcattactttactaactgcaactccttgctttgtgggaaacaattttcttcttccccagaagagtttaccaggtgagtgttcaggtcctgacttaaccttaaattaagaggcaacttattccggcacatgaatattgctacccagcttattggcctggccgcgagcacaacaaggccctttgtgtgagcgtgcaacaggcgagagaaaaaggagaggattgcacacacctcggggacacatttggataccactctt

SEQ ID NO: 559006 - DNA, 111 bp, Homo sapiens
gggagagagcaaggtctccaacaaaggcctcccggtcctccatcgggaaaaccatcttcaaaggcaatgggcaggcccgcggagaccacaggagtacaccctagcgcccca

SEQ ID NO: 559007 - DNA, 504 bp, Homo sapiens
  misc_feature (144)..(144): n is a, c, g, or t
tctctggctcagtgatcctcaattgtggctccacccataccttgtcctcttgtctcatctagagtctgcaggcccactgggtcccacagccaaccatgcacgggacagcccgggcgactgggaggggatacgaaggtcttctgngccctctcatcccaggccagcgtccaccacaactcaaagacagcggggggactgcacccaccactcctcccgagaagcagtggttgcacatttccaacatagcgaggaggatcacttgagacccctggtagccaggtctgatgccgcctcatctgcccttccagtggtctgtgtcaagttagtcactccggtatcacccggccattttctgaaggcagcagtgggttcagggcagacagtgggaaggaagtcaagtggaggatgttcccagccaaggggatgagctggatcccgggcgcctggtcagcctggctcgcggcacccttcacagacaccactgatcggaaaacctggtgtgag

SEQ ID NO: 559008 - DNA, 212 bp, Homo sapiens
caggggggcgcgttagggcgcggacagggtcgccaagagatgggggtgggacgtagcggcgcacggggggaagagaggactcgtgatgcagcgggaaccccttctggttgaaacgccaggccgccatgtgccgcgagacgtccacccccgcgggaacgcacttaaccgcgcggtgtttccccgccgccaccaatggacgagacacgacacac

SEQ ID NO: 559009 - DNA, 287 bp, Homo sapiens
tctgcttcttgaaactctgaaagtgataaaggaagctgctgatcttgaagaaacactaagcttatttgagagatacatggccttgccctaggtgaatagtgtgtccagctctaacagatctcaagccccccacagggtcaaaccaggccagcccgatcaggagagcttctgtcccttctgccaggagtttctgggatactgggatccctcatgtacacgacagtatcccaaggagttgcagaggaagtagaacgcagatctggaggatccctagtctcgcttgtgcc

SEQ ID NO: 559010 - DNA, 881 bp, Homo sapiens
gaggagcaatcgtctgcgcgctgggcgagtgccgatttgacaagatcaaagtgaggataatggacagtgaggttcaacagatggtaggatcgttggatggattgatgatgcttggtgagagagacaaaggcagccttcatgagggatgtcccaataccactgaatagtgccttcctgaactgagagaagagcgaagggtggacctaagagataatcggtcgaagaaaggaaatgaagtggatagacttagcttacagtacctcgatgacaatgtgtcccaccgcattgtgaactgacgctcgggtccttgcttgtggctggattttctcaaagtacagcagatgagtgcatggtgtcgtcttcagtgctgccaatcattcaagaacgccttccgagtggatactatcaggtagtcaagaaatgtacagccatctaggtcgtggtagcaaagtgccatgcgatatggaatgagaaatgagatctctcagtcactggtgaatatcccgtctttacaactaaggagcttcattgagtagcttatatcgaacatgatcggtccaacatttgcctctactctgattgtgctgtgtgtccaagttaagaccttccaatacttatgtgtgtgctgtcacaacggtgatcgaacgttgagagggcacgcatgaacaaggagccccagactacgagaatcttacgcctcatactgcccgactgagagatcgaggtttaggggcaacgtcggagcaacccacccgggctggggcctaaaatccggttccactggcactcccaacatctccctcggccccaatcggggacgacgccgaaaattcacccccctccccccactcttctcctccacactctcccccccgcctccc

SEQ ID NO: 559011 - DNA, 256 bp, Homo sapiens
gggcgaggagttcatccgcaatgtcttccacctgtgtcatgcctttatttttcaggcaaagagaagtcccagctctgcgttctcctggttacagtatgagattgcaaaggtcatttggtgcctgcacactaaaaaacaaagaagagatttaaagtctcaaggggaagaactgcaaaaaactagccaaagaattctcctttaaggagcccagaaaaacttgcaacaacttttggcctgttggaagcagttatgcaca

SEQ ID NO: 559012 - DNA, 284 bp, Homo sapiens
ggtgcctgttctgtgtgaggggcagatgaagaatcacaagccacaaacaccccctcgagttgctgacacctgccctgtgcaagctgaaggtggcagacagggccaacggcagagatccttccgctccccagtcccctttcaggagcttggaaatgatacataaattatacttcaaaactcgaggtgtactgtcagagctcaaaagcaggaaagggagcagactctgaaaacagaagcgaggagtcacacagctaaacataataaaatgtgaatgttgaatcctc

SEQ ID NO: 559013 - DNA, 980 bp, Homo sapiens
ggccacccggaacaacaaagcaaggaagacggagtccgagcctcgggggctctagcaagggggcggggggggagtcccatggagactggggagcgcgccccgttcatcctcatccttgtcctccagttctccttcgatcggacgcaaccggagcagcgcctgcggccggggtccctcgagcccagcggtccccttcttcccccagggattgtgactctcccgggggtgggcaacacgctaaatttttaaaaacccaccccaattggtattcgcagcgaccggtggcgtggttggctttggggccccattcttattcacaacttggtacggccctggtggtttccacgacaacaaacggattggtcatttaacaacttttacgggggaacgcgatggcgtttgtcggaaggggacgcaaccttgttattttaaataaacgcggttgagtgggtgcgggacaaagtgctaatcaattggaaggtttaagaaaaaccctaaggaattaccaggtctaaccaagtgtgggttccctagaggaaacaatttttttgtggcctggggaggcgaacagcggtgaaggaagcgaaacggtcaaaatttgtgggtgggccaggacgggtctaaaaggccccggaaggtttcgtggcaagaaaccttaagagtttcccagggttaactactttaccacgcattccccaggcgggtgcgcaacaccggttcccctggccaagcgggtcgtagaccactggcccagttgagacaatcccggttgttggccagaaattcacaccaaaggacatattagaccctcattggcagagttatacgaaccgtggaactttcacattcctaagtggtggtggcgaaccgggataacattctctaaagaggctcaccattaacagagtttttccacacggaggttcaccagaacagcgcgcccaatggaacagctcggcgccctgggttgaaccgattcc

SEQ ID NO: 559014 - DNA, 669 bp, Homo sapiens
  misc_feature (61)..(61): n is a, c, g, or t
  misc_feature (171)..(171): n is a, c, g, or t
gacggcgaatgggcaatctaggggtggctggatgttgcttccagaggtgtcacacagatcnaattcatcacgttcggaaaatggtatgatgcagggaaacagaagtactttgcctcatcatcgaccttgtttgtgattgagttcatcttattccactatgtggagataagnagatggcaggacatcaagaacccaggaagtgttaaccaagaccctatcttcaagcaatatagcttgcctcctaatgaagttggttaccctggtggcatttttaaccctctcaactttgcacctactgctgaggccaaggagaaggagcttgctaatgggagattggcaatgttggcattcttaggattcattgtgcaacacaatgtgactggaaaggggccttttgataaccttctgcagcatctatcagacccatggcacaacaccattattcagacattcggtggtaactaagatccatctcaaaaactagaaggaaacactgcgttatagttcttttgtaacaatcatatcttttgtggactatgtgatattgagcttctggtaattattaaagggtttccaatgtacagagcaactgaagttggcactactattttttccaatctttagctttcatgttatcatatttttactgcttaattacttgcttagcaa

SEQ ID NO: 559015 - DNA, 360 bp, Homo sapiens
tttaaggatccccagactgtcgacaggttgggttctgtgatgatcgtgaaagagatgcccagtgcagactctggtccccgccagagtggcctccaagcaatgtcatccctgggctgaggacctggtggagcccattaagaagcacgaggtcccagcaaagtctgatgtttactgtgaggtgtgtgaattcctggtgaaggaggtgaccaatctgattgacaacaacaagactgagaaagaaatactcgacgcttttgacaaaatgtgctctaagctgccgaagtccctgtcggaagagtgccaggaggtggtggacacgtacggcagctccatcctgtccatcctgctggaggaggtcag

SEQ ID NO: 559016 - DNA, 932 bp, Homo sapiens
  misc_feature (105)..(105): n is a, c, g, or t
  misc_feature (149)..(150): n is a, c, g, or t
  misc_feature (217)..(217): n is a, c, g, or t
  misc_feature (233)..(233): n is a, c, g, or t
  misc_feature (237)..(238): n is a, c, g, or t
  misc_feature (254)..(254): n is a, c, g, or t
  misc_feature (295)..(295): n is a, c, g, or t
  misc_feature (299)..(300): n is a, c, g, or t
  misc_feature (311)..(311): n is a, c, g, or t
  misc_feature (333)..(333): n is a, c, g, or t
  misc_feature (358)..(358): n is a, c, g, or t
  misc_feature (392)..(392): n is a, c, g, or t
  misc_feature (406)..(406): n is a, c, g, or t
  misc_feature (410)..(410): n is a, c, g, or t
  misc_feature (420)..(420): n is a, c, g, or t
  misc_feature (426)..(426): n is a, c, g, or t
  misc_feature (447)..(447): n is a, c, g, or t
  misc_feature (460)..(461): n is a, c, g, or t
  misc_feature (465)..(465): n is a, c, g, or t
agcggggtgtgttgctgcctgagtgccggagacggtcctgctgctgccgcagtcctgccagctgtccgacgatgtcgtcccacctagtcgagccgccgccgcccntgcacaacaacaacaacaactgcgaggaaaatgagcagtctctnnccccgccggccggcctcaacagttcctgggtggagctacccatgaacagcagcaatggcaatgatantggcaatgggaaccantggnngggctggaacacgtancatcctcatcctccatccacaatggagacatggagaagatncttnnggatgcacaanatgaatcaggacagagtagttncagaggcagttctcactgtgacagnccttcgcaccaagaacgatgggacgatcatgtcngatgtggaaatgcnacancagcagggancatagntctcagtcagaagaagaagtngtagaaggagagnnggangtcgaggccttcgcacgcacaagctgcggactgggtatcacgactggctccagtcgacccgacaaacattccacgccaaggcagttccacttcaagacaccctaaacgttctgtgctctctcacgcatgaggaaaagtggcagccatgacgaacaggcgcgcctccactccgcagaattcctgacgctgtccaatcccatctctcttcctttcctcactgtcggcctcggggctagcatctcataacgcacagcgacttgaggacacccttgcagccccttctgaggggaaaggcaaccgcccctggacaatgcctgttgacctgtgaagcggcgctatggcacggcagcccgattacgaccttcacacccttggtcagcatgacccaacctcaaaccggtttacctattccatccagtaactatccacgtccacatgcactccaccctggcaggacttgatcaccg

SEQ ID NO: 559017 - DNA, 371 bp, Homo sapiens
ggcaggtactgtttttttaatcccccgaaggtgtcctgtaggagacaaaaattttttcctgtctgtatcccttggagtaaaaaggtagtggcatggggggagggggggttctttctcccaatctattatgatgtttattaaacccttttggaacaaaaaaggggggagtttttttgttactgaagttgcccttccccatggctattttaaaaggaaaaggacttggacggttctgtaaatcttgaaaaaaactgtttggagatttaaccccctctttgatggggggcccactttatggaaattgtaaaaacgttttttttataaaccgggcccgggattcaaaaaacatttttgcagcctttcttttttta

SEQ ID NO: 559018 - DNA, 439 bp, Homo sapiens
cggcacgagctcagcttctcaggaggctgaggcagaaggatcacttgagcccaggaggtggcggttgcagtgagccgtgattgtaccactgcactccagcctgggtgacagagcaagaccctgtctcaaaaacaacaacaacaaaaaacagcttcctctgctcagggtccgtccaaaagggcatctctgagaattacaggccactggcttttaacctgacatttcaaaactgtgccccacacccaaggggtttctgcagtcctctcaaaggatactgaattaggatttagggagaaggagagacccagctttgggagatttgatgtcagaactgtgttttctgtgtgttccagtgtgacaggaagtcccttcctggagcttatcctctcgcattcggggtgcctggcccagggagctccttgattcctaaattcctgct

SEQ ID NO: 559019 - DNA, 231 bp, Homo sapiens
ggttatctgttacaatcgaaggcagtgtggataacgccaaggctctgttcaaacctccagaggactcccaagatgacgagagtgactcagatgccgaggaggagcagactacgaagcgccggagacccacactagggggttacagttgagagcgacaacacgcaaggagcatgctgaagacggcacccactagtactgtcatagctcgaccctagaagtagcaaacgataa

SEQ ID NO: 559020 - DNA, 600 bp, Homo sapiens
  misc_feature (2)..(2): n is a, c, g, or t
  misc_feature (17)..(17): n is a, c, g, or t
  misc_feature (40)..(40): n is a, c, g, or t
  misc_feature (84)..(84): n is a, c, g, or t
  misc_feature (142)..(142): n is a, c, g, or t
  misc_feature (155)..(155): n is a, c, g, or t
cnccccatttgtgtggncccgggagccctccagggataancccccccggacacaaaaggtggagaagagccttgttccaccccncctagccagataaaccgcccctcaaaactgggttgggaccttacctaaagtaaaatgnaaaccctaatatntgttaatattattttcccaaaggtcctataataacacactcccttagtaacttatgtaatgttattttaaagaattggtgacctaaatacaaagtaattatgtccataaacccctgaacataatgttgtcttacatttgcagaatgtgaggaaattatcaggaaaggaggtgaaacatctgaaatgtatctcattcaacctgacagttctgtcaaaccgtatagagtatactgtgacatgaatacagaaaatggaggtaagctttcgacagttgttgacctgttgatctgtaattatttggataccgtaaaatgccaggaaacaaggccaggtgtggtggctcatacctgtaattccagcaccttgggaggccaaagtgggctgatagcttgagcctaggagtttgaaactagcctgggcaacataatgagaccctaactctaca

SEQ ID NO: 559021 - DNA, 844 bp, Homo sapiens
agcgtaggtggaagaggacgaagggcctatgcctatgagaaaaacgaaccgcatgcacttatctctcttctaataagatgacaccagatgataatccagatgtcctggacttcgagagatagaatctgtacatacggctgtggtcgctgtagaaccggagccatccatgatcaccaaaggaatgagaattccagcagcattagcggcacacgaatgtagctaaacacacagttctgaaacggacataggcactacctcgacggtgtcctggacactcccaagatgattctggtcatgcccgatgtagattcctactgggtgcagagaacgccgagaggccagcaacagagtgatgaccgcccataacatctccggagggaatgagcagacaagtagatcattgaagagaggtgagaaaggaaggaaatgaggctacgctagaattatccacttgtatgaaagcaaccgttccatagggagtcgaacaagactgagtccaaaaggtaggaattactggtccatgttgtctattggtacgaaaaaaatcgttccaatgctgaagcgaggcggacaccttgggaaagtaaactggaatgaaaggcatgacctcgcaacataatagatagaagagctatggcatagatagatgagaacgctataggtctacgagtgattggtggaccgagggaatatatctaaaccacagatggtagtcgtcgagagaatggagagactaacacacaaagctacctaggcacctgttagtaagaatgactgagttgttcacttctcttaaaggttgcagtaccgagaaaagcaggaaactttagcttctgcctacaag

SEQ ID NO: 559022 - DNA, 291 bp, Homo sapiens
  misc_feature (23)..(23): n is a, c, g, or t
aaaaaaaaaaaaagatataaatnacaataaataaataggtcaatacaaatgttagccaggcgtggtggcacatgcccatagtcgcagctactctggaggcagaggcaggaggatcacttgagcccatgaatttgaggcagcagtgagctatgattgtgccactgtactccagtctgggtgacagagtgagaccccatctctaaataaatagggtcaaacccttaaaaatatttaaattctttaaaaaaatttgaaaagattattcttcttcaaatttagtttgagctttct

SEQ ID NO: 559023 - DNA, 217 bp, Homo sapiens
  misc_feature (38)..(38): n is a, c, g, or t
  misc_feature (45)..(46): n is a, c, g, or t
  misc_feature (48)..(48): n is a, c, g, or t
  misc_feature (114)..(114): n is a, c, g, or t
  misc_feature (130)..(130): n is a, c, g, or t
  misc_feature (141)..(141): n is a, c, g, or t
  misc_feature (154)..(154): n is a, c, g, or t
  misc_feature (181)..(181): n is a, c, g, or t
  misc_feature (186)..(186): n is a, c, g, or t
  misc_feature (192)..(192): n is a, c, g, or t
acacccttctacgtctcatactgcgatatcataaccanacatatnnantctcattaaaatatatttaatataaatacagcagtttctgctgtgaaaactttacaatgcactgcntaactaaaaacttgtnttttttttttnggctcccttggtntaaagaaaacaaagtggcaatgattantgggncaaaantaagaaacctaccaaactttgggga

SEQ ID NO: 559024 - DNA, 737 bp, Homo sapiens
tatgtcatacagttcacccattcattaaagtatatagtttagtggtttctagcatattcacaaagttgtgtaaccatcaccagaaatcaattttagaatacatttagtcatctgaaaaagaaaccttgtgccgaggatggtggctgatacctgtaatcctagcactttgggagtctgaggtggacggatcacctgaggtcaggcgtttgagaccagtcctggtccaacatggcaaaaccccatctctactaaaaatacaaaaattagccaggagtggtggcacatgcctgtgatcccagctactcgagaggctgaggcaggagaatcgcttgaacccaggaagtggaagttgcagtgagctgagatcgtgccactgcacttcagcctgggcaacagagcaaggctccacctcaaaaaaaaataataataataattttaatgtgtgtcccatgttcttttgtacttttgttccttgtgtatttgggtgtcacgtgtacgaaatcttagtgaatgcaaggttatgaagatttacacgtatgtttgctttgaagaatttatagtttctctcttatcttagtcctccaattcaattcatttgttgacactgtctacctggagataccatcagattcgataggttaaggactcagtcccagaagaaagactggctccattttggatgctatgggagacctatactcttgatgaatcagtataatgggggattccataatccc

SEQ ID NO: 559025 - DNA, 80 bp, Homo sapiens
  misc_feature (16)..(16): n is a, c, g, or t
gatcaggcagtccttnaggatagacagatatacacaccacacacacacaccacatacaccacacacacacgtccccatcc

SEQ ID NO: 559026 - DNA, 327 bp, Homo sapiens
  misc_feature (35)..(35): n is a, c, g, or t
  misc_feature (81)..(81): n is a, c, g, or t
  misc_feature (209)..(210): n is a, c, g, or t
gctcgacggggatttcgatctggcggaggaggccntgcacgaagccttctttatcgccatcgaacgctggcaggcgatggntgccggccaatccccgggcctggctggtctccaccgggcgtttcaaggccatcgacgtgttgcgccgccgcggcttttgccgcatcccaggggcagttgatcgcccaggccgaagcgttggagcaganngatggaatgacgaggatgtcgaggacgatcgcctgcggtgatctttacctgctgtcacccggcgttgtcggcggatccaggtgccgctgacattgcgcgaggtctgcgactggtcga

SEQ ID NO: 559027 - DNA, 371 bp, Homo sapiens
caatgaaaaaaccagagacataaaaatccctccgttactagctgaacaaaaatgtcgcggtgtgtacttggcgctatgataatcgctgaaatgaatgtggaaccagccctgtatgtatatcaggtagctcttatcaggcgaggtttatacttaccaatatgctgcctaacgtatgcattcaggcatggtcatatggcctatcaagcacacccgtggttgttgcaacttggtagagcggaaaaagaaagatcccgcggttatcgatgtactagatttgggtatgatctcaagacagttctagtttcaccttacacggaatactcaggaagagggtatgaatgcaagagtgaattacctgtccatcagttaga

SEQ ID NO: 559028 - DNA, 377 bp, Homo sapiens
ccgtgtctagaggatccctatatggtctcagatggctatggtatagaaaggacagcactctagatggatgagagggcaggcagatagatacgactaggtcatctcttcagtctacggttatagctagacttaatattgagaattatgtgctgtatctattatttcattttcttcttacttaaaaaagaaatcacagaaaacaccaaataatttagttatactatttcctcagatagtcttagaaaggtttctttgaaatgcatctgtagtggctactagggactcaatgaatattcatccaatgaacagatgaactaagcccaataaaatcaacaaaacatctcctaagaaattgttgatcgtgtgcaactgtttga

SEQ ID NO: 559029 - DNA, 364 bp, Homo sapiens
ggaagacacgtctgtgacttggtgcgtctgtgtaggccagcagcctctgatctgtagcaggatattaacgtgtcagagctgagatgttctgggatatctctagaggctggcaagcaccagttgttatgtcttgcgaatctgtcagggttggaaagtccaagccgtcggacccagcttcctttcttaactgatgtctttggcctgaacaccgtgggctgttccttgctttgagttaggaagcggtttgcatttcacgcctgtaactgtattcattcttaatttatgtaaggtttttatagtacgcaatactcgattctttgacgagatgacaacaaatttaggttttctactgttatgtgagaac

SEQ ID NO: 559030 - DNA, 211 bp, Homo sapiens
ccggcagtctggggctggctgtggttccaccacgcttcgctttctggtggaccgagagcgtgcggtcacctccgtactgggagcgtatgtgttcccagtaatcagccaggaccatgaaggtcggttagatttggacagtattgcgtgggatgacattcatgtggtccccggagccctgaagctttttctccgggagccaccccagctgcgg

SEQ ID NO: 559031 - DNA, 1587 bp, Homo sapiens
  misc_feature (971)..(971): n is a, c, g, or t
  misc_feature (973)..(973): n is a, c, g, or t
gctttcggcgggcctcgcggatggcggcgcagggcggtagggcctgggccggggtcggcggcgcccccggggctgggaggcggcccggcagaaagctggcgctgcaggcggcagagaacggtgctgagcacccgaaggagatggagctggtacgagctgggctcaggccggcgggcacggcgggtaatcgaaccccgaaggtggttacaaaggaatccctgtggggtggcgaccttggcgtggaaagcctggaaccggtgggaccccacacttcggccggtcctcccgaaggaatgcttcaaagttcccactggttgttgcccgggggccacgaagcggcataaggcagaagcaaggaaagccccacaaggggaaacccccttgcgcggagccacggtagctccttcgtgggcccacaacggttccggaaggccggttgcccccggaaggaaacccccggaaggtgggaacagacaggaaccaacaagggcacaggacggcttgggcccattccgggggcggcgaaggctaatctgggggcccccattgggggcgcggggaaaaccgcggcacagcgcaaaaacacaaacagcagaaaggggagacattccacaagcgcccacagtagacgggatggtgcgcccaaacggggccgagaggcgccacaaaggggcgggcttaacacccaagggcggtcttgtgccccccaacagggggggggcggggcacaggggcgccccttggcggggcaaccagaacaggacgccttataacgcgggccaagggtgggcacacacgagccacacactctttaacggggagaacttgggcgcggcgcccaagtgacaagcaacttttggtcgtcaccaccacatttccgatggtgtgggtcaccccccacatagcgccaacaagaaggcgcggcatgaccaatgttggtttaaaccccgtttcccctgtacacacagggntntcgagaactaaatatttaaaaacacgccctttttcgcccctgggcagcgaacgttccagtactcattcacaacacaccgaacgccacgaacacacaaacaacacaccacacacaacacaacacacagtgtagtcgctgacggacgcacgcacaaggaggcgccaccaacctcagaagcaaaaacacgcgtctccgtacacgaccaaccacaagccgagacgatggaaggagcacagcgcgacaggcgaaccccacaaaaggtagcggataacgagtagccgcacccagcggcggcgagtcaccaaacaagcgaggtcgttacctcaaacaggagaagccaaacaacaccaggtgcgagacatgatagagaccaaaagggtggcacgatgttgaggaactattccgacacccaacagactaaacaaacaaccgccgcgggggggcaacacaccacggagacgccgtcgttgctagagaacacaaaaccgcacgaccaggcggacgcgctgtgcggcacacaccaacgcgaggggcatatcacaaaacagggacagccacccagcaggcaacgcgcgattacacgaagacgcaaccgacgcagcagaagacggagg

SEQ ID NO: 559032 - DNA, 106 bp, Homo sapiens
gcttgccctgtggactgctcctccaggagactgctgattttggcattctttttcctttcatcatatctcttctagaatttttattagatacgtttattgtttaaaa

SEQ ID NO: 559033 - DNA, 117 bp, Homo sapiens
ggtggactctgaggatcccctcggacgtgtatcgtcagacaggccttgcaaacagagttttggatggctggcttctggcattaggtgatcccctgggtcggataacacgttcgcgag

SEQ ID NO: 559034 - DNA, 174 bp, Homo sapiens
cacagtgtgctgcggtgatctcagcaggcatccccatgcatttagcgggcacatgcaaggcaagccttgcttctgtcttcctccatggtcatttccctcccagggccaggcgctccaatcttccccagccgggggggtcacgcagctcgcaattcgtcaatccatggtccatca

SEQ ID NO: 559035 - DNA, 195 bp, Homo sapiens
gcatggctgtatcctagaggaccccggtcatcctgctacaccgacataaacagaaacatatacttcaaggttatcaggcctttttttctgtgtgtgtgtgtgtgtgtgtgtgtgtggtagggtggggggcatcctaatagtagaagaaccctccataaacctggagtgactatatggatgccccccatccatgcc

SEQ ID NO: 559036 - DNA, 283 bp, Homo sapiens
tggtaacgccaccactttttgtgcaagcttgctcgtgctgggcatctaaacaacccctgtcagaaaaaaggaaaaaagttgacaggagtagaaaggagacaaaactattttacgcatgtgagttcccgcacagatacaaaacacacaccaacaaaaagtctctggagcgtgatttcaacaagtatctgaaacagggaaaagccaggaagatctccggttccacgtccaatttgtacgtccagcgcccttgattgtcgggcctgagacaacgtgatcaggcctt

SEQ ID NO: 559037 - DNA, 1525 bp, Homo sapiens
gaaccctgggaagggatgggagccctgtgactgtgaccggtctgtgggacgtctgcacgactacgacaagcacttaccattctgtttaaacgacactctacctactaccttcgggttgggcagccacttccactgacggctgacttattccgtgaaaccacctacaagacgacacactgtcctttatggtgctaccagcgttctgcgctaagcactgaccgttctaacactgcacacgacttactgactcgacggtcacacactcgtcgatacgtggcggtctaaattcaacacgactacacggtctattacggtacaccactccaacaacgacttacgcgtagaccgcgctctcactaggcacacacgactagacttatccatgggctttacaccacaaacggtactttcaccgtcacacggaacactactacactactggtcgactcacgcgctttctcacaacgcaattttaccaacgtgcctgccacacggcttcaacggtggaaaaccacgccattgttcatcacggtcaacactcgggatggacacaatcgctagggagacacgcccctttgcgcaccctggcccactctcgtgggtctacgtcgggaccaccacttgggtgcaacacactgcaccatcgtcccaggacacggggcccttcaatccaccgcaacacgcattccacgtggggaagaaggctaacagccttcaccgatcattacgtcggatggataaccagttgggttaggaaacggccaggcacttcaggcgacagaccaaattacaggcaacaccaacttaggggttaacaggttcgtacagttcattgggggctataattagttctcacgaacactgtgcttgggacactttggactactcttcaacgggacacactacagccacagaggagttctactttccgttatctcacatttgttcaattcctctcgtatctctacgctctctatggcactctttcctattgactataggacgttggggatctctcgctagaaaggggcacacgcggtcgttccacatctataaggcagagggggcacagacaaacattatggtagtccagattagagcagtagtaacagtcgttggtggtcaagctgccaagctccaaccaactggtgtaagatcatcacctatacacacgagtagtctactgtgagcacgtaagccatctggggcagcactgcttccagcaacaaccactgggtgagtgtgtaggtcaggagcaagactaacagaccgtcctagtccccagagagacaatcagcacgcagtatgaggacagagtccctgtggtgacgaacactctcgtcctcctacaaacaagacagactgaagagcagtccacatagtagtgagccacgccacgacaccagagtagatgatagtgtgtagtccaacaaggtcgtagtggcatgctgactatcatctcggtgctctgctttgtgctctcgttacaaacaacgatagcgaaggacagcgagacgcagcacgg

SEQ ID NO: 559038 - DNA, 112 bp, Homo sapiens
cccgcaactgattgcagcaggccagtggaaatgtacacagaaggccctgaagctgatggggtcaacatgaaggtgacattcaaggctgaaggcaaatagccccattccacct

SEQ ID NO: 559039 - DNA, 89 bp, Homo sapiens
attaaagtgtgttatactataatatttatttattttaggttgcaatacaagaacatgaaataaataaatattaaagtgtgttatactat

SEQ ID NO: 559040 - DNA, 184 bp, Homo sapiens
gaactgcgagtccattaaacctcttctttctctataaattacccactctcaggtatgtttttatcaacaaagggaaggccgactattacactataactcaatgccttcctaattctacccacagaacatggatcggtctggggaaggccaactccattcatgaaaaactttggaagccctttca

SEQ ID NO: 559041 - DNA, 407 bp, Homo sapiens
ggcgcagctgaggtagcggtcgtagatgatcaccgagcgagcgtcgtccagcggcggctgctgtagggatggcgctgagcaactcgacgacgttaaggcggcaatcacctcatcgcgatcaggctgaaggttgtcccagctattggctgcgaacgtattggtcgacatcgacgcgaggccgagaccaatgaaaaaagcgagggcggtgctggggaacagatgcttcatgctgattcgacgcgggggcaattgataacgcatattaggccgtctttgagggagccggttccatatggtccggtcgcataatgcaaaaagcccggcgctacagcaccgggctcagtccagactcactatggaggcactgtgaaagcattgcaaggcgttgacggtgcggattaggccat

SEQ ID NO: 559042 - DNA, 452 bp, Homo sapiens
cattttttgattataaaaattgtgtgtattttacaatcagtggcatcatagagttgtcattggccattttttcacattttttatctgaagttgggggtgtaccttagtgttgactgtagatttgataaaaagtgaggttgttttttgttataaaaaccaaggccacttctttcttaggctagtctttcctgacctttctcttcccagcctcctaattgaattgagtgtccattcatctctgcatccacagcaatgcgcattctctgagatagcccttgtgttggtgaggcagcgtagcatgttggttctggaaccagaccacttgtgttttaattttggctccaacatttactatttgtgtgaccttggatgattaatgtaacttctgtatgcctcggtttccttctgtttaacagtgggataataaatagtatctacctcaaaaaaaaaaa

SEQ ID NO: 559043 - DNA, 100 bp, Homo sapiens
agcgaggagggctggttcctgagcttcgcaattcctgtgtcgcgcttctggagctcccagcctgccgtggtcgctatgatccctccggccggagctggtt

SEQ ID NO: 559044 - DNA, 147 bp, Homo sapiens
cggcctctgcttgaggcaagccccctgtaggcagctctggcctgtagatagcctacccctgccagcaagtgctgcagcaagccacaggtggacatgctggaagcactgtggcctaagacccatgcttggacacagtacgcagtcgta

SEQ ID NO: 559045 - DNA, 388 bp, Homo sapiens
gtatggtaagggagcctactatgtgtgtagaataggaagtatgtgcctgcgtttcaggcgttctggcataggttgcctacatcgggtgatgattgccattgtggggattagtgtggtttcgaagaacatttaacatattattatgtctctgtggctgttaatcttcatatacttcaccgagcatttgttgcggagattagctatagagaggctagagcttttttttcgtgattgtggtaccctggataattctcgttgtcttgccatgattcgctgaggggtaggacgtcaggtagttagtatatagcgaggggggttgttcgggggtcggaggaaaaggttgccgaacagctaaataggttgttgttgacgcaatgagtacagatta

SEQ ID NO: 559046 - DNA, 441 bp, Homo sapiens
  misc_feature (122)..(122): n is a, c, g, or t
ggccaaacaggcctgggcacagttcgggtgatcgtcatggaccgctcgacggacatcgtgaaagccatcgcccgcctcattgagttttataagcacgaaagctgtggccagtgtaccccatnccgtgagggtgtggactggatgaacaaggttatggcccgttttgtaaggggggatgcccggccggccgagattgactccctgtgggagatcagcaagcaaataaaaggccatacgatttgtgttttgggtgacggggccgcctggcctgtgcagggtttgatccccccctttcggccggagctcaaggagcggatgcaacggtttgcccaacagcatcaggcccggcaggttgccttttagcccccccccctggcctgttgtcctgggtttatccatgtggaatgttggccaataaagggagtgttgccccccctccca

SEQ ID NO: 559047 - DNA, 162 bp, Homo sapiens
aggggcttcgagttgccctcatttacataaatatatactagcatatacactctcacttctaggcatactagtatatcgctcacacctgcatatcctccctactatgcgctagaaggaatactactatcgctgttcattatagcaactcgacagccccaagcg

SEQ ID NO: 559048 - DNA, 2113 bp, Homo sapiens
  misc_feature (1062)..(1062): n is a, c, g, or t
cggacgcgtggcgccagagtggcagttgtgcagcacgcgccctctgagtccgtggacaatgccagcatgccacctgtgaaggtggaattctccctgactgatatggctccaaggagaagctggtggacttcctcagcaggggaatgacacagttgcagggaaccagggccttaggcagtgccattgaatacaccatagagaatgtctttgaaagtgccccaaacccacgggacctgaaaattgtggtcctgatgctgacgggcgaggtgccggagcagcagctggaggaggcccagagagtcatcctgcaggccaaatgcaagggctacttcttcgtggtcctgggcattggcaggaaggtgaacatcaaggaggtatacaccttcgccagtgagccaaacgacgtcttcttcaaattagtggacaagtccaccgagctcaacgaggagcctttgatgcgcttcgggaggctgttgccatccttcgtcagcagtgaaaatgctttttacttgtccccagatatcaggaaacagtgtgattggttccaaggggaccaacccacaaagaaccttgtgaagtttggtcacaaacaagtaaatgttccgaataacgttacttcaagtcctacatccaacccagtgacgacaacgaagccggtgactacgacgaagccggtgaccaccacaacaaagcctgtaaccaccacaacaaagcctgtgactattataaatcagccatctgtgaagccagccgctgcaaagccggcccctgcgaaacctgtggctgccaagcctgtggccacaaagatggccactgttagacccccagtggcggtgaagccagcaacggcagcgaagcctgtagcagcaaagccagcagctgtaagaccccccgctgctgctgctgcaaaaccagtggcgaccaagcctgaggtccctaggccacaggcagccaaaccagctgccaccaagccagccaccactaagcccatggttaagatgtcccgtgaagtccaggtgtttgagataacagagaacagcgccaaactccactgggagaggnctgagccccccggtccttatttttatgacctcaccgtcacctcagcccatgatcagtccctggttctgaagcagaacctcacggtcacggaccgcgtcattggaggcctgctcgctgggcagacataccatgtggctgtggtctgctacctgaggtctcaggtcagagccacctaccacggaagtttcagtacaaagaaatctcagcccccacctccacagccagcaaggtcagcttctagttcaaccatcaatctaatggtgagcacagaaccattggctctcactgaaacagatatatgcaagttgccgaaagacgaaggaacttgcagggatttcatattaaaatggtactatgatccaaacaccaaaagctgtgcaagattctggtatggaggttgtggtggaaacgaaaacaaatttggatcacagaaagaatgtgaaaaggtttgcgctcctgtgctcgccaaacccggagtcatcagtgtgatgggaacctaagcgtgggtggccaacatcatatacctcttgaagaagaaggagtcagccatcgccaacttgtctctgtagaagctccgggtgtagattcccttgcactgtatcatttcatgctttgatttacactcgaactcgggagggaacatcctgctgcatgacctatcagtatggtgctaatgtgtctgtggaccctcgctctctgtctccaggcagttctctcgaatactttgaatgttgtgtaacagttagccactgctggtgtttatgtgaacattcctatcaatccaaattccctctggagtttcatgttatgcctgttgcaggcaaatgtaaagtctagaaaataatgcaaatgtcacggctactctatatacttttgcttggttcattttttttcccttttagttaagcatgactttagatgggaagcctgtgtatcgtggagaaacaagagaccaactttttcattccctgcccccaatttcccagactagatttcaagctaattttctttttctgaagcctctaacctttacacggtgtaccgagctcga

SEQ ID NO: 559049 - DNA, 671 bp, Homo sapiens
ctcgaattcgacggtgtctccctcatttatgaaagacactttgctggataaagtattgttggttggcagttgttctcttgaggtgctaatgtgtctgtggaccctcgctctctgtctccaggcagttctctcgaatactttgaatgttgtgtaacagttagccactgctggtgtttatgtgaacattcctatcaatccaaattccctctggagtttcatgttatgcctgttgcaggcaaatgtaaagtctagaaaataatgcaaatgtcacggctactctatatacttttgcttggttcattttttttcccttttagttaagcatgactttagatgggaagcctgtgtatcgtggagaaacaagagaccaactttttcattccctgcccccaatttcccagactagatttcaagctaattttctttttctgaagcctctaacaaatgatctagttcagaaggaagcaaaatcccttaatctatgtgcaccgttgggaccaatgccttaattaaagaatttaaaaaagttgtaatagagaatatttttggcattcctctaatgttgtgtgttttttttttttgtgtgctggagggaggggatttaattttaattttaaaatgtttaggaaatttatacaaagaaactttttaataaagtatattgaaagttt

SEQ ID NO: 559050 - DNA, 122 bp, Homo sapiens
  misc_feature (25)..(25): n is a, c, g, or t
  misc_feature (34)..(34): n is a, c, g, or t
agatctgttagcttttatgtatttnatgttattnttaagatggataaatgggtctgaatttagtcactactttttgatagccagggctttttttttttagaacatcctgatctttatagatg

SEQ ID NO: 559051 - DNA, 1842 bp, Homo sapiens
  misc_feature (1062)..(1062): n is a, c, g, or t
cggacgcgtggcgccagagtggcagttgtgcagcacgcgccctctgagtccgtggacaatgccagcatgccacctgtgaaggtggaattctccctgactgatatggctccaaggagaagctggtggacttcctcagcaggggaatgacacagttgcagggaaccagggccttaggcagtgccattgaatacaccatagagaatgtctttgaaagtgccccaaacccacgggacctgaaaattgtggtcctgatgctgacgggcgaggtgccggagcagcagctggaggaggcccagagagtcatcctgcaggccaaatgcaagggctacttcttcgtggtcctgggcattggcaggaaggtgaacatcaaggaggtatacaccttcgccagtgagccaaacgacgtcttcttcaaattagtggacaagtccaccgagctcaacgaggagcctttgatgcgcttcgggaggctgttgccatccttcgtcagcagtgaaaatgctttttacttgtccccagatatcaggaaacagtgtgattggttccaaggggaccaacccacaaagaaccttgtgaagtttggtcacaaacaagtaaatgttccgaataacgttacttcaagtcctacatccaacccagtgacgacaacgaagccggtgactacgacgaagccggtgaccaccacaacaaagcctgtaaccaccacaacaaagcctgtgactattataaatcagccatctgtgaagccagccgctgcaaagccggcccctgcgaaacctgtggctgccaagcctgtggccacaaagatggccactgttagacccccagtggcggtgaagccagcaacggcagcgaagcctgtagcagcaaagccagcagctgtaagaccccccgctgctgctgctgcaaaaccagtggcgaccaagcctgaggtccctaggccacaggcagccaaaccagctgccaccaagccagccaccactaagcccatggttaagatgtcccgtgaagtccaggtgtttgagataacagagaacagcgccaaactccactgggagaggnctgagccccccggtccttatttttatgacctcaccgtcacctcagcccatgatcagtccctggttctgaagcagaacctcacggtcacggaccgcgtcattggaggcctgctcgctgggcagacataccatgtggctgtggtctgctacctgaggtctcaggtcagagccacctaccacggaagtttcagtacaaagaaatctcagcccccacctccacagccagcaaggtcagcttctagttcaaccatcaatctaatggtgagcacagaaccattggctctcactgaaacagatatatgcaagttgccgaaagacgaaggaacttgcagggatttcatattaaaatggtactatgatccaaacaccaaaagctgtgcaagattctggtatggaggttgtggtggaaacgaaaacaaatttggatcacagaaagaatgtgaaaaggtttgcgctcctgtgctcgccaaacccggagtcatcagtgtgatgggaacctaagcgtgggtggccaacatcatatacctcttgaagaagaaggagtcagccatcgccaacttgtctctgtagaagctccgggtgtagattcccttgcactgtatcatttcatgctttgatttacactcgaactcgggagggaacatcctgctgcatgacctatcagtatggtgctaatgtgtctgtggaccctcgctctctgtctccaggcagttctctcgaatactttgaatgttgtgtaacagttagccactgctggctgatgaattcgggtaccgagctc

SEQ ID NO: 559052 - DNA, 156 bp, Homo sapiens
tcgattctataggatccccagtctgccgctgaggtcgaactgaaatgtcctgtacagagctcagtttgtcttttaatgagtacgttgcaaaatctccagtctcatgatcccactactctataattgattgcatccttctgaagcagagaccattat

SEQ ID NO: 559053 - DNA, 404 bp, Homo sapiens
  misc_feature (208)..(208): n is a, c, g, or t
gcaggcgcctactactactactaaattcgcggccggcgtcgacccaaccctgaagactataagaaggctgaagagaaactcctgaaagtgcgtcctttcgtgacctacttccattcttccaagtacatctcggacctggccaacggaatatctgcgtggcggccggcttctccggtgatgtgttccaggccaaggctcgtgcggcganggcgggtaagggcgtgaacatcgcctacgtgattccgaaagaaggcggcaacctgtggttcgacgtactggccatccccaaggatgcgaccaacgtcaaagaggccctcgccttcatcaactatttgctgaaacctgaggtgatcgctcaggtcagtgattacgtcggttacgccaaccctaacccaggggcggac

SEQ ID NO: 559054 - DNA, 493 bp, Homo sapiens
  misc_feature (3)..(3): n is a, c, g, or t
tgnaaagaagactgggcaaggtggctcatgcttgtaatgccagcactttgggaggcttaggtaagagcacttgaccactgggagttcaaccaacagcctgggaaacatagcaagaccttatctctaccaaaaattttttaaaacttaaccaggcagggtggcatgtgcctgtagtcctagctaatcagaaggctgatgcgggaagattgcttgagctcaggagttccaggctgcagtgagctatgatcacgccactgttttccagcctgagcaacaaacagtgagaccctgtttctaccaaaaataaaataaaataaataaaataaaataaaataaaataaaataaaaataattgtaacaatcattcattaaatggaaaaataaggagaaaaaaactaaaaattttaagtctcaataatgggagtacagctaaatttataagaaaatggcttcctaactttcataatccattcttcttttaagccaactacat

SEQ ID NO: 559055 - DNA, 435 bp, Homo sapiens
  misc_feature (178)..(178): n is a, c, g, or t
  misc_feature (422)..(422): n is a, c, g, or t
  misc_feature (428)..(428): n is a, c, g, or t
ttatggcccggtgcacaaacacctgacggcaggtatcacttacccgaagaaggtaaagccctcaagaggcagtaactcagccaacctctcctccggccactccggcagacgcgtcaggacgtccgtcagccaagcatgtggctccagactgcggttcccagaaggctcattatctgtnccgcgcggttcccggccaccagtgaaccagcgaacaaccaggcctttcgtcccataacgaccggacggatagcacgctcgcagatattgttgtgtgtgccttgaaatgcacgatctttccgtcggtgaaagtccgccccggctaactctcgctccgactggaaggacaagaagcggtccaggaggtaacaaaagggctgaatctctccctgaaacgacttcttcaggaagtcaacgggttatgngggccntaacgtg

SEQ ID NO: 559056 - DNA, 1006 bp, Homo sapiens
gggtcgtctcccgtgcagtgcagctgcctgctacctgaccgccctctgcccgccggccctgtctgtctacccccagcatgagctggcctgcgctgtctacatgcacgtctgtgtcaccggctccctgcgaaatcaagtcccagcagagcgaggtgacccgaatccttggatgggaagcgcatccaataccagctagtggacatctcccaggacaacgccctgagggatgagatgcgagccttggacatggcaaccccaatggacaacgccaccccagaattgtcaactgtgggacacagtactgtgagggactatgagactcttcgtggaggctgtggaacaaaacgacgctgcaggagtacctgaaagctggcttgagatcaagcctgtaccagagttacccctgctggaccgtccatcacgcagaagaccaccgccagaccttcacctggagcatgagcgggacctgttgagccaacgtcgctgatcattcctaaagctaaagcttagagatccctaccacccaatgcaaggggcacaacgtacgacgcagtaccaccacaagtcaaacgaaaaacggtagagtaccccacatacgaccgaacccaatcgtaagagagacaagaaaaccagaagcaccgaaaaagtacagcaggaaagagtgggcgagaaggcgaaggagcgcaaaagtgcaggagagagacacgcagagcgaagagaaaagaagagccgacagccgaggccctgggaaagaggagatgaggggacaaacaaagaggcgggcaacaacaaggccagacaggacgaccaaaagggaccgaaataggacaccacggaaggcacggagcgggggaaagaaaaaggaagggacgggaaccacgaaagggcacaagaaagaagagaggagaaaaagagaggaaggcggagagagccggcggagagaaaaagcgaaaaagcagggggggaggcaacgagagcagaaaggaagaagaaaaagggagaaaag

SEQ ID NO: 559057 - DNA, 630 bp, Homo sapiens
tcggactcacacgcacttggctccaaagtgcgggattactggctgtgagacacgcacctggtcagatggactttttttgagcatttagttccaagcaccttccctgcactttctcagttaatcctcccagtgtttatgtgaacattcctatcaatccaaattccctctggagtttcatgttatgcctgttgcaggcaaatgtaaagtctagaaaataatgcaaatgtcacggctactctatatacttttgcttggttcattttttttcccttttagttaagcatgactttagatgggaagcctgtgtatcgtggagaaacaagagaccaactttttcattccctgcccccaatttcccagactagatttcaagctaattttctttttctgaagcctctaacaaatgatctagttcagaaggaagcaaaatcccttaatctatgtgcaccgttgggaccaatgccttaattaaagaatttaaaaaagttgtaatagagaatatttttggcattcctctaatgttgtgtgttttttttttttgtgtgctggagggaggggatttaattttaattttaaaatgtttaggaaatttatacaaagaaactttttaataaagtatattgaaagttt

SEQ ID NO: 559058 - DNA, 375 bp, Homo sapiens
agtcctcttacacggcttctatgatgtatatcgtgtgacgcggtggctgcacgaaacgaccacctgggttatatagctagttaactttcgtttaagctaaaggttatcactgtctgtttcccgtgggggttgtgggctaagtaacctttaaatggctgtacgaaataaaagtctttccaaagggcaaagtgatatgccaggagctgaaaagaatcaactgcaaagaaaacctcatttctattttcaattgctgtttctgttgacaacaacaagatagttttttatttatttactgcctcagatacaacagcacaaccaagtgtattattgatactttcgcatgtctttaacaagaaagaaataatctcctcattc

SEQ ID NO: 559059 - DNA, 310 bp, Homo sapiens
cggatcctttgtcggatacgcctgatctggcgtcgccagctgccaatgcggctgccggcgctgccggagtgtgcctaccttcatcgagcatgtcattgccgacttcacctggcggctcctgggccggcatgatcgcgccggccggcacgccagccgatatcgtgcagcgcctggccgtcgtgttggaccgcatcgtgcgcagcgacgaggagcgccagcggctcgaagcgatgggtacggtgccggtgggcggatcggctcaggccttcaacgagttcatcgcggccgagacgagaaagtggggcgaggt

SEQ ID NO: 559060 - DNA, 1830 bp, Homo sapiens
  misc_feature (1062)..(1062): n is a, c, g, or t
  misc_feature (1588)..(1588): n is a, c, g, or t
  misc_feature (1605)..(1605): n is a, c, g, or t
cggacgcgtggcgccagagtggcagttgtgcagcacgcgccctctgagtccgtggacaatgccagcatgccacctgtgaaggtggaattctccctgactgatatggctccaaggagaagctggtggacttcctcagcaggggaatgacacagttgcagggaaccagggccttaggcagtgccattgaatacaccatagagaatgtctttgaaagtgccccaaacccacgggacctgaaaattgtggtcctgatgctgacgggcgaggtgccggagcagcagctggaggaggcccagagagtcatcctgcaggccaaatgcaagggctacttcttcgtggtcctgggcattggcaggaaggtgaacatcaaggaggtatacaccttcgccagtgagccaaacgacgtcttcttcaaattagtggacaagtccaccgagctcaacgaggagcctttgatgcgcttcgggaggctgttgccatccttcgtcagcagtgaaaatgctttttacttgtccccagatatcaggaaacagtgtgattggttccaaggggaccaacccacaaagaaccttgtgaagtttggtcacaaacaagtaaatgttccgaataacgttacttcaagtcctacatccaacccagtgacgacaacgaagccggtgactacgacgaagccggtgaccaccacaacaaagcctgtaaccaccacaacaaagcctgtgactattataaatcagccatctgtgaagccagccgctgcaaagccggcccctgcgaaacctgtggctgccaagcctgtggccacaaagatggccactgttagacccccagtggcggtgaagccagcaacggcagcgaagcctgtagcagcaaagccagcagctgtaagaccccccgctgctgctgctgcaaaaccagtggcgaccaagcctgaggtccctaggccacaggcagccaaaccagctgccaccaagccagccaccactaagcccatggttaagatgtcccgtgaagtccaggtgtttgagataacagagaacagcgccaaactccactgggagaggnctgagccccccggtccttatttttatgacctcaccgtcacctcagcccatgatcagtccctggttctgaagcagaacctcacggtcacggaccgcgtcattggaggcctgctcgctgggcagacataccatgtggctgtggtctgctacctgaggtctcaggtcagagccacctaccacggaagtttcagtacaaagaaatctcagcccccacctccacagccagcaaggtcagcttctagttcaaccatcaatctaatggtgagcacagaaccattggctctcactgaaacaggtgagttgtgaaactattaggtccattaatggcactaagaaaatacccatcttgatttcaatttaacttcctgggttctaagtcttagcccaggcatgacttctatgggggaaaaggtccacgtcagctctgtgcagcccaacatcatcttattctgcataatcccaggtgtaaatggagtcttactttacctgtgatcagactcagtgaaaatttgatgggaggtgctttnggggctatcactagaantcacgtatccattagacatttctcctgtgcctcatactgggactcgagttgatttgtggtctgtgatgctgtgaagattggcgtttcatttactcagtgatttaatctaatacaaaactgcttagaagaaccaagacaaattggctggaatcatgaatgctgggttggatctgaccatgagtgtctgtccgactctagcccacccactatgtgtattggataggt

SEQ ID NO: 559061 - DNA, 788 bp, Homo sapiens
cggacgcgtggcgccagagtggcagttgtgcagcacgcgccctctgagtccgtggacaatgccagcatgccacctgtgaaggtggaattctccctgactgatatggctccaaggagaagctggtggacttcctcagcaggggaatgacacagttgcagggaaccagggccttaggcagtgccattgaatacaccatagagaatgtctttgaaagtgccccaaacccacgggacctgaaaattgtggtcctgatgctgacgggcgaggtgccggagcagcagctggaggaggcccagagagtcatcctgcaggccaaatgcaagggctacttcttcgtggtcctgggcattggcaggaaggtgaacatcaaggaggtatacaccttcgccagtgagccaaacgacgtcttcttcaaattagtggacaagtccaccgagctcaacgaggagcctttgatgcgcttcgggaggctgttgccatccttcgtcagcagtgaaaatgctttttacttgtccccagatatcaggaaacagtgtgattggttccaaggggaccaacccacaaagaaccttgtgaagtttggtcacaaacaagtaaatgttccgaataacgttacttcaagtcctacatccaacccagtgacgacaacgaagccggtgactacgacgaagccggtgaccaccacaacaaagcctgatctccccccaacaagaaggaattctccagctgaatgcctttggaaatgaaatgacaactcttccttgatcaccagcataccagccccaagg

SEQ ID NO: 559062 - DNA, 695 bp, Homo sapiens
cggacgcgtggcgccagagtggcagttgtgcagcacgcgccctctgagtccgtggacaatgccagcatgccacctgtgaaggtggaattctccctgactgatatggctccaaggagaagctggtggacttcctcagcaggggaatgacacagttgcagggaaccagggccttaggcagtgccattgaatacaccatagagaatgtctttgaaagtgccccaaacccacgggacctgaaaattgtggtcctgatgctgacgggcgaggtgccggagcagcagctggaggaggcccagagagtcatcctgcaggccaaatgcaagggctacttcttcgtggtcctgggcattggcaggaaggtgaacatcaaggaggtatacaccttcgccagtgagccaaacgacgtcttcttcaaattagtggacaagtccaccgagctcaacgaggagcctttgatgcgcttcgggaggctgttgccatccttcgtcagcagtgaaaatgctttttacttgtccccagatatcaggaaacagtgtgattggttccaaggggaccaacccacaaagaaccttgtgaagtttggtcacaaacaagtaaatgttccgaataacgttacttcaagtcctacatccaacccagtgacgttcctcatcccagtacgttcctcataacagtacgttcctcatcccagtacg

SEQ ID NO: 559063 - DNA, 440 bp, Homo sapiens
  misc_feature (413)..(413): n is a, c, g, or t
  misc_feature (437)..(437): n is a, c, g, or t
ctgagctgcccccagctctgcaatggaaagcatcaggctggacttggacattctgggtgggaagtgtctggaacctggacgctggcttggagaggagcctcaggaggaatcgccaggattctcagctgtcgagaatgtcacccgctgctgtactcccaacagcaagggaggcacctggcacgtcgtgagcaactctcgtgtatttgttgcatgatctagtccaagaatggccaatgagtttcacctgccagttttcacaggcctgtgtgccgagagtgttccttaccattttttcattattattctgctaaggaggatttttagacattatgttcctagtcaagccctcacctctgcaatgaaattatgataccactgttgacccaaagatgagcagcaagcgctagaactgnagggaaatcatggtgagaatttantct

SEQ ID NO: 559064 - DNA, 329 bp, Homo sapiens
gtcctcacagcaaccctacgctcccccatccactcaccctgcctccattcctgtcccagactagatttcaagctaattttctttttctgaagcctctaacaaatgatctagttcagaaggaagcaaaatcccttaatctatgtgcaccgttgggaccaatgccttaattaaagaatttaaaaaagttgtaatagagaatatttttggcattcctctaatgttgtgtgttttttttttttgtgtgctggagggaggggatttaattttaattttaaaatgtttaggaaatttatacaaagaaactttttaataaagtatattgaaagttt

SEQ ID NO: 559065 - DNA, 230 bp, Homo sapiens
tagcagctatcggtcaatcttctctttaaacctattttaaatgactacttactctcaacccttacaaatggagacttccgatcaagcgtggtggctcacgcctgtaatcccagaactttgggaggcctaggcgggtggattacctgaggttgggagttcgagaccagcctggccaacatggagaaaccctgtctctactaaaaatacaaaaaattgaaccggatagcttg

SEQ ID NO: 559066 - DNA, 385 bp, Homo sapiens
gcggccatggcgcactgggaaagctgctcaaggagcagaggtacgaccggcagctgaaggcgattctccatacatttgacagctgtctgggcccttatggggcataccagtggagtggaaagatggatgctcagcaaacaaaaccaaatgaggccaggtacagtggcttgtgcctgtagtcccagcactctagaggctgaggttgtggggtgatcatgggcaagaggctttagaatctctcatgtttgcctaataaatgcacagcacaggactgaaattcttaaaacttggtactacaggtattgggtcggttacaattattgatggaatcaggtcagcggggaggatgcttggaacaatttcttcctcaaaggagcagtatcgg

SEQ ID NO: 559067 - DNA, 328 bp, Homo sapiens
  misc_feature (98)..(98): n is a, c, g, or t
  misc_feature (323)..(323): n is a, c, g, or t
gcacatgtctgtaatctcagctattcaggaggctgaggcaggagaatcgcttaaacctgtgaggtgaaagttgcagtgagccgagatcatgccactgnactcctgcctggacaacaagagcgaaactcaatctcaaacaaacaaacataaatgaaaaggctgggtgcagtggctcacacccgtaatcccaatgctttgggaggccaaggaaggaggatcacttgagctcagggagtttgaggctatgggtgaactatgattgtgccattgcattccaacctggggcaacaaggagtgaggttcaaggagtgaggacctctttnaaaaa

SEQ ID NO: 559068 - DNA, 283 bp, Homo sapiens
cgctctggaaaaagtgaatcttgtctatataaaagctttttttaatggccgggcacagtggctcatgcctgtaatcccagcactttgtgaggccgaggcgggcggatcacaaggtctaggagttcacgaccagccgtggccaccattggttaaaccccgtctctacaaaaatacaaaaattagctgggcacagtggctcacacctgtaatcccagcattttaagaggccaagacaggtggatctcttgaggtcagaagtaagagaccagatgggccaacatgg

SEQ ID NO: 559069 - DNA, 1514 bp, Homo sapiens
gcgcctgtcgccgatgaagccggcgctatctcggtgtcgctcctggtcgtggcgcggcttgccatgtggcgccgcgatggagtagctaccaaagatcctgaccgattgagcatcgctggcggtggcttgtcagcgagtcccggtggcagggcgtcctggtggtactcaggctcgcgtccgaggcgccgccaggtgcgagcgcggcgtcttggggcgaagcccggaatgtcactgtctgacagcgtccgggacgcagcatggtgcggcttgtcctcgtttgtatccaggatccctgcgactacgatgtcactcgtcgttcctccccgtgacactccttgcagacagattgtacccgcgtttcatgcgtcttccatatgcggtgcagtggcacgtctccctcaatgcttcttaacggctgtgtcgtggggactttgataggccttggtgtttcccatggccactgaaaccgcgggacgccgtgcctgaggccctgcaggaatgatcgggactccggatcagctgtgcatcggggggtcgacctcacggttctcgcggacaactcatttgcgttcttcgggcctgattcgatgggtcgccatcctggagcgttccgcgttgggtggcaacccgggtcccattcgcggggtgcccggccctctggttgttgcgcatttgggcccttagagttcgtgggcagttaatttcctcttcggatgctagggccacaagggccataacgcttgaggcgtcgtaacataaaggcgttatgccggtgggaagaaggcactcgaagggagacccgcggtcggctccatgggagcgaagagaggagtctggtagctaattggcccagagggtgtcgcaacgtgggtccctgattttccccctccgaggtaccaggtcgcttatctaaataccccctggtggtcaccacccccctgtgtgtttggacccctgagtccactcagggacgatttccagagatcccgtatgctttggcgcgtttcccaagggacggtccgacgcccctgggttcggcctcgggggttttgggcgtgacttccacgacatgtagatccgtgggcatattccttaaccctagagatagcccgcgggggtggcttaaggggtgccacattgcgccagggctcttggggggaagttagccccatttccaggtccagacggcgacctatgcggctaatcaggcgatcggctcgaagatatggtcactgcaatggatgccataacagagcggctttatgcggtgtgcacgacgccgcccagaacagccttcttaggcacacaagaggcacgaaccactaggttcagttgttcggccccacaagtgaatcatttgtcaataaagtgaacaacagaaagtttgcaactttgcccgcagacgcttgcaggagtacaagatgaacagcgcgagagatccctacggcagattttgtccgagatggccgcggggacccactcaaggcctccagggcttggtggagaatcaacac

SEQ ID NO: 559070 - DNA, 359 bp, Homo sapiens
  misc_feature (27)..(27): n is a, c, g, or t
  misc_feature (54)..(54): n is a, c, g, or t
  misc_feature (71)..(71): n is a, c, g, or t
  misc_feature (79)..(79): n is a, c, g, or t
  misc_feature (141)..(141): n is a, c, g, or t
  misc_feature (206)..(206): n is a, c, g, or t
  misc_feature (215)..(215): n is a, c, g, or t
  misc_feature (230)..(230): n is a, c, g, or t
  misc_feature (238)..(238): n is a, c, g, or t
actaagctgggcgtggtggcgggctgntggtcccagctactcgggaagctgagncaggagaattgcttgancggggggnggaagttgcagtgaccgagattgtccactgtactcagcctgggtgacagagtgacactctgnctcaaaaaaaaaaaaaaaggacaggcacgacagtgctcacgccctttgatccagcactttggagnccgatcagncggatcacatgaggncaggagtnaagaccaacctggccaatatggtgaaaccccgtctctactaaaaatacaaaaattagctgggcatgatggccgggtgcctgtaatccagctactcggtaggcggaggttgcggtgacttga

SEQ ID NO: 559071 - DNA, 415 bp, Homo sapiens
ggttgggagattttgaggcttttagaaaaaagcggcaaaaccccccagaaaaaaaacgaggaatacaggaactggcaaacccgccagctttaaaaagaaaaagggcgaaaggcacctacagcaacaaaagaacaaccaccatccctgctacaaagccgttaatgaaaaaaaaaagatcaccgggcgaaagaacacccactccaggaaagacaacacccttccacttcaaaggataaaaaccccaaagcaagttaaggccctacaagggcccccgaacaaaggaaaaaaacaaggcccgccaacttgggggggtgagaaaaaaaccctttatggagacaaagtagtaaccgaggccaaagaaaccgccgaactgaaaagaataacaggccaggcgggaaccattaaaaaaaacccg

SEQ ID NO: 559072 - DNA, 372 bp, Homo sapiens
tctggaagccgagtcggcctgaggtctaaggggcggagggaactccaagcttggcctggagctcagggaagggagctcgcgtggacttcaggagcccggtgggtgcttcctgtgcacaaacgggcagggtctgagctcccaccgtctggaaatgctgcccagtggatttcagcctcattttacccagctcccaatcaagatggaattgctctggttcaaacgcctacgttcgccagctagggggtgaaccggccacagatccccggaggccaacagaagacagagcccctgggtcagaggcaaggacggttgacttctcaggcagggaggtggccaagggaatcgcttctgcggcggcttcccaagcgaaaa

SEQ ID NO: 559073 - DNA, 317 bp, Homo sapiens
  misc_feature (293)..(293): n is a, c, g, or t
ctaatagtagtgtaaagtggtggactgctctacagagcagcacagtggttcctcaaaaagttgaacatagaattactatatgacccagtaattccactttgaggtatatagccccaataattaaatgcagggacccaaaaagatatttgcatagcaatgtttacagcagcagtactcacagtagccagaaggtggaagcaacatcatgcccactggtggatgaatggataaacaaatgtgatatttgcacgcaatggaatattattggatattattcctttttaaaggaaggngattcttgacacatttcaccatgt

SEQ ID NO: 559074 - DNA, 387 bp, Homo sapiens
ttttttttttaatgttctgaacccttaggaagaagttaaatcttaaatcttattagttgaattgttgtaaggcccgtgatgtctggtacccaaatgtgactttttgggagccccgttggggttccttcttttccaatccatttttgtttaaaaccaaccccagttttagaaacccaagcctttaaaaaaaaccccctccgttttatgggccatatgtaaataaataaatgtaatatttccccccttttttttccgggaaaaggtcccgctgttcccggggtagtttgggggcctaaataaaacttcccaattaaattttttaaaatttggctgatttccaaaactgtgaaaaataaaaaaggggttgttttgcttgtgagaacttga

SEQ ID NO: 559075 - DNA, 910 bp, Homo sapiens
  misc_feature (153)..(153): n is a, c, g, or t
gggatatctgctacctagtctaatacacagcatgaatctcactgggggctgctgatacccgcggacatggagaacagtaagggagcagagtggttaaggacatttcagagaacttgaactattctggaataaggaatgaatcaactgtacctngaggccagcaggatttcttaagtaaatcggttacttgccgtattcctcacccaggtatagagtcagtcgtcgtgctacgttggtgtcacctattgtcggaagacacagatgtcatgggattagactagattctgctctaatggtgtgtgcataccattcataggcaagtggcgccttgattctttgcatgtttgagtcaagaccattcgcatatcatgaatttacgcttggttttagatataggagtattggggcttaaaacgtagtggtcaatgtggttattcttaagtggtagcaattgttcttgagtaaattgttgactgggtgtaaaaatgggactatagacgtaggcaaagtcaagtttataagagtattgttacagagatttgcagtagcccatttgatgattatgcagtggtggtaagtttcagcgcaagtttaaggatgcaaggtttataatatttcaaggataggacattaatgccattggtaagtaagggggtacaagaccaggagacacggccttggttggttcttcttaaccttttgaagttattaaatgtagctttgtaagcacaatcttaaagagggttttcccgcgtggtagaggtaagtttttaaagcactgaaatatcagaccaagcaccgtaagagcaggtcccagacgcgaaacgagtgagcacagagaatacacagaagtgcaaagtcaatgatagcagcgaggatcaccacacgcgaggtatacgaagagaaactg

SEQ ID NO: 559076 - DNA, 107 bp, Homo sapiens
attcttttaaagttgaaaataaccttcgtggctcaccgatatttatcatgttacctgtggtctccaagatatgtgtattccataacttatatcttagatgtccatat

SEQ ID NO: 559077 - DNA, 861 bp, Homo sapiens
gggtttacgggatgcgccctcggggctgaaggcggtggtgggggaaaaaattctgagccggagttattcggagggtcaagaaggatggggagtggaaggtgcttatcatggatcacccaagacatgcgcatcttgtcttcctgctgacaaaatgtcagatatcctggctgagggcatcaccattgttgaagacatcaacaaagcggcgggaacccattcccagtctgttaggccatttatttgctgagaccccacggagaagtcggttcaggccctgatcaaagacgttccaggggaccccgacatttcaccgtacaaagcggaccatatcttcttcaccgaacacactgccccgagccccgtgaacagatgacgctaggccggacttctcgcctggcaaaaggatggtgaacgaccgtagaaagggagattcaaccccttggacctaacctacccctaagaaggacccaagggatgatctccacgcatcgaagcgctcgcccaaaagagcatccataacacaacacatcataacagagcaccaattcccgagggacagaaagggacgcacgctacaggcagcgacaactcaggacgtgatggcacgagacccatagacaagaagttagccaacagacctaggtgcccgccccacaccaccttcgcaagggcaagatacccccagggccccaaatccggcgtacaccaggccacgggcgacccccacgacacggaaccccaggccgcaacggcacggcacacacggcccggacccgtggacaccaggcagagggacagcacactgcacagggcaagaagcaagcccccagaacacgcgaacgacaggacccaaggcgcaca

SEQ ID NO: 559078 - DNA, 385 bp, Homo sapiens
tgatctagacgatccctagctggtcgcagtctcagagtctgtgtcgtagcccctttttgcagaagagggtttttggccactggtccagtgtcatccttgatcttcttgagccgggccttggttctttgggtggaaatggagaaaggtgaagggagttcttggttgaactcaaggcgggaagaaaactaaattttcattaaaacgggtcttggaacaccttgcaaaatacggtttccctggcccgggttaacagctttcctggtcccttggaggattcagaacatttgtctgttttcctgggctttggctttgggctgaagcccaaaaaatgggacgcctggtctgcagtttcctttggtcatccaatcctcttttccgggggggt

SEQ ID NO: 559079 - DNA, 452 bp, Homo sapiens
agtcgagaataaggatgggaaaagaatatatcagggatcaggacaagggcgggaagccaatcaaaggaaaaaagaataacaataaagtgttataggagctgaaggacaaagtagctggtataataaaaaaaagaaactaactgatctgaaagcgccaagataacacaatacaagaatttcacaaggcaatcacaagtatgaacagcagaaaaaaccaatctgaggaatgaatctcagaacttgaagatgggttctctaaaataagatggacaaaaataaaaaagaatgaacaaaaccttcaaggagcatgggattatataaagaagccaattctacaaatcactggcatctctgaaagggaggtggagaaatcaaataactgggaaaacatttcaggaagaaatgggctttggttacaaaatataactgtctgcctttgggggatggtttaa

SEQ ID NO: 559080 - DNA, 128 bp, Homo sapiens
gtacttaggggagcgtgcctcccatgaggaggtggcgggcttggtggagaagatccgcttccccatgatgctaccctaaggagctctttgagctgcagtacaacctggtccctgatactgggagccac

SEQ ID NO: 559081 - DNA, 1000 bp, Homo sapiens
taactgggacgtgtgcgcagacatggtgggcaccttcacagactaccgaggaccctggccaaggttcaagatgaagtactggggcgtagcctcctttcgtccagagaaggtagaatgagtgaccactggcatcgtcgactacagatctacgactacgtatgccgtgcagtactcctgccgactcctgaacctcgatggcacctgtgctgatcagctactcctatcgtgttattcctgtgggaccccaaacggggctgaccccagagagctgcagacagattgtcatggcatgcggcaaggaggagctgtgcctgggcaggcagtacgggctgatcgtccacaacggttactgcgatggcagatctgactcgaaaccttttgtacgcaatagtcaaagaatctagttgcatctgagaacttctgattagtctcagtcttcagctcgtagttgatcttaggagttgaacttggccttgtctcccccatcttccacgtcgaggtccgcataagaccgttcagttagcacgaaatcaggcatcaaaaagaagactaagatggcataaccaggtggtgcaagaagtgtgagtcccaggaaaactcttatacaagaatttgtgaaggtgcggggaggtctccaaaagaggaataagtcaagtgtgtaaatagcagttgacagatgggaacactaggtacttaaagtctgagtggggctgttctacgtagaaaaaataagcccggtggagaactcgaggtgctttggtaaaccttctcaagaaaggagacacactagaggggacacaacaaaggggggcgaatctctacaacgacaggtgttctcccacgagaaggggcttgcagagctctcagatatattggccgccgaacagggggggtcatacaaatactaccacggacatgaaaacattcagagagagagaggcgaccagacagaggaagaagcgagaacacacaacggcaaatgaagccgcaatgagacatg

SEQ ID NO: 559082 - DNA, 254 bp, Homo sapiens
tttttcagcacgctggcgtgctgcagtgcagtgtcgcatctctcgagctccgcaatcctctacttccggggctcaagtgattcttccacctcagcctcccaagtagctgggactattggcgtgtgccaccattcccaccgattatttttgtcttttttttggtagagactgggcttcaccatgttggtcagtctggtctcaaactcctgacctcaactgacccacctaccttggactccagcgtgctgatacaa

SEQ ID NO: 559083 - DNA, 216 bp, Homo sapiens
cttccttttccctttctcggttctcttctctcctctgaatggctgaaggaccctctgcccggggaggttggggattttggacaaggtcccctggtgctgatggcctgaaggggcctgggctttgggcagatgcagttttctttgggcttggggaacctctcccgttgctgtgtcctggtgggcagcccgcccaataaacctgcttttctaaaagga

SEQ ID NO: 559084 - DNA, 1044 bp, Homo sapiens
ggttattaggagtctatatcttttcttttatagacagagtttgtgcgtctatggtagcctaggctggagtgcagtggctgcagtcttggctcacctcaacctctgcctcccaggttcaggctattctcctgctcagcctcctgattagctgggattacaggcatgcgccaccatgaccggctaattttatatttttagtagagacgggatatctccgtgttggtcagatctggtctcaaactcccgacctcaggtgatccacaccgactcagaactcccaaagtgctgggattacaggcatgagccaccgaacccagcctggttatgggattcatttattatattttgagataaagccttgctctgtcaccaggccggagtgcagtggtgtcatctcagctcactggaagctccatctcccaggttcaagcgattcccctgcctcagactgccaagtagctgggattacaaggcatgcgccaccatgcacagctaattgtctccagtagatatggagttaacacacgattggcaagacagactcgatttcctgaccttgatgatcccactgactcggactcccaaagtgctgggatcaccggcatgagacaccaaacctgatcgggccacttgattataaatacgcacactctcaacaataatgtcaggatacatttttgtcacagacatcactgacgttaagctcctgaaactgatgatgtccaagacattaatgtagcatacacggggaaatgaataccaatatttaggccattacactctggaatataggacaaaggcttacgtcaagaatagcaatccaacaatgtaaaaagaatatcaaccgataagcatacaatcaacaccacacaaaattatcaccatgcaaaaaatgaactcacaaatcaacacaacaccaccacacaaaacaatctaaacaaacaaacagataccctcatgaccacaacacaatcaaatcaagcataccactcgtcaatcactatcctaccaccccacatcctccccagcaagcaacgagggacg

SEQ ID NO: 559085 - DNA, 263 bp, Homo sapiens
  misc_feature (80)..(80): n is a, c, g, or t
tagctgctatccgtgtgactatcggctttcgtcgattccggagcaaacatcaatcactcctgagttccatcaatcactcntgggctgcagtcacctatccggacccgttttactgctacgcggagccccaccgggccttcacaactggactgccaacgttatctacccaaaggagatccgtctggctcctccgtcgcgacgttacctgaacgcccatctgcagcctgcgtcgacgcggacgcgaatttagtagtagtaggcgg

SEQ ID NO: 559086 - DNA, 359 bp, Homo sapiens
  misc_feature (240)..(240): n is a, c, g, or t
  misc_feature (280)..(280): n is a, c, g, or t
  misc_feature (282)..(282): n is a, c, g, or t
  misc_feature (327)..(327): n is a, c, g, or t
  misc_feature (351)..(351): n is a, c, g, or t
tgcgacagagtcttgcactgtcacctgggctggagtgcagtggtgcaatctcagctcactgcaacctctgccttccgggttcaagccattctcctgcctcagcctcccaggtagctgggattacaggcacctgccaccatgcccagctaactttttgtattgttttttttagtagagatggggtttcactatgttggccaggctggtctcaaactcctgacctcgtgatctgtgcgcctnggccccccaaagttctgggagtacaggcgtgaaccaccgngnccggctggggctgcttatttaaatcccctagaaagagggattctncagctacaccacacccttaacttngaaggacc

SEQ ID NO: 559087 - DNA, 184 bp, Homo sapiens
agttattgtaagtctagtttatctattttggtggtggttttggtgcttctggtgtggcatcttaaaaaaccatggcctaagtcagtatcacagatttacttctgtgttttctggccaagagctgtatagttttagctcttacatttaggtttcgggtccatttggagttagtttcggtgtaagg

SEQ ID NO: 559088 - DNA, 538 bp, Homo sapiens
  misc_feature (377)..(377): n is a, c, g, or t
gaaaagtaataaaaagagttcagttaactcattctgaacatgggcattggctatagagcagattgcttggtatacagcaagcactgtcagtaaatgcttatcaaagaaagaaggagaggccgggcatggtggctcatgcctgtaatccccacactttgggaggccaagaggtgggaggatcaccctgaggtcaaggagttcgagaccaatcctggccaacgtggtgaaacccccaatctctactaaaaaatacaaaaaaaaaaaaaaaaaaaggagggaaaaagggtttacgccagattgattactaaaacggtctcattctcaggggccctctttttaaacggtctttaaaaatttatttttaggggctaattgcnttccccttccccgtaagggggctttaaaacctagatgatgtgttgatagctgcagcaaacgaccatgggcacattgttattacctgtgtaacaaacctgcacgttcttacacttgttttcccagaacttaagcgtaaatttaaacaaacaaaaaaaaaaac

SEQ ID NO: 559089 - DNA, 798 bp, Homo sapiens
atcggttgaggccagaagtccaagaccagcctgggcaacataggcgagaatctgtctctacaacaacaacaaaaaaattaaataagaaatgaggccaggagtggtgctcatgcttgtaatcccagtacattgagaggccgaggcaggcagatcacctgaggtcaggagttcgagaccagcctggccaacaatggcaaatccgtgtctctaccaaaaaaaaaaaaaaaaaaaacacaaaaattatagctcggggtgtgtgagtggcgtgtgcccctgtgttggttcccagctatacctcgggaggcgtgagggtgggagaaatctcgcttggaacctggggagggcaagaggtggttggcagtggagccagagatcacggccacgtggcactccacctcgggtgtggacacaggcggagaccctggtctcaaaaaaaaaaaaagaaagaagaaaaatattagcgctgggccatgggtgggcatggtgcgcctggtaagtcccgagcactaacgtggggaagctccggagagggcgggagaggaactcgcttgtggagcccccagaagagggccggaggccgtgaaagagtgagaggccacatgagcattgggtgccccaggggtgcaactctcccagcccgttgtttggaacaagaaggaaaaataccctataatttcaaaaaaacagaaaaacaaaaaaagaaaggttacgggacggcgggtataacgagggaacaagtgttggggaacacacaggtgtgcccccaggacgcaagaggaggcccaccagagggacccc

SEQ ID NO: 559090 - DNA, 1015 bp, Homo sapiens
gctaagagccttccatgggctccctactgcctacagcgtatgaatcgcaacaagtcatactctttgagactttgaaggttctccaccctgtggccccatcgctccccacagagctactatcctcattactgtctctgttaccctgacttatgggcagatggcgtagtcctcaactgtgacccacgactacacctctgcccacgactgccagcctcctttaccacaggttacaggcatctcagatatcgctcaccaaccgctactgcactacatctcacgtccagtgcccccagagacatgcaatgtgcaacgcccaaggcctggcacttgaaaagaagagatacaatcccgagaactgcccagctttcacgccccacaaggcccagtaggctccatagaatcatcgctcaaccaggtgttcatccgtcacgtcggtcgttgtcaaacgctatacgcacactcggcacgtcaagaaacggacaaaggcattcaagaaaccgtccacccctcccccctccctcgtgctcaggaaccacttccacgccactacagcaacccatgtgcgcatcgacccctcagacctacagcaccatatgcacactgaacactcctggcaaacgctcccaacggctctgggcaccgcctttcaacccaaatccatgagctctctttaccgcgagcccgaccatcctcgacgactcatacttcaacatactcagccaactacaaccattacattgtgtgtccaccatggcatccacaccccccaattgtgcacatccccaccccaccacagcaccacaccaccctataggccagccaccccagcgcccacccaccactagcaaacacaacaccctctggcaccaacaccacgggaggcaccgccgtggaagagcccacccggcggccaacgacacaacaccgcggcaccaccgcccatcaaccaccaccaccaccccagcggcccaggatccaagccacggaaactcacgacacagagcaacgaccacac

SEQ ID NO: 559091 - DNA, 234 bp, Homo sapiens
caagcgattctcctgactcagtctcccgagtagctgggtactacaggccgtgctaccatcacgcccagctaatttgtgctatttttagtagcaggacggggtttcactgctgattggacaggaatggtctcgcatctcctgcattgtgtgtatctgtacctccctgtgcccttcccaaagttactggggcaggccatcatcataattggcttaccacccaatgtctgctgtctg

SEQ ID NO: 559092 - DNA, 588 bp, Homo sapiens
  misc_feature (364)..(364): n is a, c, g, or t
  misc_feature (393)..(393): n is a, c, g, or t
  misc_feature (403)..(404): n is a, c, g, or t
  misc_feature (408)..(409): n is a, c, g, or t
  misc_feature (490)..(490): n is a, c, g, or t
  misc_feature (494)..(494): n is a, c, g, or t
cgcgcaggcggttggcgaagagacgccgagcgggccgagtgcggccgagcaaagccggagccggagcggggccgcaggagacgggccgggtccggacgggccgagatgccctataaactgaaaaaggagaaggagccccccaaggttgccaaatgcacagccaagcctagcagctcgggcaaggatggtggaggcgagaacactgaggaggcccagccgcagccccagccccaggccccagccccaagcccagtctcagccaccgatcatccaacaagcgtcccagcaatagcacgccgacacccccacgcagctcagcaaaatcaagtactcagggagggccccagattgtcaagaaggagcngacaggcaaagctcctcccgcatatcaancatcagcaannaatnngggagctgcagaagcttcctgccactgaaagatatcgacaacccgaggagcgggaaggagctgtatatccaggaagctacnccangtgctgatgtcacatctatagacataacgatggtcagaagcacaatacagtgaacctcaaaattcaaaaggagagtgaagacgggcaaggaaat

SEQ ID NO: 559093 - DNA, 273 bp, Homo sapiens
aaggcgcaagtaagagctgtatgcaacaagtgctaaatggactgcactgctacacgctcctctttgtaggacaccataccacagatgctcataacacttgaccagactatcccgatgacaactggctctgggatgtagtatattaaccatctcctccttaacatataaaattatatccttaaatggatcaccacgggacatctgtccttgaagtacttactggagctccttacgagctccgatggttggctgataccgaacatatactgaaag

SEQ ID NO: 559094 - DNA, 130 bp, Homo sapiens
ccaactttttttaaggggggggaaaatttaaaaaaggtccttttaaaggggaacccgtaaaatgtttttaaaattggggtcccaaccccttgggggcccgaaaaaaaaaaagggaatttttttctttcca

SEQ ID NO: 559095 - DNA, 747 bp, Homo sapiens
  misc_feature (465)..(465): n is a, c, g, or t
  misc_feature (467)..(468): n is a, c, g, or t
  misc_feature (474)..(475): n is a, c, g, or t
  misc_feature (479)..(480): n is a, c, g, or t
  misc_feature (487)..(489): n is a, c, g, or t
  misc_feature (509)..(509): n is a, c, g, or t
  misc_feature (514)..(514): n is a, c, g, or t
  misc_feature (524)..(524): n is a, c, g, or t
  misc_feature (541)..(541): n is a, c, g, or t
  misc_feature (548)..(548): n is a, c, g, or t
  misc_feature (555)..(555): n is a, c, g, or t
  misc_feature (560)..(560): n is a, c, g, or t
  misc_feature (563)..(563): n is a, c, g, or t
  misc_feature (565)..(565): n is a, c, g, or t
  misc_feature (575)..(575): n is a, c, g, or t
  misc_feature (577)..(577): n is a, c, g, or t
  misc_feature (584)..(584): n is a, c, g, or t
  misc_feature (732)..(732): n is a, c, g, or t
cgcgcaggcggttggcgaagagacgccgagcgggccgagtgcggccgagcaaagccggagccggagcggggccgcaggagacgggccgggtccggacgggccgagatgccctataaactgaaaaaggagaaggagccccccaaggttgccaaatgcacagccaagcctagcagctcgggcaaggatggtggaggcgagaacactgaggaggcccagccgcagccccagccccaggccccagccccaagcccagtctcagccaccgatcatccaacaagcgtcccagcaatagcacgccgacacccccacgcagctcagcaaaatcaagtactcagggagggccccagattgtcaagaaggagctgtttatccagaagctacgccagtgctgtgtcctctttgacttcgtgtcagacccactcagtgacctcaaattcaaggaggtgaagcgggcaggatcaacgnannggtggnnttannccacccnnnccgtggatgttgtctatgtngcctntttacctgtngctgtctacatgttttntatgtancttcttncgggngcntnctaccttcangnaatccancaggggcctagttttgacccagaggaagatgagcccaccctggaagctgcttggccacatctccagctcgtgtatgagttcttcttacgtttccttgagtctcctgatttccagccaaacatagccaagaagtacatcgaccagaagnttgtacttgctctcc

SEQ ID NO: 559096 - DNA, 196 bp, Homo sapiens
tccattatttgtttcgtgggttaaagccggcaggagagggactgcttggggccactgcggtggtccagcgcaagaggatagcaaagtgcaggctaaatcagacatctgcgagaacagagtcagaggcaggcagattgcagaggtgttggaaggatagctggcaggagtggcaccggggagatcgcccttgatcgta

SEQ ID NO: 559097 - DNA, 296 bp, Homo sapiens
  misc_feature (114)..(114): n is a, c, g, or t
  misc_feature (117)..(117): n is a, c, g, or t
agctcctaaaatagaaatttccttttatggatagaaggccagaattttgagaagaaactaaattttcccccaattttaaggaaaaattgtccttatctaaaaatgtttttatanatntgcttcatcttcccttcatactttgaaattccctatagcagccagagctagggaaatattaaaaatttcccctatttattttttggaactaaatcaacccttaactatacccttatgagagtaatgggaactcctgctggctttaagtaaataaaagtccttgttttcccccgtatata

SEQ ID NO: 559098 - DNA, 138 bp, Homo sapiens
tattttatgaccataacacgaaaacaacatcttgtgttagaccctcggatgcctaatacaagcagcagaatgccactgtgaagagtgtgaacgatgatgaatggggtacacaccgaggtagctggactagtgaactag

SEQ ID NO: 559099 - DNA, 101 bp, Homo sapiens
  misc_feature (76)..(76): n is a, c, g, or t
gacatttttatcatcccccaaaagaaacctcatactcattagcagacattccccatacatgtacatcttgaactcnggaggcggagattgcagtgagccga

SEQ ID NO: 559100 - DNA, 407 bp, Homo sapiens
ggggtttttatccccccccaaagccagtgaaggatatccccccccggttttttaaaaaaaggcagcctaaatccaattgaaattagccttgggcctggtccgtcgttcctaatgaataaaaatcaagtgccaaagcttcagccccagataattatgattcctcttagtgcccaaccccacgccactcaaacaccccctttgggacagacccctcaggttggtctcaaaactaatcccccccttatccaggaaaagcctgccaagaccagcaaaaagccccccccgtcaaaggaagaaccccttaaactaactgaaactgttgtgactgaatatttaaatagtggaaatccaaatggggctgtcaatggtgtaaaaaaaatgagggctcctaaacccccccgttttta

SEQ ID NO: 559101 - DNA, 299 bp, Homo sapiens
ctgcacctatccccacagtgagaaagcagccaagatccgggctcgggactcttttccctctcccgaaacataactggttttgtatgtgctctgagtcctagtatttatgtcttggctgagaaccacagaaaggactagatatacatacatgcgagagcacatctagggcattgcatgtttatttgggcatattgctagaaaaacttccgcataggacttgccagaactcagtgcctgtaaccaagtttacggtcatctagttcctctcacaatttcaaaatgtcagatcagaagattct

SEQ ID NO: 559102 - DNA, 1054 bp, Homo sapiens
ggcgaaagcccgcgtcggagggcgactgcctggtgagcgggagcggcgcagggctcggggcgggcggccatgctcatgccccatgctgccatgctgccatgcgccatgcgcggtgctgatgctctgcgggaacgaatgggatgactccatggctgcgacatgcatgccgctggctccgtagccccagctgtctgcccaagtgctccctgaccctgctgggacaaatgacgacagaggcttctgtgtgttgcccgaatggcctctggaacgtggcctgcatgagaggcaaccgtgtctgcctgtgcttgcttttgtccatgccctgatggcccaagcgaactgcggcagatgatgctgtggctgcttcctgatggactctgcctgaggtgatgctgcctgatgggcaaccttgctctgccgctgtctccggccctgccctgcctgtgccctcggtgcttttgtgcctgcacttgggctccggctgcagaagagtcagccggcactcgagcgccgaggggggcaccgtgccctgcaccagcccgagtggagtcagtcggcaaggcagccgcacgctggaggtagaggggaagagctgagctaagcgctgagccgggaaggaagccaccaggccaaggcggtggaactgcgcgctccgagggagctcagagccgagctgggaggactgtcagcttccacccatgccccgggctcttgccccaaatccactggagcgctgagctcggaacttgaaaactctctggtccccaggtttccccccgatctcatctccctttgcttgcggatggttggggtcttcctgtttctccgggcccctgagcttgggggacgactttacttcggggcgcaagattgttttatggcccgttattcgtggagagttgtggacgagcatccgagagttaaagaggccattttcaagccccggggaatcccgggcccatatataagtacgattgaggaaagtcaagggagagaaactcgcgggttttaacagaggatgaaggtacacgtaaattgaatcattaggggcctg

SEQ ID NO: 559103 - DNA, 1184 bp, Homo sapiens
  misc_feature (386)..(386): n is a, c, g, or t
  misc_feature (397)..(397): n is a, c, g, or t
  misc_feature (425)..(425): n is a, c, g, or t
  misc_feature (616)..(616): n is a, c, g, or t
  misc_feature (692)..(692): n is a, c, g, or t
  misc_feature (700)..(700): n is a, c, g, or t
  misc_feature (717)..(717): n is a, c, g, or t
  misc_feature (770)..(770): n is a, c, g, or t
  misc_feature (797)..(797): n is a, c, g, or t
  misc_feature (897)..(897): n is a, c, g, or t
  misc_feature (948)..(948): n is a, c, g, or t
taggtctatggttttcctcgacgttcttgagtcgggaaactggccgctgatggtggttagcaatcggagatagaattcccaggaacacgcgatctcggcgatgtcatcgaattcgaatttatgcagtttcaagtgtctcttcatgatgcagttcatactcgcgaggcaacgaagatttttgcaccagttgagtctccgagaagacctttcaactatggaggcgttgctgtagatgcctgcctaactaatacacgcaacgcgatgcaaaacgcaaacactggggtctcgcctctcaactatcgtatgactcgacaagtttgccgttcaacacgtgtacgaacagatccgttagcactgcagcgagactgcttaagctctgcgtacgnaggttcagagnacttcgaaagtactcatactaattcctnagtcaataggacagtcggcagtgacgacagattacttagcgtgctacctacgtgttccacaagtaatcaaatatacatgtccagcagcggatcctacgctaatgattaaacgtaggcacctctgttcacctgcgttacatctccttgacggcaacgagttataagtactgctacgggccagtacctataanacaagaggacgagaacttcaccacctcaaccaaccggtcgcaccacatgcaccgttagcagcaagcctcctcttancttgtggncgcttactctagcgaancggtgcaccatacgcgctcgcgccttacgcaacggcgggcctaccttgtcacnttgcgacaccgaggtacgcgtgcaccncgcaccgacgtctcaccgcgacggttcagctactactacaggaccggagaccttgctgcatcctcattggacggaaggctcatcgtgtcctcgtaggcgnacaagcacttacctacacgagccggaaacgttcgattattggagacaaggnctcctctcttaatacaacccacggcaacacggacatcccgaacttacaacaaccaggtcacacacaaggcagaaagagtttacaacacacacgaagcattacgaactcgcgcagttttccttctccctgcaacagcaattcccagcaaacggcacacaatcactccgcaccgtagcctcactactcacgactctctttcctagcgactctccgcagacacacttccaatccctcca

SEQ ID NO: 559104 - DNA, 256 bp, Homo sapiens
atatacatatacgaagcgagcgcttaacccagtgaatcgagtcgcgtactggatggatctctagagtctgaccatggctccagcataactgatattttggatgtgtcatgcactggtgctcactgtgtcgacggaacttgtacatgggaggcatgcacctgagagtggtgaactacactgtctgaccatggctccagtcttaactgatattttggatggtcatgcactggtgctcactgtgtctgacggatacttg

SEQ ID NO: 559105 - DNA, 1234 bp, Homo sapiens
gtgtgcagctgtgggtggtgcccgtgaggccctggttggccctggtgatggtggaacctgctggtggcttcctgctggagggtttctggcaagtggcattcgggggccaggggtcgctgggccgttggacgggggcctggggcccgatgtgccgcgtgaggcctcgccggatgttgcaatgggcctgaggcataagggagtggatagccctggtcaccaatggttgggccggcttgtgttcaacgggactatgtgaatgtatcaaggtcccttggctaggaggactctatactcttacttcccgtgccgcatctacagtgaactcatgacgatcgacttggcagttctcctatccgtggctgggccctcgtcatccaagtgaatcgaggcgttccgcgcaacgcactttatgcctagctgccacgatatgcatgacccctgcttgccggggccaagcgggccacctaggcgcttccaacggggccaccttatgacagcggcgctacctcgggagagcgaccttacccgaagtggtgacccaccgctcccgcgcccctagcggctcgctcacaaccggcttggcttccccaccaccgcacgcgctcgcgccccaaccgcgggcacacctccaccgatgtggcgcgcccaataccaatcccgtggggcccaaacggccttcttcacaactcctgcatgcccccgatggccgacaagcacgcggctaacctcgcgagcggacaaccacagacatcggagccaaacagccccacaacaacctgggtcgcctcgtttgtccacatcgcgtctcgcacctgctggccccgtcctgtccgtgccatcacttgctggcctcttgccgtataccggcgccatcacatactcccattgtgtcgcccccacgggggcggccccttggtgccagattcggggccttccgcgcaccccttgtgttgccccctcatctacaacgccctgccccacaaagctgaacgggccccgcggaccaaaaccccgcaacgcaacaccgtgtcgtcaacaaacccccctcctcagacacccccgacgagcgtcgtcccacacacgggcgccaccccccgacattaggcgcgcaaacacactatcgcgcccacacaatgcagccaccaacccactatagtgagtgtgcacaccacctcccaaacaacgaccgcccaaagcgcgtacaacctgtacgaagcacccgcagcagaacata

SEQ ID NO: 559106 - DNA, 166 bp, Homo sapiens
agcgggaggcctgggcgctgcggcggcaggaggaggacggggaaggacggagccgagccgcggctgcctccctcgtatccctgcatcggcataatataatactatagtaagggctaacggttttctttgggagtggtgtagttgtttggtggggattggttgatgc

SEQ ID NO: 559107 - DNA, 997 bp, Homo sapiens
tcctttgtcatccattcgcaacttggctatgggaagaaagtggctaattcagtacttttcccctgtaaatatgcgtcttctggatgtgaaatagactctgccacacacagaatagaagcagaccatgacagagctctgtgagtttaggccttattcctgtccgtgccctggtgcttccatgtaaatggcaaggcgtctctggatgctgtaatggcccatctgatgcatcagcataagtccattacaaggcctacagggagaggatatagttcttctgtgctacagacattaatcttcctggtgctgttgactgggtgatgatgcagtcctgtaatgggctttcacttcatgtcagtcttagagaaagccggcacaagctacgatggtcaccagccagtccttcgcaatcgtaccccctgataggaacacggcaagcaagctgaaaatttagcttaccgacttgagctaaatggtcactacggcgacgattgacttgggaaagcgactccatcgatctatttcatgacggaatggcaacagccattcatgaaatacgcgacctgtctagtcctatgacaaccagcaattgcacagcttatggcagaacaatgggaacttcaggcatccatgtcaactatttccatgtgtcggaaattggcaagtcaaagcatattctgggccacggtggttcacaacttcagtttcaccagacagatacgggaacccatctgtctggcaacctagaagctcttacgggaacgggggacgctcaaaccccttggcagggctaccatcacgaccgcaacgggctgtaacactaaccggcaaaccacgtggacatcgtaagacaccacacgccttttacacacatacgtcaccaggaaccccatgcacaaaatacttgcatatacacccccaaatcggcctctgtagactacgacaaggaaccttgtacaaacatcccagctacgagcgcgaaacacgtggctcggcacag

SEQ ID NO: 559108 - DNA, 195 bp, Homo sapiens
agagccaccatagtcactagaaaacaggccgaaaccaaataattcaagcagggctgcatgacaatttgagctagggcctctattataaacatgcctagaagcctcagagtacttcgagtctccgcttcaccatttccgacggcatctacggctcagcatttttagtagccacaggcttccacggtacttcagcgg

SEQ ID NO: 559109 - DNA, 334 bp, Homo sapiens
gggggaaagccccctttttcaaaacaaaaccccccctgataccttctttaaaaacccttttttttaaagattccaccatggggtttttggcggggggcgggggggcaaaaccccccttttcctggctcttcagttaatttaactgtgggccctggggaaaatcacttaacccctctgggctcccgcccccccttcttttaaaaggggggtaaccccccccccccggggtttttggggggtttaattagaaataatttctttaaaccctttagggttcttgaaggggcccctttttaaaaacaaaaaaatttcttttaaggggggttttttttta

SEQ ID NO: 559110 - DNA, 114 bp, Homo sapiens
gcgcaagtaggtctacaagacgctacttcccctatcatagaggagctatcaactttcatgatcacacgccctcataaatcaattttccctaaacctgcctcccagggcccggta

SEQ ID NO: 559111 - DNA, 1050 bp, Homo sapiens
ccttcgagctggtcagccagatctctgcttgaggacctgctccgaatcggagtcactctggcgggacaccaggaagaaaatcttggccagtgtcctacgcagcatgaagtcccaggccaagtccggtgaaccccgcgtgctgtggacaggaggaccggccccgcagtactgacctgcaggaactccccaccccaggacaccgcctccctcattttccggggcagagtggggactcacagagagccccctaggctcctgttgccccggctggaattgcacttatgagcctcgtgaggagtgcaggagttgggacaaactttggcagagactggattagggggttctgcacatacataggcaggggatagaatcacccccctaggcacctcgggggtaactccaaaccaagggtgaggggcgccttgttccctcaggtactgggggtgtgcaccatgaggaaaaaggaagtgcccaaacatctctcgcagggctaccccaggtgccaccgcctcagcttgcatgggtgcgtacccgcgagaccaaagagagtgtagacgtccctttggccagctccagaatggaaaagggcttgacccattggggtcgaagacaggcggtgtaatggacccagttacaaagcccttggagtaggagttcccacacttggctgtgtcaccaccaaaactctatccattcttcccccttgttaatgcccctcccacagactgttgacttccagtaatgcaaggctcggacgatatgtgaccagcgcataaattttctacccgtcccttgtggattctacggtgtgccatactaccgacctgacataacgtatgtgtccacaggaacctgtttgttatggcgtccttgcccaggttaagcagggccgcatcatgtgtgagcgacgaggcgggcatcccgatcccgccgcccggaccccacgtgcataaggcgaggtggagatataaaaggtagggtgacaccacgcaggtgggctgtgaaatcaacctgtatataaaaggcgcggagaaaagggctcaggcagca

SEQ ID NO: 559112 - DNA, 916 bp, Homo sapiens
gaccccaataggtgtgaagatgaatatcgaaccactcgaccagccctagcgctatggctccggaggtgtcggtccacactcaaatcgtgactactcttgagaaattgtgccacagaagtaagtctagtccgtatgctgcccgcttgtgacgcatgatttgatcgttgggggaggcttcagaaagacggactgcgctcttagggcagaactccggatacatacaccgatgtaagcaagacgagtacgacacgcatgtagccacgcacagtagtacggtcctacaggttagttcagcccaattaagaaggacgcgttcacagctcgcagagtcctactgacgctacagaaaacagtcgccaatagcactatagagctgaaattcatcccttggactagggcgcaaaagtgtggcgcacacgtgctaactgcgagctctatacgaaggaaccttacgggtgggagtactccaagataaattccgtggagcaaacattttctgcactctcggcatgaaccaactggggattccggcttatgtgacgattaacctgaacgctggacaaatgaaggcaggcggcaatattctaacaaattcaatccccccgaaaaggcccaaattaggtgaacccacgtccagcttggtgcaagcccccagggcacacgaagaggctatttgcctcgagttataggcagacagggctttgccggacacaagtttaccaacggtacggcgtcggactgaagttctgtacctccggacgtggttgtatccgaggggacaccatcaccctcctaggaagtctaccaggtacttagaagggcaccggcctgccccggggtaccgcccttgtttaacggggcgggggatacaccttacgcagtgcgaagggaagacaataatccttgtaaccttgta

SEQ ID NO: 559113 - DNA, 120 bp, Homo sapiens
  misc_feature (10)..(10): n is a, c, g, or t
gctagggtancacacaagggagacaactggaagaagagcctggaggatgtgaacagtgaacccatggacggagccgaagcaggacaggcccacgaagacggggatgatccaggacactga

SEQ ID NO: 559114 - DNA, 356 bp, Homo sapiens
  misc_feature (165)..(165): n is a, c, g, or t
catacacttgactcgacgggagacagggacctgcgctagagcggacctgcaaccatgcaggccgagagctgaccgaggacgaacaccgcggggaggcgctagaaccccaacagcccattggcaaccttctcatgtctggtcacagagaactgatttgtcctcagnacctctccgtccaccttcatgtacacagtgggcaccaccttcacaaagtactggaacatcatggaggcttggggcgcagtgacattggtgtggtccacggggttcacaatgcctggatagtcctccccaaatgacaggtgctggatgaagcgggccatgttgatgttgccaaggccaaagctctgcaagtc

SEQ ID NO: 559115 - DNA, 353 bp, Homo sapiens
gctgaatgaacatggcccgcgcggtggtgatgaaattaatatcccgcaaaaaggcaaaaactacggctgccgctggcaacctggggaatcaactattcaggctttaagataccggaagcgaaaggggagatcgtcgccgggaccgagcaacctgttttttactggaaagattcgcccgctgtgagcggcatggccttctataacagcgataaattcccccagtggcagcaaaaattatttattggcgcgctgaaagataaagatgtcattgtgatgagcgtcaacggcgacaaagtgacagaagatggccgtattttaacggacagagggcagcgaattcgtgatgttcgcac

SEQ ID NO: 559116 - DNA, 413 bp, Homo sapiens
aatcacacggtcccagtagtcacggtattcttcatcatgcactcacagaaaaagccagtttcacttaagatggccccagatgacagaataaaaatggttaattttataaatccttgacccatgaatacacatctttaaaaaacggtgagtgataacatgggaagcatgcatcaaacacttccacacacagaagtaccagagtggtctcagggaaagacatctgtgcacttctttgagtggggctgaactagctacttatctcagggagcaccatttttattgtgcagacctgatagaccaccacggatctaccagatgtggggtatggggccgacatatcctccaaatctgcagtacccctgtcacttcaagaaaaacaactcagtatttgtggtaacagaaaacatttaagc

SEQ ID NO: 559117 - DNA, 105 bp, Homo sapiens
ccatacagtattcaatgtttacactaacaccacccctatcatactctttcacccacagcaccaatcctacctccatcgctaaccccactaaaacactcaccaaga

SEQ ID NO: 559118 - DNA, 322 bp, Homo sapiens
gaaaggacgaacatagtatagactgtagaaggagctctacaataaactatatattataataaactactggcaaggaacttaccgagctgttctacatgttttcagttctctttgggggccatgtcctacattagcatggcatggatgcctgcattgcctcagtcaactcacttcacaaagctcttgccactggtatagcatcttgaacctctcatacttctcccactttttagcagcggcgtctatagtttatttcaaacgcttaacatcttcccaccgccaacagcttgcctctcggcagggggaattgttcgttccattt

SEQ ID NO: 559119 - DNA, 322 bp, Homo sapiens
gtatctctatacaagtgctacactttaaccaagacaagtggtttatcttatacccctttggactaatcgatttgaaaatctgaaagacattcttttattatttacatgtttcatcatcacctatgcctcatctacatattacgaatcgcttatgtcttaatacttaatgctttctatttattgctaggattttggtgaaacagagttttccaactcttcatccctcaatcatacacatataataacagcgcgtaacagtggacacataaatgagcactaggactattgatcgcgtttcactgttctttgttatacccttccg

SEQ ID NO: 559120 - DNA, 221 bp, Homo sapiens
gggccccctttaaaagcccctcccccctaggccgcctccaggtgttacccaggggtcccctccatgttcccccccccaactcagggaagggggtcctggggctccaagttcagcgctccaggtttgggacagggcctgcatgcagtcaggctggcagtggggcggtacagggagggaactggggcattttttagccccaggaataaaaatttgtttgccca

SEQ ID NO: 559121 - DNA, 864 bp, Homo sapiens
gaaaatcctcacgtgaggtgaagcgcaggcgagtagggccagacatggtggctcatgcctgtaatctcagcactttgggagactgagatgagaagatcacttgaggccaggagttcgagaccagactggccacatagtgagaccctggtctcttacaaaatgctggacaaaggagacagaggcgtgcggcccgtggtctcatacagccgtggactgtcctggaagagcacccagattgttccttctaggctggccaagccaccacttgatgatggctgagagggaagaggacggacgactactgaggaagcctggatgcgagcatacgggccacagaagccttgccgttcccagtgctgcggcagtggctgctcaccctgtgtggtttagacctctatcaccgagatctggcaacagtgggaggcagcccaaagccagcaaggacaggagcctgactgcgtgggccagagtcacagagctgccccatccaagctgaagccagagacgccttcgtggacttctgcatcattgcatggaccaggctcactaaggacacctaccgagtccggtttgctctaccgggaacagcagcttggctgcggccggcagcacctcatcctacgacagatagtagatgacttagagagtcccgacgagcctatacgcccatcagccctggcacggccgaaggatacttgaagtgttattagtgctagcagatgggctggtgtcccgaggtgagcctggagcgggaaaagagtacaggagagacatcgaattactctaaaacaaaaagatgggagcattgagtgggaggcggagccggggcctgggaggccagatgaagggctgaacgtggaactg

SEQ ID NO: 559122 - DNA, 202 bp, Homo sapiens
actctgagctgcctgtcgtgacctccaccgcgcgtagttgcctgcgatctgactctgccctgcgtgacctccacccctagtgcctgcgatctgactctgcccgatgtgacctccagccctagtgcctgcgatctgactctgccctgacgtgacctcgatgctcctagtgcctgtgatctgactctgccctaagtgaccttga

SEQ ID NO: 559123 - DNA, 742 bp, Homo sapiens
  misc_feature (331)..(331): n is a, c, g, or t
tgccccccgtccgcccaccaccccgccgcagctagtgcaaaggcctccccggaatcacgtctatggggcaccacgcctcctggcccccaataacaagcaagctgggacaccagaccccctctcctcgcgctgcagtccatttcatttcgttggaaggccgagccgtggctgcttatgctgtaaggcaaccccccaccccctctgggcccatgaattcctggcttggtatagttccattgcacaccctgattacatcttcgactcaccacctcgagtcacaaggaggtggcattcccacaccagcacaaccatgttggtgtgaagactgggncgcccctgggtagaatccagtttttaattattattaatataaaggatcacattcatttcaacacgatttcgaagtccccagaccttttagttctgtgccgtctatgtggaccctttggtaaaatcccaattatgatatggacgttacccttggtctggtgaaatgtttcatatttgggcccgttaatttaaaaattatgagttaaagccgcccgtgtcaagggggttctgttttctttgaaacccccctattcatttggatcatgggcccccctttaatcctcccccccatcaaataagctattgctattggtttggagttgaaaaaccagtcccggaaacttttgaaaaatgctaataattcccccaggattatgtccaattttaaaaaaaatgggggggggtttcttta

SEQ ID NO: 559124 - DNA, 382 bp, Homo sapiens
cacccctctcccccccccgagtttttaatataattctcctttttttttttctttcctcctccgcctttcctccccaccgccctcctccctccccctctctcttcctcctccccctctgtttttcgcgcgcgcgcgcgcgcccccccccccccccgttttttttttttcccccgcgcgcggcgcgcgagcgaagttttttctcccccgccatctatctatatatagcccctccctgccttttttttctgcccccccttttccccttttttccccccctccccccttcttcttgccccccctcctctctctctccccgctcgctttttttccccccccccccctcctcctcacacacaaaaaaatacacccccccccacacaca

SEQ ID NO: 559125 - DNA, 187 bp, Homo sapiens
ctgtatatgtattttcagaattcagaagatgatgtagaagaggaacaacgaagaaagacaaccatctcctgagggctgtgactagaaaatgctgatcagtgtttactatgacgctcaccctgtgaactaatggcatataggagcctttggaagaatcctctcatgaaccttaacccgagcgctacca

SEQ ID NO: 559126 - DNA, 968 bp, Homo sapiens
tacaggtgtcaacgtacatagaatattacatgatgcagaatcacattgatctacgtcggtccagagtctacccagagagggctatgtgtatgacaaactcatgaacgagatactaaaatcgtggttcacttggtttcatctgtgctgagcgaagtcaggccgatatactatttggaaacccatgttaattacctcgtgaggcattagcggcattctgcactggatacctactatcgttccattctcctcaactttggaaaaggtctcagcaggtggctagaatgacgtacctaaaccaaggagctgtgaggctcgttgactcaatgatcacagacctcgagtggttagatgcttttttcctatgaatgaacgctggagaatgaacatagctgttataaaccgggtagttgatgtagaaagcgaaatatgtaatgtggaacgtgcatcattggtgttagttaagataagtcacgggatatgaacaagtgtgaagatggctagtggtaaggtgaattaacgggtaaatcgtgaagatatgaaccgtatggactataattaattcaagagctgatagtatattaggaagatgacattttcaaaggcggtattttctggatgcatatgattttgtatatgttctgtcaatttcgtgattgatactgctttgggataggtgggatcatagactggggtgggttttgtaaggttcggtctcaggacgaattgcctgtcttagtattctcgtcgtagatgcttaagtttcccttggtcggataccattagtggtctctaattgaatccggagtttttcaagttcaagctgttgggaaatccgggaatagcgggaatgccatctccttttgccacctgcccgggtgattgatttgccccgtagaggtcataagacctgggatagggctcttataccctgtcaccacgtcttttccacatacacacgacagggggcg

SEQ ID NO: 559127 - DNA, 710 bp, Homo sapiens
gactgggactgggatgcagtgcagcccgggcggagcgggcctggtgccgatgacggccccaggcattgctctgccccgggcattgcgcggctgctcgtgagtggggatgcttgcaggaggcggcgcggtgggaggagtatgcgtggtggccctcgtggagggagctgctgctgcgggccagacgggcccggatgctccagagtgccgccgacgtcgccctgggaggctccgcgcgtgtgagccatgtaaccctgcctgggctgggctcctgggcctgctccgtctcttccccagctccctgggctacgcgcggcagcgggggccacgatgaagaagcagttcaatctgcatgcgccagcttggacaaccagacggtggcgcagggctgaaaagacagaagtttctgagtgaagaccttcttcagggtggaggaagcgtctggagcttggtgaaacaggtgtcccacagcaactgcacaaatgaagctcaccgcatgtctgcaggtgacagcaaggggcagaggctgaccaagcgctccaaaaagttgcctttgacaacactggctcagtgtcttgatggaggggtcagctatccttgggagaatgacacactttcattgggaagatgcttgaaaactactgtggagagacggaggacaagcttggattcagggagctgatacattttgaggttgcaagtagagagagaag

SEQ ID NO: 559128 - DNA, 182 bp, Homo sapiens
gttgtgagaacacaaatgaacgaaaatctgtgcggcttcactcattgcccccacaatcctaggcctacccgccggcagtactgatcattctatttccccctctagtgatccccttactccttacactattcctcatcacccaactaaaaatattaaacacaaactaccacctacctcctgat

SEQ ID NO: 559129 - DNA, 885 bp, Homo sapiens
agcggagtaagtcggggcgctgcgggcggggcaggatgtgggcgctcgccgggggacgtgctggggccgggcgatggtcaggcagtccaccgcgggcctctgccagggaacaggcgatctcctgagtcgaggcctcgcgggctgcagccggcgacggaccaggaaagccgccgtccaagctgccagaagggggcgagggccattccaggtggaggcatggcatagggacctcgaggcccatgggactagcgttggactcccgggcgccgattggcgttcttcccgtgtcgggacccggggctggcgtcggacccgtgctggtccagatgcgcacgcgacgggggaggccggggcctgaagaaaccttgaggttcgcggcggcctcttgtacctcgcgtgcctcatggggcccccgtgggacctgctgattgcccccatggtggcccccaatatgtaaacgaggggacaagggagctcggcacaggggttccataaacgcacgaccctgcaatacagaataggccgcggggttatgaacctacgcgaaacccttggcaggtagcttgaggaggacacagggcgccatatcccttcaagttgaaccaccaagggcacgccataaccgggcttggcccccccggtggagaatagacagaaggagggaattatgtggaatgacgcagttaaaattttaagcccattttaacacagacaacaagctgggagcaacagacacttggtgcggaccccgaggtgagcagcccgtatttggtgtgtattccacagccggccatttgtgtaacaatatcgtacgaaggtgaaccttttccagcgcgaaaggcgccccggaaggggcacaggggacaggaattccacgctttggag

SEQ ID NO: 559130 - DNA, 94 bp, Homo sapiens
cggacacaagccctcttgacagtttttccaaatattaaaatcatttgatatgtatgcggtgatctgacatgctcagcatcagcagtcttcatac

SEQ ID NO: 559131 - DNA, 344 bp, Homo sapiens
  misc_feature (97)..(97): n is a, c, g, or t
aaaaaaaaaaaaataaaaccgggggtggtggctcccgcctgtagtcccggccctttgggaggcttaggcaggcggattgccttagatcgggagttcnagaccagcctggccggcatggtgagaccttgtctctactaaaactgcaaaaaaaattggccgggggtggtggcgggcgcctgtgatcccaactactcgggaggcttaggcaacaaagttgttttaacccggggggcggaggttgcagtgagtggagatcgtgcctgtgtgctccagcctgagcaacaaaagcgaaactgtttcaagaaaaagaagaaaattaattaattaaaccccgggccccagga

SEQ ID NO: 559132 - DNA, 285 bp, Homo sapiens
gtgactctagcaggatctctcataggttcgcaggagctatggcttctactacaaagtgctcaactacgtggactggatcaagaaagagattccaggaggaggactgagcccagaattcactaggttcgaatccagagagcagtgtggaaaaaaaaaaacaaaaaccaactgaccagtttttgataacaactaagagtctctattaaaattactgatgcagaaagaccgtgtgtgaaattctctttccggtagtcccttggatgtacttaccctgcgaacctatga

SEQ ID NO: 559133 - DNA, 533 bp, Homo sapiens
  misc_feature (219)..(219): n is a, c, g, or t
  misc_feature (287)..(287): n is a, c, g, or t
  misc_feature (295)..(295): n is a, c, g, or t
  misc_feature (298)..(298): n is a, c, g, or t
  misc_feature (382)..(382): n is a, c, g, or t
  misc_feature (495)..(495): n is a, c, g, or t
  misc_feature (504)..(504): n is a, c, g, or t
ggtagagtagaaaaaggaaagttttaaagacatataaaagattcttgttgacaaattatttttggtagcaaatctcaaatggttacctgctattaaggtctgccatattagagttttgcactattttgctaccaagtttgattcatacatctaaaacattttgtagttacttgtcaaggacttaatttgaaaatcattgccaggccacatagttatcanttttttttctatcagctattctgttgtattctaaaacatttttagatgacttttaaagtatattagcntaacctangangttcaaatggtaaatccttgtaattagcctcatcgaatatagtaccatgtatagtgtatttttgcagcccctgaaccagagtangttcagagctcccaagttgtacttagacacatcagctgatggtactccctccttttgggacagttgtgcctataactaatggtagatttaatatcctaatttggccacggaanggagtcganacgactggatttggggagagcgagggggg

SEQ ID NO: 559134 - DNA, 859 bp, Homo sapiens
  misc_feature (17)..(17): n is a, c, g, or t
gcagtctgatacccccncgcagtattggatatcgtcgaccaggcccctcgctcatctctggcgtctttgccactgtcagaatctgaatcgcgctggaccctgtgaagtagaggatcctatcatggagaagtgggagcatgggctgcagtcaggactgctgcagactgagccatgtgatggtacgtaatgagttcccctgagggaatgaaacaccctcaccccttcaaagtcaccccttgggaattcaacacagacacacatatcccttcaaaaactttttattttgtatcaacagttcctagctcttgacttagcttagagcttttaacagagcagacaccttatatatttgagattgaaaaagtatctgctattaatcagaaataatcatttctatatttctggcttaccccttggaataaggccaaaaaataaaaaccaaagattacatttccctgacagatggctactgaacacaatagaacggaacatcctgaaattcctagagctttgacatcttgctggttgacagttacacacgttcagctttagtccatttctccataagctacaagcctgaaggcacacaactctttaaaacctaaattctttgttggcacacacatgactccacgtagccacattgccacagtgctaatacgaacaaaaagtaccaacttggggcactcttctcccttcatgtcctagggaatcagggagtgcatcaccatttcaaaccattgcaccccggctcaaagacggcagaaggctgtgcctaaagggccctcgagaccaccggctcgctcctacgcacaccttggagtgcaggccacgatgactacgtggactggcagacgac

SEQ ID NO: 559135 - DNA, 932 bp, Homo sapiens
  misc_feature (269)..(269): n is a, c, g, or t
actgctagtgtgaactaggtcttctaacatgctctcaggtcacgatctgataaatcattggaatgatgatgagctacctaccatggcaattgaaatccatgttggtgtgtaaccagattctgggacatgacttgcacctggtgggtggacaggaagatcgacgatgatactgcgaatgactcgagaagtgcaggtttatgtaagtcgatggctgaataactatcgtcaggttatagcgttgtcttgggcatactcatttgcgctcttgntaccctcgttccgctctttcaggaatccatgtactgcaagactttctttctctggtgccaggatgtcagatagatagttctactctagaagggatagtcgatcctttgaaagagggggaccagtctatggacagatattctagtgcacttgtcttgggcggtctctatggtgagagaacaagttctgtgacgttgaatctacgactattgtgttaaagtgtgggagtttccgttcgaaaagtaaattatttagtactaggttcatcatggatggtcaagaattggcgtattcttgctatttgaaaaacccttaaattgacttttgatttgctaagtgccgcctctttctcatggtgctcccacgaatgagcttatggtctacgtcccctgtgttggtacaatctggtacctcaaccacagaacgttttgtcagttcagcaagtactttctgtgtaacagtttaaagtccgcatcagacttgttacggtaggcatttatgtgttggctaacactgtctgcaccacaggtaacggcgggggttccgtcaaccatgacgttctcctgtccagtctaaacgagggggggatatccacaaaaccgcttcttgtcacaagaagcacatcagagacacaattggggctcgccggaacttcaacacttagg

SEQ ID NO: 559136 - DNA, 191 bp, Homo sapiens
  misc_feature (15)..(15): n is a, c, g, or t
  misc_feature (42)..(42): n is a, c, g, or t
  misc_feature (109)..(109): n is a, c, g, or t
  misc_feature (126)..(126): n is a, c, g, or t
  misc_feature (148)..(148): n is a, c, g, or t
  misc_feature (184)..(184): n is a, c, g, or t
  misc_feature (190)..(190): n is a, c, g, or t
gaacccctgtgagantgggggccgctgcgagtctgcccctgncagctgcctgtctgctcctgcccccagggtggcaagacccatgcctgaacggtggctcgtgcaaganggcgtgggctccttttnctgctcctgcctccctggtttngccggcccacgatgcgcccgcgatgtggatgagtgnctgagna

SEQ ID NO: 559137 - DNA, 990 bp, Homo sapiens
  misc_feature (26)..(26): n is a, c, g, or t
  misc_feature (87)..(87): n is a, c, g, or t
  misc_feature (113)..(113): n is a, c, g, or t
  misc_feature (131)..(131): n is a, c, g, or t
  misc_feature (165)..(165): n is a, c, g, or t
  misc_feature (167)..(167): n is a, c, g, or t
  misc_feature (170)..(170): n is a, c, g, or t
  misc_feature (175)..(175): n is a, c, g, or t
  misc_feature (177)..(177): n is a, c, g, or t
  misc_feature (183)..(183): n is a, c, g, or t
  misc_feature (186)..(186): n is a, c, g, or t
  misc_feature (193)..(193): n is a, c, g, or t
  misc_feature (198)..(199): n is a, c, g, or t
  misc_feature (202)..(202): n is a, c, g, or t
  misc_feature (212)..(212): n is a, c, g, or t
  misc_feature (215)..(215): n is a, c, g, or t
  misc_feature (222)..(223): n is a, c, g, or t
  misc_feature (234)..(234): n is a, c, g, or t
  misc_feature (249)..(249): n is a, c, g, or t
  misc_feature (252)..(254): n is a, c, g, or t
  misc_feature (272)..(272): n is a, c, g, or t
  misc_feature (289)..(290): n is a, c, g, or t
  misc_feature (293)..(294): n is a, c, g, or t
  misc_feature (299)..(299): n is a, c, g, or t
  misc_feature (305)..(305): n is a, c, g, or t
  misc_feature (311)..(311): n is a, c, g, or t
  misc_feature (322)..(322): n is a, c, g, or t
  misc_feature (333)..(334): n is a, c, g, or t
  misc_feature (341)..(341): n is a, c, g, or t
  misc_feature (345)..(345): n is a, c, g, or t
  misc_feature (351)..(351): n is a, c, g, or t
  misc_feature (354)..(354): n is a, c, g, or t
  misc_feature (366)..(366): n is a, c, g, or t
  misc_feature (369)..(369): n is a, c, g, or t
  misc_feature (375)..(375): n is a, c, g, or t
  misc_feature (393)..(393): n is a, c, g, or t
  misc_feature (398)..(398): n is a, c, g, or t
  misc_feature (412)..(412): n is a, c, g, or t
  misc_feature (482)..(482): n is a, c, g, or t
  misc_feature (508)..(508): n is a, c, g, or t
  misc_feature (532)..(532): n is a, c, g, or t
  misc_feature (550)..(550): n is a, c, g, or t
  misc_feature (588)..(588): n is a, c, g, or t
  misc_feature (591)..(592): n is a, c, g, or t
  misc_feature (598)..(599): n is a, c, g, or t
  misc_feature (604)..(604): n is a, c, g, or t
  misc_feature (606)..(607): n is a, c, g, or t
  misc_feature (612)..(614): n is a, c, g, or t
  misc_feature (620)..(620): n is a, c, g, or t
  misc_feature (634)..(634): n is a, c, g, or t
  misc_feature (647)..(647): n is a, c, g, or t
  misc_feature (655)..(655): n is a, c, g, or t
  misc_feature (692)..(692): n is a, c, g, or t
  misc_feature (694)..(694): n is a, c, g, or t
  misc_feature (698)..(698): n is a, c, g, or t
  misc_feature (700)..(700): n is a, c, g, or t
  misc_feature (702)..(702): n is a, c, g, or t
  misc_feature (704)..(704): n is a, c, g, or t
  misc_feature (706)..(706): n is a, c, g, or t
  misc_feature (714)..(714): n is a, c, g, or t
  misc_feature (722)..(722): n is a, c, g, or t
  misc_feature (725)..(725): n is a, c, g, or t
  misc_feature (778)..(778): n is a, c, g, or t
  misc_feature (786)..(786): n is a, c, g, or t
  misc_feature (794)..(794): n is a, c, g, or t
  misc_feature (810)..(810): n is a, c, g, or t
  misc_feature (815)..(815): n is a, c, g, or t
  misc_feature (835)..(835): n is a, c, g, or t
  misc_feature (852)..(852): n is a, c, g, or t
  misc_feature (912)..(912): n is a, c, g, or t
  misc_feature (921)..(921): n is a, c, g, or t
  misc_feature (953)..(953): n is a, c, g, or t
cttttaaaaagaaaaaaacaatttgntaacactcccttttctgtccagaaaaattcactctttcataatcaaattaccctaaaattnggtggcgttaagaagcaacaaaagtnaagcttccaacgaatctnttctctcaaccggaaatgtcttctatttccaatnanganaaaancntgaatnaantgcaaanaaaannaangttaaccctncantaattcnngaaaacaatantataaaaaaaaaaanaannnaaaaaaaaaacacatatnttcatattaaagaacannacnnataanatattntttaanataaaaaaaanagaatcttaannttgtggnacanaaggcnccnacattccctttncanaccatncactcaccattgggtggnatggnagcgccaccctgcnggccactcatacttattggctcacatatcccactaattctcctttgcgggtgctgaatttccaaggtggnggatttatttagagaccccctcagangccataaagggggacctttatgangttctttctaagataganatccccctcatatttgtagggtgggtgggttttctggnttnntttttnnttttntnnggggnnncagaangagccctcctcgangcagaaggcgggngggggggngcccccaaggggtcacaaccacccccccccctggggncnagcncngntnantagagacngggcagangcnggggcccagggaaggccattcgtttgggggcccgactcttcacgggtttctgnccctcacngatcgctncaggggcaggatttgnacgtnccatctttctggccggcatncattgagggtagggcgnataaactaggcgtttggggggagcgggcgtatacacctttcccgggcagttggacagagncacccgggnccatttctttttggagccaaaagacctgcgtncaatggaagttcgggcagcccccatccgcggggaatt

SEQ ID NO: 559138 - DNA, 454 bp, Homo sapiens
ccgggggggaactgaagcattttcggtttctagggttgttataaagctgcaggagcgagatggaggtggacgcaccgggggttgatggacaagatggcctccgggagcgcccaggttttaccgagggagggaggcataacttcaatgtgaggcctcattttggggcaaatgggcttcccaaacactcctactggttggacctctggcttttcatccttttcgatgtgggggcgtttctctttgtgtattttttgccatgacttgttcgctgatatctaaattaaaaacttggtttttgagtgaattctgtggctacaaactttttgaatgaagacaggactttcaatagaagaatttcacatctccaagggaccctttcttatattttacactttgttactaatttgcagaactctattaattgggtcggatttcacccattcctgctgttttt

SEQ ID NO: 559139 - DNA, 135 bp, Homo sapiens
acacgtattatacaagaaagcagaactatataccaggctgtaaacaaaaagtactctattagatagaggacactacagtatcctgaagctatatccccaagagctagtttcgtagatagaccttatgggcccatc

SEQ ID NO: 559140 - DNA, 186 bp, Homo sapiens
ttacgtctaccaatcccctagacctgtgaaagcaatgcaaactaggcacattctattatagtcagctccccatgtacgctttgggcccaaactagaccatagtctcatggttatagatcaagtcagcctatgtgcttctaatgccagtatccactatagtgatagacaggtccaacgagtatgcag

SEQ ID NO: 559141 - DNA, 937 bp, Homo sapiens
cttccgctgcctccaagcgccctctgggtgacagaccaatctgcgtgtgtctgtgaccgcctgtctcagtggcacgggcacttcctttctgtagctgggttagagcctgggtctgcctttcgtccagatcaccgtcgtgtttttgtaaaatctctgacttgtatttgcatttctacaagaagacgtgagaaatgggctgggaggtgccttctgtgctgcttgactacctcctgctggtgggtcccatggtagcgcggcctccagctgccgcaatttccatgccaggatattctttccgctgaatcagtcggttgaaattcagagtgagtcagaatgactcgacctgtccttcaatgttgataataaatgtctcaggcaaaaaccttgcttgagctgccatgctatttccccttgatctgtcacctcttccctcgtaacaatttctgcagggaagcccctgagcggaggcgccattgacaacgcatggtcttgccagtggctggcaaggcggttattgttctgcatcagttgctggagagggttggcatgcgtcccctgcatccagcctccccgcttgaggccagcactgagtctgggacactcagcgggaagggggctggcatcggccatgcgaccacagcattcctcacgtagtcttctgactcccaggaagggtaggtttaaaaatcctgtatatactttttagaggactcttcttaaagctattctgaaagtgcttgcatgttacatactttctcgtaccacacctttttggctgaaggacttccggcgaaagggagtcgtctgtccattcactggttacattttgtttctgcaaaggcgggcccaggcccctagggggccttcggtcagtgggaaccaagggccggagaaagggccgggggaaggacggaccctttttggccgataatttcca

SEQ ID NO: 559142 - DNA, 371 bp, Homo sapiens
atacctatggtgtggatctgcgctccagaacatgtgtgtgttcacggttctggccgtagagcagtgtagtgcattgcgtgtcttgacacgcctcacaggcagctcattgtctgacttgaccgatgtgggcttgcaccgtgcttgcatcactgtgactctgctgcttgttgacggcacactgtcttctcaatcaggccacgtgccttcacctgtctggtgaagtctggggcgcgtcaggattcagcatgaagggctgaggcggatgttcgctgtgcacagcacgtgacgggatactcgcagcctcctgcggcagtagcgcacatcaaggagcgtcgcccttgtcgtcacattcgatcttagctgcgatgcct

SEQ ID NO: 559143 - DNA, 757 bp, Homo sapiens
agcggagttccgaatgaatggcggggtctcctgagttggtggtccttgcaccctccatggcgacaaggagtctcgcggctggcacatggagagccagagccttgggtctccgccactccccgagaagactttcgggtgccgctgcatcgctcgaagcgggttgtgaccgaaatgctagaactgtgcggtcgcttcgtgcaaaagctcggggacgctctgccggaggatgattctggggagtgcccgcgctctgcagagatgctgcagtggacttttgaagtcagctgtgcaacgagcaatatcaaggattacatggtgcaaagccagtggcaggaaggcttcagactaactgtgtcttaaactggcattctgaccgctcgaaagtgacctttgagacgatcaagttcgtgattgacacattcgaataggtagactattaggccagaaacagggtaaacggcaggtatcccaagaacacgcatcctggaaaatggtgttcattcaaaaaaagcaatagaaaagccaaaaacaaagaaaagtttctggacaggcgagtacgcacctcgtggtatgtaacatcgcattgtgggacgcctaagaattattgacccctgatccaagcccgctcattatggcaaacaatttcgacacattgcacgaagcgggcggaaccaatgtaacgcaacacagtgagcatccagggtgcaaagcccaatagaaagttcgcgtttggcctttgcaatttaaatttagcaac

SEQ ID NO: 559144 - DNA, 509 bp, Homo sapiens
  misc_feature (145)..(145): n is a, c, g, or t
gtgactgcagtatttatttgactatttatggtaagggaaaagttgagtgttgttgtgaaagcctgatattagtaatggggatgatacaatctggcacaaagagaagttggcaagtaagtcaagtgtaattataggatctggtaanctctcttggcattgtagatgattggtattaaatgttgaaggcttgcagaaagcttcatcatcgttttggtctggaaggttaagggtaacctgagaataagaagaataaaatgaggtcttcagatgctaagcaggtccagggacatctggctgggggttaagtttaagagctatctttcttcttgaatttctttcctatcttcccttcccttgtaagattgaagcactgaagtcattctcaaaatcagacctggtcaactggttcaaggcccatagagggccaggaagtaaaatgctcagcgttcatgttgttggatatgggaagtatgaactggaagaggatggtaccccttctagtgaagatt

SEQ ID NO: 559145 - DNA, 89 bp, Homo sapiens
taacttttgggggggaaaagtattttggcagaagtttgtcttgcaatggttatttataaatagtcaaataaagtttttcacctattaac

SEQ ID NO: 559146 - DNA, 315 bp, Homo sapiens
  misc_feature (11)..(11): n is a, c, g, or t
  misc_feature (106)..(107): n is a, c, g, or t
tccttcacagntttttaaggtgtccagggcattgggatggttttccaggcaaggcaatcggccaatccgcatttcagccctttcagggagcagttttccatcaagnngaattttgttttccaggaacggcccctatgggggggggccgcagggccacccttttttttttaaaaaaaaaacaaaaaaacagccttgtttttttagtcccatcatgggtaaacaaggaagccaggaaaaaaggtttttttaaaaattgggggtttaattttgttttttttgcccccgccaaaaaaaagttttttgatggtcccccca

SEQ ID NO: 559147 - DNA, 471 bp, Homo sapiens
cgcagtcccattgttagaaagcatcaaagtcttgtgagtagctcattcactatcatcaagaacagcacatgaaagagctgcccacataattcaatcacctcccaccaggttcctcccacgagacatgggaattgtgggagtcacagttcaagatgagatttgagtggggacacaggcaaaccatatcagggagggagcggagaagtggaccagaacagaaatgccacaccaagcaggtcaacagcaaccaagccagagaaaagattgtgcaaactccggggacttgaagttcctcaggctcatattctgttttcagtgtctgtgagactcggctaggcactatgattgggattccttaagagtctacttcccttattgctatgcgtgtctacctattacatgtccttggtacttcagttgtcctaacggtgtgtcagttccttgcaaccaagagtgtcgcgggtaccgcgc

SEQ ID NO: 559148 - DNA, 169 bp, Homo sapiens
aggatctccgttggtggtattggccgatgagctggtttgactcattaatttctactacaattatgggtcccagctaaagaggtggggtgaagctggggacagcttatcctagggtagagtttattcttattgaataattgtagtagcacgtacaccctgttggccaaat

SEQ ID NO: 559149 - DNA, 1387 bp, Homo sapiens
gtattacatgtctggtagcatttaaacttttgatgaatactttcccctggttactatttcttggatactcacagaaatccctacaaattaagtaatgtccatcttttccagatagtgaatccagtactgaaatgttcaaattaattgttcaatattccttagctagtaagtgggaagagccagaattcaaacctatctcatcgcgtttatacgttaaagttttttctatctatcggtcttttttcagtatttgcgattttattaggaaggaagtttagaccatgggtggcttgaacatgccctaataggtgaattttgttattgggctttccagatggcttcttattctattttgcagttgcaaatgctttttctgtaaaaagagatttcctgaggctcttagttgtttactacttaactattcgtccacggtcatcctctttaatgacttcattaaaaataatgagcaaggtgttataacagtggattctatctcctaacatatttttccatctatggtaagtactatgtaggacagaacacagtgcttgaagtttccccaatagatttatgatctaaatcgggctgacgtaaaaggattgcttccaaactgtctgttcagcacaagttgctgagttctaattaaccgtcgccaaagcttggcgcttacatgtttcgaaaaaggtgccatagcggcacacgttcgtcaggtggtgttcccggcattggtgtgtcgggacaaacagcggctaatccaatcgtggttgttgtcatgtacagatttactatcatatattattattatccgacgacacacatacccacatccacacacaccgacacatacgccaaccacaacggcctgaggagcggggggacgagacggtacgagggacgggggacagggggcagagtgccgggaaggggaaggcggagcagacggaggggagggggaaggggcggaccgcagccgaccagagacaaagacggagggagggcgacgagaggacgaagaggagggggagggggacaggaggagagggaggacgcgggggggaacgcgaggccgagaacgcgggcgaggaccagggcacgcgagggtgcgagaggcagagagggcgaggcgggagaacggaggcagagaaagcaaggcagagaggcgagcgagagcggcaggagcagagaagacagaagaataagaagaagcgaagacagaggacgacggccacgcaagacacaagcgcgagcgagaaacagaagacaggatgacagccgcgaggaacgcggcgaacgggcagtgcgcgagagaggcgcgagagaacaggcgacacagaggggaaggagcagagcacagacgaacagcaggcacaacagagccacaaagcgg

SEQ ID NO: 559150 - DNA, 364 bp, Homo sapiens
gctgccgcctactactacttaaattcgcggccgctcgacgttctgtttctttttaaagcctggttaatggccgggcgctgtggctcacgcctataatcccagcactttgggaggccaaggcaggcggatccctgagttcgggagttcaagaccagcctgaccaacacggagaaaccccgtctctactaaaaatacagaattagtcaggcgtggtggtgggcgcctgtaatcccagctactcaggaggctgaggcaggagaatcgcttgaacccgggaggcggaggttgcggtgagctgagatcacgccattgcactacagcctgggcaataagagtgaaactctgtcaaaaaaaaaagtcgacg

SEQ ID NO: 559151 - DNA, 474 bp, Homo sapiens
aggtcccacttgtaggtatttttaaccaagagaaatgaaaacatacgtctacacaaagatctatttggaaacgtttatagttgctttactcataatagctaaaatctacccaaatatcagtccactggggaatggataaacaaactgtggaacatccacaataatggaatatcactcagcaataaaaaagaacatattgatacatgcaacaacatggagagactacactactgagtcaaaaaagtcaaatgcaaaggctaaatactgtgattctatttctatggcattctggaaaaggcaagatcaaaggaacagaaatcagtcagtggttgccaggcactaggtgttcaggatggggactgaaaaaaaaggggcatgaggaagttttggggggtgagggaagtgctctacatttcaactgtgattgtggttacaagaaagtatatatttattaaagctcaacaaactataaaa

SEQ ID NO: 559152 - DNA, 402 bp, Homo sapiens
gcgaagactgcttggccgggtgtgcgccctgtaccccgcgctgcggctggcggttccaggcgcactaccgcgatgaggacgggacttggttgcctatccccagtgacgaggaattgacaatggccatgtcctacgtgaaggatgacatcttccgaatctacattaaagagaaacaagagtgccggtgggaccactgcccaccgtgtgctcaggaggcgccccgaaatatggtgcaccccaatgtgatctgcgatgagtgcaatgggcctgtggtaaggaacccgctaacatgtgcaggtctgcccagactacgacttgtgtagcgtctgcgaggagaatgggtttgcaccgggggcacacaaagctcggattccccagcccctttcgggcaccttgtctgag

SEQ ID NO: 559153 - DNA, 335 bp, Homo sapiens
gggcagagctcggtgctatgagcaccagtcgcacacacacggcgagcgctcctacgggtgcccccactgcggcaaagccttcgtggcagagctccaacttgcaatcagcacctgcgcatcacacgggcgagcgtgcctacgcctgtccgtactgttccaatggccgttcggcctagaagctcatgacgcgtgctccagtcgaccatgcacgtgcgattctgggctgagcgtccctatctgctgtcagctctgcggtgaaggccttcggccaggcctccagcctcaccaagcacaaacgggtgcatgagggtgcatgccggtgcgtgcagatggct

SEQ ID NO: 559154 - DNA, 472 bp, Homo sapiens
cctgggtgcatgcattgtgcaggaacgtgcaggtttgtacataggtgtacatgtgccatggtggtggttcgttgctatcaacccgtcatctaggtttaagccctgatgcattagatatttggttaattcttcttccttcctggttcccttcactctcgaaagggcccagtatattatggttcccctccctgtgtccatgtgttctcattgttcaactctcaattatgagtgagaacatgtagggttgggttttctgttcctgtgttagtttgctgagaatgatggcttccagaggaagctgcttttcatccctgagctcaaatggaagccactgaaggtttcagggaggggagggacataatttggatttgtgactgtagaagattggtctgggtactaagtggacagtggttaggagggggccaaagtggggttggggagatcagttaggaggccatgaggtgagtcaggc

SEQ ID NO: 559155 - DNA, 686 bp, Homo sapiens
  misc_feature (135)..(135): n is a, c, g, or t
gttcacctctcgattccagtgaggtgtaatgcctttgacatagcgatagtgttcctgagtatgacgtatcaagcatggcctcgaatagcatgagtcaaattctacagctcggtcatcactgcgatagatgcgtcnttagacagtgtgtccggatcctactgtgtatacacgcaaaggaatgctgcatctgccatgctagtcgtgacgcggactgtgccgatgacgctatcatgatcataggtatcagtatcgtgcatggtaagtaaacgtgaatgtcctgacattaggtcttagcttgccagtgtattcattctggtaccagacgttagttcatctaacatcaggcgtaggtacctctcatccgacagagacaaatactcggcgtcatggctcatcgtatttcatcagctagtactgataggcatagcatctaacagtgtggatgcggacagcttgtagagtcatcagatgcgcctcacagtgtgcactttgtccgatgggattgtctcatcctagatgtccgtaccatgaagggtcgtccacctctagcatttgcattagtatgtcagtcatcacagcattaaactgtgttcttcgtctagctcgtgtaaacggatattcaattgtcccttgagtctccttagccaggtagtcattgatgtgctccttggccttaacggtggtgt

SEQ ID NO: 559156 - DNA, 933 bp, Homo sapiens
tgacatagctgcggatcagcatgcggcggaacaggtgcgcacacgcgagcgctgggccggctccccaccggagtgctccccccgcacgatggtgttaaaaccgagagcggggcacaaaaatacgggcgggcccgcgttccgccccaggccgaggggcgccctaccgctttcagggggcggaagtacaaccaggtgagggggtcgccttccggttcgccccaccgccgctttaagacgcagttagtgactgcggggctgctaaacgccgaaagaaatcaaggcgttcttcctttgagaagagccgtgaacctgtttattgtcgtgccaagtcagcgccttattgtggcgcgaaggttgaaaagagaacgacgagaaggcgcgatctcaaaaatggccaaggcggggaaagcaaagaacccgggtccccacgaaacccaccgcgagtgtgaagaacttaggaaaattgcgcaccccctggggaaagaaacggggaaagccacttgtagcccgtcctccccccccgctcccgcgcgtactcttccgaaggaccccaccactccccgggctgggagaccccaccggagtcttccctcagaaacaccacaccattgctaaaaacgcgttctatatcaaattacttgggtggaaatgataactaggtaaaagccccgggccctctcctgtgactctcttatggagcacccattacacgtcacaagatctctctaaaacgtctgataaagacccgctgtatacttcatcccgtgcgggaatttgaattcccttatcgttggaaacgcgcccggggcaattaaaaagtctcagcagccccccgttctttataggacttgtcttccataaacttttgacaacaggcgcgagaacacgtcaaagggtcccaaattaaaaaatttcaaacccccaaaaaaaaca

SEQ ID NO: 559157 - DNA, 205 bp, Homo sapiens
gtagagtcgaccagtctccatataaacgatatttggagggcagctcgttgctcacgtgtggacggttcttgtacagggaggcatgcaccgcagtggtgaatacacgtcgacctggctccatctaaacgatatttggtgatgagcacggttcttatgtatcgacggtacttgtacagagagttatgcaccgcagtggtgaatacac

SEQ ID NO: 559158 - DNA, 111 bp, Homo sapiens
ccagaactgatgcgcctgaagggaaacgatcctcaggcctgtactagccgttttgggtcgctcgaaatcggtttgctgtcctagaatcggatgcattcgcttctgatcaat

SEQ ID NO: 559159 - DNA, 126 bp, Homo sapiens
cagaggacgagtttacagaaccaaaacgagagcgagaaaacggccaaacaccgtgcgaggaggaaacccaagctccgccgagcgcggcgggtctgtgccttcgcttcgcttccagcctctcgcttc

SEQ ID NO: 559160 - DNA, 371 bp, Homo sapiens
cacgaggcttgccgcctagcgcctcacccgttacagggggtcagatgaagcggtatccgatccggatgcccgcttccggttgaaaaggggcgacgcggcgacggggagcgcggcaaacccttggcgtacgggaaagatccgtcgaaaatgctcgtggagccgggtcggtcttggttcaatcgcgaaacgtctccagctttctgttttgccgtgcttcttgtcggatacagggtccccacttctccggaagcactctatgattttgcgcccaatgatcgagctgctcggcttcatcatctatcttatcgatctctacgtctacatcgtgctgggctcggtcattctgagctgggtcatggctttcggggtcg

SEQ ID NO: 559161 - DNA, 157 bp, Homo sapiens
tagcagcatgtcagcttcgtatctctcaacatgaggcccaaatcaagtcattgactgaataccttcaaaatgtggacaaaaagaaagacagttgaggatctgtcgatgccctcagtgaagaactagtccagcttcgagcacaagagaaagtccatga

SEQ ID NO: 559162 - DNA, 519 bp, Homo sapiens
  misc_feature (75)..(75): n is a, c, g, or t
  misc_feature (113)..(113): n is a, c, g, or t
tttcaatcccggctggagcgcaatggtgcgatgtcagctcactgcaaaactctgccctcccaagatgcaaatgantctcgtgcctcagccctccccaagtagctagaattacnaggtgtgcactaccacgcccagctgttttttgtagagatggggttagtagagatttgtttaatagagacggggtttcaccatggtctctactaaaccctgtctctactaaaaatacaaaaattacccaggcgtggtggcacatgcctgtagtcgcagctactcaagaggctgaggcaggagaatcacttgaacctgggaggtggaggttgcagtgacccaaaatcatgcactctagcctggggtctcgcttttgcccaggttagagtgcagtggcacaatcatagtggctcactgcagcctcaaactcctgggctgaagggaatcctcccacctcagcctcccaagtagctaggactataggcatgtgccatcatggcgagttaattttttgtgtgtttttattgt

SEQ ID NO: 559163 - DNA, 281 bp, Homo sapiens
  misc_feature (149)..(149): n is a, c, g, or t
  misc_feature (153)..(153): n is a, c, g, or t
  misc_feature (256)..(256): n is a, c, g, or t
  misc_feature (263)..(263): n is a, c, g, or t
gtaaaacttcaaactggaaaaatgtggccataagaatgcatggagccggacgcggtggctcatgcctgtaatcccagcactttgggaggccgaggcggacagatcacgaggtcaggagatcaagaccatcttggctaacacgaggaaantgcngtctctactaaaaaatacaaaaaattagccgggcgtggtggtgggcgcctgtagtcccagctactcgggaggctgaggcaggagaatggcctgaaccttggangcggacnttgccagtgaaccgagaa

SEQ ID NO: 559164 - DNA, 137 bp, Homo sapiens
ctagataggaggagggaagaatgtgtagccccacacactagtcctctggagcttatctaggctccatagattttaaattaaaattattataaattgggacttaaattctaactttgtcccccgggtgggaatccggg

SEQ ID NO: 559165 - DNA, 1492 bp, Homo sapiens
  misc_feature (784)..(784): n is a, c, g, or t
  misc_feature (831)..(831): n is a, c, g, or t
  misc_feature (833)..(833): n is a, c, g, or t
cacctggctattttttttgtatttttagtagagatggggttttgccatgttggccaggctggtcttgaactcctgacctcaagtgatccacccgcctcggcctcccaaagtgctgggattacaggcgtgagtcaccgcgtcctgcctgctcttcctgtttctttcccaagggtcacactcagtagggagatgaaggtggaaacatccttgctgtggctttctggcctcagagcaggttttagaggaaggggccacaggctgcctagtgcatcctggctgtgggcagcccctttcctggagccctcctgcctaccccgtacctcccatctggctgcacagctccatccttagccacgcaaggggagaacatgggcagagtctccatccagcagctgggggttctggtggcactccctgtgcccctgctgctgctgggctgtgggtctgccctgcacccaggagccccacggtccatcccccacaccatgcccagcaccagggaggttgggcagacaagacctgggccatgccagccctctgtgcctcggttttcccactggttacacaggatggtcgcattttccctgcctacctcacagagctgttctgagggtgcatggaggagcactctgtcccaccaaggacaactagaaaccaaagccatctgacagccagtgcggtaagggcgggggatgtgtgtgtgaggtgtgcacaccccccgagaacctggccctggactggcctcacaggacaggaggcagcccttgtagagctagggctcagncccatcagtctcaaaggttaagccaccagtcaccaccgaggcacccntnaggcctggtggccactgtccactattacgtagacagaccccaccctcacccaggccagctgtgggccagtcccgccctgcaatctggtctgctgccttcctcttccatgttggtccccttggccactgtctctgggcatgcaagccagtgtcctggttcagtgcctcggccagagctggggcaggagaggggcctctgggtgagagctgggggtgtctctgcagggtactggcagccttgccacactgtcctcattcccagatggaaagacctgagtgcctctcgccttcctccgggaatgaattcctcatgaaaatgaccaggccacttcttccgagggccaggccgccccctccccgagacctgtcctgccgtccgcgggtgtgtggcctgtaggggactgagagctgggcttgctgggcacctctggaatctgaccctgtgggccaaagaagcaccactgtagtttctgcagacccccatgcggttcattgtgcattgtttggtttctaggatgtatgtgttgctagttttttttaatgaaaccctggattaatgtaaatagctttttggggaacggattctaatgtcacgtatgtgaccgtgtggactatttcaaggtgctgatgcaacactaataaacctggaggggccggcaa

SEQ ID NO: 559166 - DNA, 127 bp, Homo sapiens
tcaatagtctagggtaggtaactgcttctctgcctccaggactgtgtaggttaatgacagtacatttcaactgctgttctatctaggtatgcactaaatacccttgcatatctacatatgatacaaa

SEQ ID NO: 559167 - DNA, 401 bp, Homo sapiens
  misc_feature (21)..(21): n is a, c, g, or t
  misc_feature (28)..(28): n is a, c, g, or t
  misc_feature (54)..(54): n is a, c, g, or t
  misc_feature (70)..(70): n is a, c, g, or t
  misc_feature (87)..(87): n is a, c, g, or t
  misc_feature (256)..(256): n is a, c, g, or t
aggttacatccccccctatangaccccngggctaaagctgggcatatttttttncccccttggcttcacnctaaaatcctcatgggncctcagataatacataatatatatcctatgtttcacatggaccagcccaggcgtcataaagcttacaacagcatacagtaaggagaaacaatagtagtttagttattataaaaatatgttatatattcagatagaactgggttcccatcttgtttctgttattgttttncctggtaatggtgtgacttttctgagtttgttttttcatcagtaaaatgaatataataatgccacttcaagatttcttagggggttggatgttaaatgagattaagtatctagcgtgtgattggtgattgtgatgtatataaata

SEQ ID NO: 559168 - DNA, 516 bp, Homo sapiens
  misc_feature (324)..(324): n is a, c, g, or t
  misc_feature (395)..(395): n is a, c, g, or t
  misc_feature (431)..(431): n is a, c, g, or t
  misc_feature (505)..(505): n is a, c, g, or t
ttggaagtttgactaccctacattctcctgcaaatggaccttgagagcttgtttggaggttctggcaggggagcgcatactcgtatacccttgaccaaagaacagtcctcctctattggggaaggttgtcctcttctgaaactacctttgcaaaaattatagcagtgagaaaattatgacagtgaaagaaatctgacctaattgactccatcttgcttctaacctcccagctgcccttgttcattcctggggcatagggagcactaactttgggaggatttagtttatagtttaactttgaaacaaagatgataacagcccctncctgagaccaacccacttcttgctggggaccagaaagcctttgtaaaactaaccacattggccacaagatnggaaatgacggctcaggagtcatgcagccaaaggcntcgaggatcatgaaccttcccaaattgctcctgtagataatattattattgtaaaaccttaccatgggtgtttnaggtattttta

SEQ ID NO: 559169 - DNA, 457 bp, Homo sapiens
  misc_feature (182)..(182): n is a, c, g, or t
gaggcttagcaaaggcgcgtagaggacgcgtttcgaggtgtgagaccccggacagctcttccaaaaagctgatccctaggcggcaaagatcgggaagaattacctaagcatgatcgaagtacaaagtgtcctacaaggggccaggaccaggcatcaagttcagtgcagagcgcctgcgctgncacctccgggaccatgtgaatgtattcatggtagaggtcagagattttccgttcaatacctctgaatgggagggttatcagcccaaggagagcattaggaccaaggcggggccttggggcaggtgtgcggttgtgtcgtcagcgtgatctctgaagtcttcctaattaggctgagaaatcgaggatcatgaggcaggccgtgaggtatactggggcacccaaagacaatttccatgaagatgtgggcacaaaagagtaccattggtctgatgaag

SEQ ID NO: 559170 - DNA, 205 bp, Homo sapiens
gactccactagaggctgatctggtgaccttcacgccagggtctgtctgtcggtaaatactatcaagagtgaattaaaacagtcgagtacttctctgaatccaatcctataattattttatacagtcatttctcagctgtgatctttggagcaacagccaagggcaggaacaactagtttgtaccagtttcatgaagtatgtcttt

SEQ ID NO: 559171 - DNA, 371 bp, Homo sapiens
cttcttaaaaatattacatgttaaattatcctgcccccagagggtggtttatccagaaaccaagaaaaaaaatcaatcccaataaactcaaaaaaaaaaggtatggggagcaaaaccataaaccaccaggcaggcaggccattagcccaccttcacctttggagggtccccaaagacccacgcccgacgcagaccctgaggagcatcaacaaggggcccgggccgagaatcggctatgtcttcattatgagagcaggagagacggcccagatatgttgctaggtgaatatatatttatataataaatccgtaagttaataaagtaaatagcaattctctgaaagtttttaaatctttcttttttatagttt

SEQ ID NO: 559172 - DNA, 393 bp, Homo sapiens
agactgatacagcagatatcgctgtataatagtcatgatgactccgaacagcgtagcacttagcatgcatacagattgtatttacagtctcctcatagctataaagctccttattttgatgaccgagttccctttccagcttctactgattactcaacacagtatggactgaaatcgaccacacattctgtagacttttattccactaaaacgaccatcttatagagcagaacagtacccagggtccccagagtcatgggtagtaacatcaagatgcccaagagaggcactactttctattctaaccttgttcagatagcggtgaaaagtccatcttgctgatttgatgattgccatgtgccagtgcagtggaaggaatagaatacagtgtgt

SEQ ID NO: 559173 - DNA, 230 bp, Homo sapiens
ggtcgactcttagagtgatccccactgggtgctccatcccccggcggggtcgaatgaaggtggtgttgaggttgcgcgtctgttagtagtatagtgatgccagcatgctatgcgactgggagagattcgagaagtacgactgctgtgattacgacggatcagactaagagtgtgcgtttggtattgggttatggcaggggcgtctatattgatcacttgcttgtgattaa

SEQ ID NO: 559174 - DNA, 706 bp, Homo sapiens
cacgggagccatatgaatgatctgccgcagtgcttcttggccctaggaggtcatctcttcgtgtccccgttggtggcccgactggccttgtattagccaactcctcaccttgagcctcggtctagcgcgagcaccgttactacgcttgtagctcaccttcccctatggcccatccataaggggcctgtgtatttgcccatcattagggagagcttctattccgctcgatttcgcccctattttccaggcgtacacaccctgaggcccatacacctaacgccctaaatcccatttcgcacctatctcatattctatccggcgggtaaatcctaacatttcttttccgccacgaacaacatttttctggcgcctatcccgggatgcccccgacagttacatctgggcataccccgatgcgatacaccaccatggaccatcctatctatctgtaggcgtcattcatttcttcttaccagccagtaatattaataattttcatgatttgagaagccttctgctttgaagcgaaaagtccttatagtagagagaacccctcccataaacctggggtgactatatggatgccccccccccttccacacattcggaggacccgtatacattataatttagaccaaaaaggaagggatcggacccccccaaactggtttcaagcccaccccctggcctccatgacctttttcca

SEQ ID NO: 559175 - DNA, 1527 bp, Homo sapiens
  misc_feature (148)..(148): n is a, c, g, or t
  misc_feature (358)..(358): n is a, c, g, or t
gggagtctttgattgaacagcagatgctaaatatgcatctaggcataacgggccacagactgtgagtgccaccaatgaatgccactcgaggatgcagagatggtctcgggataatcctaccatgcagtgtgattgcagggactcatgngagaagagcataggctcgtgcaggatccgagggtcccaggaccaggaccccgtgaatagccagtcgctcaccaatgcagtttctggcacacaagctaagctcaagtcctcacgagatggtccgctggtacgcgcagtggaacttagacgcggagtactcccgaggagacaagctgatcacgttcaagtcgcgtcggtcacacgtcgatcngaccgcatgtcagtcttgccattcgctgaagttaggggcagatgaaagtcctcacgtgtacgccacagagcagctggttcattaagtgctacatatgtcactagtgcacgtcaccgtttcggcacgcgtgatgacggacccacggctaacaagaagcaggtgcaaagatctcattctgcgaaagagggggcctcgatcctgggaacgaatcgtgtcgcctcgcgcattcgttgatcgcccatcctaacctcaatgcagttatggaagggtgccagcggctcccctcagttcagagctggcattggtcacgcacgcatcgtcgtcccttgtgcgctcctggacattgtagtcgcgtgatgtagtgcattgcagattcctttaggcgttccgcggttgcgttgggtcgagctggtgcgcttgagcaccggatagttacctcgttatcaactaggttttattagacacgaaagaaaacggaatataggttggcacctacgtaggaatccccggagcgcctcaattgagcgcaagaagaccgttctgaggtgggattcaacccccagagtggcattttgggagcgaagcccatttatccgccaagagacgctgagtgttaaccttggctggcgtcgttccccgggtctggctcccccgcttcggaccctctcctttttggggatcctctccctttccccccgtcattttgtgcgcgtccccttttctcgggtgtcctgttatcgggtgggtcctcccccccgttgcttttgtcccccgtggcatgtcagtgcgggattttgccctccttgagggggagggacctagtctggctggtgagaccctttactttctccatttggtgcgggtgtgttcgactaattattccgggtgtttcctctgtggccccgctggtatgttttcaccgggttggtggccaccccaatcggggtggagcggttcaagaaataccttcccgtgactttcacaacagagggggtatctctggggcgacgacagccgtcgcgaggtataaccacaatgagggccagcagagataatatgacacacgtggttgtaacggactcccttgaagatgagaggaagtatccaaagaaagaggatgctgcctccgtccatcatctccaaacgaaagatagaatgccccacgacaa

SEQ ID NO: 559176 - DNA, 128 bp, Homo sapiens
cacgaggacgagcacccctgggattctggagaaagatggcggtacttcggttcaggcggaggcatccttaccaaggaatcggcttttcaagtatgccaccaacattgaattaggttattggtgtgatt

SEQ ID NO: 559177 - DNA, 1059 bp, Homo sapiens
tggagagctagtctgtatatgctactagaggaatcatatttttatccttaagtatctagtcagaaaaagtcttggctgcacaggacaacacatagagggagttactagaagataggcatatgaagatgcctatatgaggttctatggtagagattcaggaaattgtcgaaaacagggctatagggtaggcgatatgcttcatttacacaagttctagtgaacagatataaatatattatagtatggaggcagaaatagtcaccatagcccacttggacaggacgatgtatctcctaggctacattcctaaagacaacaggctattatctagggggataaacgacattgaacatcattagctatatccctgctggtttcagtacctaggcaactactcagcacacgctagtacatagcggcagcggactattaggcataggctcgataaggtccttcctaccatatccaaaagaacagaggatcagagtagcacacttcaaaggacaaagcagggctatcaagcagcaagctcttacagtatccacagatcctgagcactcgattagagacttgctcttcagcttggacgagtcaaccacttgccataccaggttacgcagtggaacagcagagtcagaacagcaagtggacaactaacttgctgaaacttgccatctagctacatgtccagtttaggcctaaatccaggaagtgcctgccatacatggcacaggattataggacggcctggtgccttatcgaccctaggcctctggcaattgtcaatataggtgaacaagcaacacatggtgccgacaaaatgtccaaaataacgacgccatcacaacccaacactaaacacgacacgggtggcgcgccgcccaaaagaccagaaataacaccgagagagcacagaaaagacaaaggagacgaatcaatgcccgccgcagtcagcgtcaccaacgcgggaacgaacacaaaagcagcaccgtcaaccctgacgccaagagaaacaccccacacaatcgaccaacagcagaaccaaagcggcacagcggc

SEQ ID NO: 559178 - DNA, 136 bp, Homo sapiens
tttaggagagaagtccccatgtttcctgataaaggttttgggggcggctggtggataagtttgcagggctggaaatggcagggcccccccccctgagaaggcagagctgcaagattttgccttttagtagaactga

SEQ ID NO: 559179 - DNA, 759 bp, Homo sapiens
  misc_feature (25)..(25): n is a, c, g, or t
  misc_feature (42)..(42): n is a, c, g, or t
  misc_feature (64)..(64): n is a, c, g, or t
  misc_feature (69)..(69): n is a, c, g, or t
  misc_feature (98)..(98): n is a, c, g, or t
  misc_feature (389)..(389): n is a, c, g, or t
  misc_feature (478)..(478): n is a, c, g, or t
  misc_feature (480)..(481): n is a, c, g, or t
  misc_feature (483)..(483): n is a, c, g, or t
  misc_feature (489)..(489): n is a, c, g, or t
  misc_feature (491)..(491): n is a, c, g, or t
  misc_feature (494)..(494): n is a, c, g, or t
ctaccttacctacctacctacaacnttggaggggggaaattngggaaatttttaatttggggcnccaantcccatatatgcctaagcactttaccaantatctcatttaaatctttataatgagctcggtaccgaattactgttgtcccattttgtggaagaaactgagttagagaagtccaatatgttgcccaagggtaagcaaccagtaaactatagaatcaggattcagatctcagtccttctgcctccaaagctcatgccacactgaatgtggaaggccttaatgctcctccaatctggaattgtattttgtaagccaaagacaccttgatcagagcagaggtatagacttacagccagaagagatactgaaggccgggtgtggntgtcacgcctgtagtccttgcactttggcaggctgaggcagtcggagattgcttgagctcaggggttcgagaccagcccgggcaatatngnnanaccctntntcnaaaatgcaaagaaaaaattagctgggcgtgatggcatgtgcctgtagtcccagccacctgggagaatgaggtgggagaatcgcatgagcccagaaggtcgacgaggttgcagtgagctgagatcatgccactgcactccagcctgagtgacagagtaagaccctatctcagaaaaaaaaaaaagattttgaagataagttaaaactcactatacagttgagaaatttatttttaggattccattcggggggggatcctctaaagt

SEQ ID NO: 559180 - DNA, 121 bp, Homo sapiens
cgggtatgatcacaggcagaacctgaaactctatgtaggactgcgtacctccgcacatggagacataaaagtagatctggactggccgaaaaacagagggagcgaacgcgggaacagacag

SEQ ID NO: 559181 - DNA, 358 bp, Homo sapiens
tttggctcagcgacgggacgacgtggggctgcggagcggtgcatttgacagagtgtctgcagcgtgggccacatggtaagagcctttgatcaactgtttaacatgtgctctaactgatgtaactgcacacgtgttttagatgtggttatcccagtagcacactcttacagaatcatcaggttaaactggagctgccggtgtaaaagggagttcggcttactgaaggactaaagactgaaggaaatgattagactgttaagctgtactaggcttcctgaaatggggttattgattgtgcatttcacacgttcttgaggcgttggacatatcactttagacttctaatgagaacaaactt

SEQ ID NO: 559182 - DNA, 1002 bp, Homo sapiens
gcctcggctcccaaggtgctgggattacaggtgtgagccaccggctggctactatagctgttaatatgtgaaatctaaatggcatttttgacttgacagctcagacttgtacttcatgtattcagaagtttttagacaacaattagtttattgtctagttcattattaaagataatgaactaggccgggcgtggtggctcacacctgtaatcccagcactttgggaggctgaggcgggcagatcacttgaggccaggagttccagaccagcctggccaacatggcaaaaccccgtctctactaaaaatacaaaaaattagccgggcgcggtggcaggcgcctgtagtcccagctacttgggaggctgaggcaggagaatggcgtaaacctgggaggcggagcttgcagtgagccgagatcgcaccactgcactccagcctgggcgacagagcgagactccgtctcaaaaaaaaaaaagaaagcaagtttcacatgaataatgctgtgttggaaggctttttgatttaaaatcttttcggatttataacatcctgttaagttttaggagaacccgttttcccagagcagattcaagcttctaaaaataaatgctttcagtagcaggaatggcattgtttaaaaagctgatggcagggtaagcatttgggttagtgttttattaacatatttgtaagtacttgttcattgtggaaatgtgtccttgactaaaaccatacgtggctatggaaaccatgtttgtagttctgaatacacaggttttgtgtgtatttactctatgtattaaattattattgcccttagtttaaagtaaggattacaattggatttaagtagatcactgaatgttattgtttatgaaacttaactttttgtatgctgcttataaacatgatctataaatcagtgcttgggaaaattttactttcttaatctactgatacaggaataaaatatgaacaattaaacaggttgatccttgaa

SEQ ID NO: 559183 - DNA, 1436 bp, Homo sapiens
gcctcggctcccaaggtgctgggattacaggtgtgagccaccggctggctactatagctgttaatatgtgaaatctaaatggcatttttgacttgacagctcagacttgtacttcatgtattcagaagtttttagacaacaattagtttattgtctagttcattattaaagataatgaactaggccgggcgtggtggctcacacctgtaatcccagcactttgggaggctgaggcgggcagatcacttgaggccaggagttccagaccagcctggccaacatggcaaaacctcacctctactaaaaattaaaaggttagccaggcatggaggcatgtgcctgtaatcccagctgcttgggaggctggggcaggggaattgcttgagcccgggaggcggagattgcagtgagccgagatggcgccactgcactccagcctgggcaatagagtgtgactctcaaaaaaacaaagataatgaactggtttgcatttcttttaaagagatgatagaggaaaatatagttttttgtaagaatgtttatctctcttaaaagataatcttttaattttcttcagataacaagttattattattttttaagaaagcaagtttcacgggccgggcgcggtggctcacgcctgtaatcccagcactttgggaggccaaggcgggcggatcacgaggtcaggagatcgaaaccatcctggctaacacggtgaaaccccgtctctactaaaaatacaaaaaattagccgggcgcggtggcaggcgcctgtagtcccagctacttgggaggctgaggcaggagaatggcgtaaacctgggaggcggagcttgcagtgagccgagatcgcaccactgcactccagcctgggcgacagagcgagactccgtctcaaaaaaaaaaaagaaagcaagtttcacatgaataatgctgtgttggaaggctttttgatttaaaatcttttcggatttataacatcctgttaagttttaggagaacccgttttcccagagcagattcaagcttctaaaaataaatgctttcagtagcaggaatggcattgtttaaaaagctgatggcagggtaagcatttgggttagtgttttattaacatatttgtaagtacttgttcattgtggaaatgtgtccttgactaaaaccatacgtggctatggaaaccatgtttgtagttctgaatacacaggttttgtgtgtatttactctatgtattaaattattattgcccttagtttaaagtaaggattacaattggatttaagtagatcactgaatgttattgtttatgaaacttaactttttgtatgctgcttataaacatgatctataaatcagtgcttgggaaaattttactttcttaatctactgatacaggaataaaatatgaacaattaaacaggttgatccttgaa

SEQ ID NO: 559184 - DNA, 136 bp, Homo sapiens
gatagctataaccttgaagatggggtccaggatcagctggcagtaaggtgcgtggcagcttcttcccttcggggctaggtggctgactatgctgaactcgccgttaggccgatctgaggggatcctctagtagtcg

SEQ ID NO: 559185 - DNA, 1495 bp, Homo sapiens
gcctcggctcccaaggtgctgggattacaggtgtgagccaccggctggctactatagctgttaatatgtgaaatctaaatggcatttttgacttgacagctcagacttgtacttcatgtattcagaagtttttagacaacaattagtttattgtctagttcattattaaagataatgaactaggccgggcgtggtggctcacacctgtaatcccagcactttgggaggctgaggcgggcagatcacttgaggccaggagttccagaccagcctggccaacatggcaaaacctcacctctactaaaaattaaaaggttagccaggcatggaggcatgtgcctgtaatcccagctgcttgggaggctggggcaggggaattgcttgagcccgggaggcggagattgcagtgagccgagatggcgccactgcactccagcctgggcaatagagtgtgactctcaaaaaaacaaagataatgaactggtttgcatttcttttaaagagatgatagaggaaaatatagttttttgtaagaatgtttatctctcttaaaagataatcttttaattttcttcagataacaagttattattattttttaagaaagcaagtttcacgggccgggcgcggtggctcacgcctgtaatcccagcactttgggaggccaaggcgggcggatcacgaggtcaggagatcgaaaccatcctggctaacacggtgaaaccccgtctctactaaaaatacaaaaaattagccgggcgcggtggcaggcgcctgtagtcccagctacttgggaggctgaggcaggagaatggcgtaaacctgggaggcggagcttgcagtgagccgagatcgcaccactgcactccagcctgggcgacagagcgagactccgtctcaaaaaaaaaaaagaaagcaagtttcacatgaataatgctgtgttggaaggctttttgatttaaaatcttttcggatttataacatcctgttaagttttaggagaacccgttttcccagagcagattcaagcttctaaaaataaatgctttcagtagcaggaatggcattgtttaaaaagctgatggcagggtaagcatttgggttagtgttttattaacatatttgtaagtacttgttcattgtggaaatgtgtccttgactaaaaccatacgtggctatggaaaccatgtttgtagttctgaatacacaggttttgtgtgtatttactctatgtattaaattattattgcccttagtttaaagtaaggattacaattggatttaagtagatcactgaatgttattgtttatgaaacttaactttttgtatgctgcttataaacatgatctataaatcagtgcttgggaaaattttactttcttaatctactgatacaggaataaaatatgaacaattaaacaggttgatccttgaaaaaaaatatataagattcatatgtaagaagggcctcgcggcccggaatttattagtatt

SEQ ID NO: 559186 - DNA, 1110 bp, Homo sapiens
  misc_feature (10)..(10): n is a, c, g, or t
agtaccttgncaaaccatgccgttgttctgacttttgactatttaaaggataaagtagtatttaatgtgttaggtatgtttatgcccttgtaagctatactgcactccagcctgggcaatagagtgtgactctcaaaaaaacaaagataatgaactggtttgcatttcttttaaagagatgatagaggaaaatatagttttttgtaagaatgtttatctctcttaaaagataatcttttaattttcttcagataacaagttattattattttttaagaaagcaagtttcacgggccgggcgcggtggctcacgcctgtaatcccagcactttgggaggccaaggcgggcggatcacgaggtcaggagatcgaaaccatcctggctaacacggtgaaaccccgtctctactaaaaatacaaaaaattagccgggcgcggtggcaggcgcctgtagtcccagctacttgggaggctgaggcaggagaatggcgtaaacctgggaggcggagcttgcagtgagccgagatcgcaccactgcactccagcctgggcgacagagcgagactccgtctcaaaaaaaaaaaagaaagcaagtttcacatgaataatgctgtgttggaaggctttttgatttaaaatcttttcggatttataacatcctgttaagttttaggagaacccgttttcccagagcagattcaagcttctaaaaataaatgctttcagtagcaggaatggcattgtttaaaaagctgatggcagggtaagcatttgggttagtgttttattaacatatttgtaagtacttgttcattgtggaaatgtgtccttgactaaaaccatacgtggctatggaaaccatgtttgtagttctgaatacacaggttttgtgtgtatttactctatgtattaaattattattgcccttagtttaaagtaaggattacaattggatttaagtagatcactgaatgttattgtttatgaaacttaactttttgtatgctgcttataaacatgatctataaatcagtgcttgggaaaattttactttcttaatctactgatacaggaataaaatatgaacaattaaacaggttgatccttgaa

SEQ ID NO: 559187 - DNA, 1847 bp, Homo sapiens
gcatgcgcctgtgtggtcaccgcggacgactttgtgttacttgccctgctgactgctgaatgagtgtgtatctgtgtgatgtgcctttcttgtgcctgggtgcctgtgcaccagctgttgtcctctgtcttgtgtcaactgtgtgctgtgctcacgtgatgatgctgctggctgtgagcatgtgccctgcatgtgcagcatgcagtcccacagcgtgtgccatcgcactgcccaaccctttgtcctgacgtgtgcctggcccctgctgtgtgctcctgtgcgcctgcctgctgtgctgtcctcaatcctgccttgctccgtgcccctgtgaatgtgctatccttcccattgcgcacacgactgtgtgacttccctgtgtgatgcgctgtgctgtgctgtgccctgtgagcaacaggttgtgactatcttgcccttcaggtgcttgctgcgacgtccctgcaagccctagcacgcgcacgggaatttgctcagcccgaatgtgcaacccgcccccaacggcaatggccttccccggccccctgcgcacgcgcgattgcctgcgcgcgcaaggcgcaagcccctccggactgcgtccccccaagacccttaagacgcgctcttgcccttatcacctgccgggcgagacgcccctttgccccttcggagcgcccccaactgcgatggggcaccacccccccaagacacgggcccaacccagccacggtcgaacacgtgatggcccaaccccccaactggcccaagccagcattgcccaaccctgcttggccctccccccaaaatcgtgccccgagtttgccttggccccaaatacgccgctcgggttctccctggccccccctgcactgtggcccccgcacccctttgggcccaacgagaggcccccccttaaactttggcgagcaggcgggattagccacgggcccagtatatcctaagccgcggggcctgcgaaagacctctgtgcgccccccaggcgccagtatggcgcccacggccccatgggcctgtgtagggatatgcggtatacggcgcgacgattttcgcgcgccctttttgacccaaagcccgcttcatctcgcgcgcacccttttctgcgtggaaagagggtaggccgcgcacgcgccctcatgaggccactagggccccggacgtgtaggcaccccgtatatgccccgaggccccccccttctgccccgcggccccccccgtcgcgatatagggcggaaggtcaggccatcgcgccctcgcacacccccggtgcgcccccccaggtatgagtggccaccacgggcaccccgatcgtttagggggaggagcgccgcccccacgccatattcagtacctattgacccgccccgagtgcaggcgcacaacagccgtaggtggccccccccattattgacccatcagctgactatttgactatgcgacccaagaggaagacacccggccccgcccttatatatcccacgagacaatggcaccgtcaggaccccacattatacgaccaggcccccaccactcaccctctacttttcactccctggtcacgaccccacccatcgctccctccacacacacacattctacatactccccctagtccaacatattcctacaacacatccaccgcaagtacctcgaacatcatatgcaacctactcaccacccagacacgtaatcagctcccacaccctcacctaatctttactacgccccctcacccacatcaacgacgtaccatttcatccccccccacttatcgagccaacaccacaactacagctgcatgataaccaactccccccgctcattaatcacaccaa

SEQ ID NO: 559188 - DNA, 157 bp, Homo sapiens
attgccgccggttatgtgcttagcatacagctactagttgggggttttataaaaaattagtcctatagtgtctgggttttgtttggtttttgagatgagctctgctcgttgcccaggatggtctctgcatttgtctgttctcatgctgctgataaag

SEQ ID NO: 559189 - DNA, 385 bp, Homo sapiens
atgcgcggcgctctgaggatcccgtctgtgactacccatctctatttagttatacttcttcctttccaacctagatgacttttattttattttcttgcctaattgccctttcttgactgtccagtacaagttgaatagaaatggccaaagcagacatcgttgtcttgtttctgatctcagggggaaataatccagtccttcaccattaagtatgatgctaaccatgggttcttcatagatgccctttatcaggttgaggaagtttccttctattcctagtttgttgagggttttttttttttttttttttttttttttttttttttttttttttttttttttttttttttttttttttttttttttttttttttttttttttttt

SEQ ID NO: 559190 - DNA, 248 bp, Homo sapiens
ggggggggaaaaaaatttttgttttttgggcaaaggggttttcccctggggggggcaagggcctttttggaagtttgggggtttggggccaccctgggcaaaagggggggggccccccccaaattcaagggggaattggggggtaaggggttttaagggccctgggggggggtttttggggggtccccccggggttgccccccccccccccccccttttttttaaaaaaggcccctggggttttttca

SEQ ID NO: 559191 - DNA, 1252 bp, Homo sapiens
tatatccacgtcgacggctgtttggtgaaatcgtttgcacagatctctgtgttttcttaacgggaatgtcctagtcctcatttaaaaccgcacgttcttttgttgcggctatcgtcttttcgtataagagacggtgttcctcaatatggcgattcaagattagtattacatgggtgtataacatcgtcgtagacctttttcctcataagcaaagttcttggtggacaacaatttccttgttgtacaatggatgttgatagttaatagaaaagtggggtccaatgataaatgctgtccgcacatgtaagcttctcgaaaaattgtgggacccggctgtactgccattgtggtatttggttcaagcgtcttaatgtgtgacctgatgccctttcagctgaagtcgttctagttacgttggtacaaagttgtcccagttaacatgtcctggctgttaatcatctggccccttgagggcacatcacagtgtgaaggacctgtttaaggttgtaatagactttgcgctgaactattgggattctactaattctgagtgagtttccacgtatgagaggaaattaagatttcctcctccttcgctgctcatggtatatttgactttttgccagaaactgcgtttctctctgattttcttagtatttggtgttttgagatggagtctcactccagcctgggcgacagagcgagactccgtctcaaaaaaaaaaaagaaagcaagtttcacatgaataatgctgtgttggaaggctttttgatttaaaatcttttcggatttataacatcctgttaagttttaggagaacccgttttcccagagcagattcaagcttctaaaaataaatgctttcagtagcaggaatggcattgtttaaaaagctgatggcagggtaagcatttgggttagtgttttattaacatatttgtaagtacttgttcattgtggaaatgtgtccttgactaaaaccatacgtggctatggaaaccatgtttgtagttctgaatacacaggttttgtgtgtatttactctatgtattaaattattattgcccttagtttaaagtaaggattacaattggatttaagtagatcactgaatgttattgtttatgaaacttaactttttgtatgctgcttataaacatgatctataaatcagtgcttgggaaaattttactttcttaatctactgatacaggaataaaatatgaacaattaaacaggttgatccttgaa

SEQ ID NO: 559192 - DNA, 492 bp, Homo sapiens
  misc_feature (274)..(274): n is a, c, g, or t
ataggcatgagccaccgtgcctggctcaaaatttcttttttgcaccaaaatacactcatactaacttgttatgtctgatcaggatctagtttgaggcactgaaaatatttgagaagtttgagggctggggcaggaagattgcttgggggcaggaagattgcttgattccaggagtttgagaccagcctgggcaatacagcaagacccaaaaaatttaaaaagaaattagccagccatggtggtgcacacctatggtcccagctacttgggaggntgaggcaagaggattgcttgagcctcagtgctctcatagaacaaagtgagccatgatggtgccactgcactccagcctgagtgacagagtgagactggtctctcaaaaaagtttgaagaggctgggcgtggtggctcacgcccgtaatcccagcactttgggaggccaaggtgggtggaccacctgaggtcaggagttcaagaccgcgagcggccgct

SEQ ID NO: 559193 - DNA, 1575 bp, Homo sapiens
gcctcggctcccaaggtgctgggattacaggtgtgagccaccggctggctactatagctgttaatatgtgaaatctaaatggcatttttgacttgacagctcagacttgtacttcatgtattcagaagtttttagacaacaattagtttattgtctagttcattattaaagataatgaactaggccgggcgtggtggctcacacctgtaatcccagcactttgggaggctgaggcgggcagatcacttgaggccaggagttccagaccagcctggccaacatggcaaaacctcacctctactaaaaattaaaaggttagccaggcatggaggcatgtgcctgtaatcccagctgcttgggaggctggggcaggggaattgcttgagcccgggaggcggagattgcagtgagccgagatggcgccactgcactccagcctgggcaatagagtgtgactctcaaaaaaacaaagataatgaactggtttgcatttcttttaaagagatgatagaggaaaatatagttttttgtaagaatgtttatctctcttaaaagataatcttttaattttcttcagataacaagttattattattttttaagaaagcaagtttcacgggccgggcgcggtggctcacgcctgtaatcccagcactttgggaggccaaggcgggcggatcacgaggtcaggagatcgaaaccatcctggctaacacggtgaaaccccgtctctactaaaaatacaaaaaattagccgggcgcggtggcaggcgcctgtagtcccagctacttgggaggctgaggcaggagaatggcgtaaacctgggaggcggagcttgcagtgagccgagatcgcaccactgcactccagcctgggcgacagagcgagactccgtctcaaaaaaaaaaaagaaagcaagtttcacatgaataatgctgtgttggaaggctttttgatttaaaatcttttcggatttataacatcctgttaagttttaggagaacccgttttcccagagcagattcaagcttctaaaaataaatgctttcagtagcaggaatggcattgtttaaaaagctgatggcagggtaagcatttgggttagtgttttattaacatatttgtaagtacttgttcattgtggaaatgtgtccttgactaaaaccatacgtggctatggaaaccatgtttgtagttctgaatacacaggttttgtgtgtatttactctatgtattaaattattattgcccttagtttaaagtaaggattacaattggatttaagtagatcactgaatgttattgtttatgaaacttaactttttgtatgctgcttataaacatgatctataaatcagtgcttgggaaaattttactttcttaatctactgatacaggaataaaatatgaacaattaaacaggttgatccttgaatctgactgatttgtgactttttttcctcccaaagtgctgagattacaggcgtgagccaccacgcctggcctacttccctctctctgacccctgccacagcacatcctgttcggcgaacgctgggccgtcggagcacatc

SEQ ID NO: 559194 - DNA, 108 bp, Homo sapiens
  misc_feature (22)..(22): n is a, c, g, or t
  misc_feature (77)..(77): n is a, c, g, or t
aattttcaaggaatattaatcntcacccaaattttgaatttttatgtaaaaaattataatttaagggtaaacatagntggacacagctttcgcagtgcatttacattg

SEQ ID NO: 559195 - DNA, 210 bp, Homo sapiens
taggacgtcgggacagcgggaatgaggttcatccattcatgcacggcactaacgagatgacgaggcatcggcctacctgaggagagcgatacttactccgggcggtgacccgcgcttcattgaatgagttcactctgacattcagagcactgggcagaaatcacatcgcgtcaacacccgccgcgcgcctacgcgatgctttgctttaat

SEQ ID NO: 559196 - DNA, 754 bp, Homo sapiens
ggggaggtggggacaaggatttaaaaaattaacaattggatactatattcagtacctgggtgacaagattaactgtatcccaaagctttgcatcactcaatatgcccaggtaacaaacctgcatatgtaccccttttagtctgaaataagaattgaaattattagaaaataaataaagctggtgatgaagcatgaaccatattttaaacatatagatttttatcatttattacatacacacccaattttataattaccattgagattagtattttctcaactcatcattttattcagaatacatccattcttttcataattcagtaaagatgtatcgaaagtctagtatgaacaagataaaatggtcacttcagtaaggacatttattttgaagtatgtttactcttatccatgcctaataattctctccaaaaggtcgttatagcttttaatacacaatcttcataagaaagttttacatttaaattcaagtttaacaacgtaaaaaatttatttatgtttactgtattttggaacatttattagaaacaaagagaccatggttatattctatgccttagtaccagcatatacttttaaaatgttaatgtttatcaaatactaatttaaatacaaaacagtgagaataaaaaaacatctttgcttgtattaattcataaattacttcagctgaaagtcttttgaaacaatatccaaatattatttaatgtttatactgatgtacattgtatgc

SEQ ID NO: 559197 - DNA, 323 bp, Homo sapiens
cacgctccctctggtcgggcccttctctgcagtttcattcgaatagaggtcaccaccgagaacttctgctgtaatgccttctggcaggagtcccaatgctgctgcccctacccaggatggctatcttatgaattcttgtgctccagcatcacatgctgattcttcttccctctcccaccggggtagtctcacaggcgccccgtgaactttctccagaccactcttgtcggcacgttttgggacattatttggattgctttttctaggttcttggagccactcagtctgggtccaacagtatcaaccccccacagagagagcgt

SEQ ID NO: 559198 - DNA, 208 bp, Homo sapiens
attgtttttataatttgtggttttcatgaaacattgctctgcatttatcaggaaaaactgaatttcccaacaggtgacctgacaagttattataactattatacataatcaagatcctgcctctacggaaatagctaaacctaaaaatgtttgcattaatgaataaatacttcctgcattccttggcccagttctgaaattggtgacc

SEQ ID NO: 559199 - DNA, 194 bp, Homo sapiens
tgctagtgagtgggcgctcgcttggccagcacagagtcgaactgcagcccccagaatattccagaaaggggcatctgggtggaggctgcagtgtcgtgagtctcctctcagaggccatccaggccttgctgtattcgtctgtccagggaggtggctgagtgggtggagacgccggggtcgggaagagaccggca

SEQ ID NO: 559200 - DNA, 169 bp, Homo sapiens
tacagttcatatgtttggcaattttcaggtaatgggtgttgcagcttgcaactgctttcttaataggtggctagcttttagtgcctactatgggtgttacattttttactctctctacaaggtttttccctcagtgtccaactgagctgttcctctattggactaacag

SEQ ID NO: 559201 - DNA, 2179 bp, Homo sapiens
  misc_feature (671)..(671): n is a, c, g, or t
  misc_feature (1863)..(1863): n is a, c, g, or t
agcgggactgttctgaggagcggcccggacgcgcgccgcccccgcccgcgtttccccggcaacccgcggccgccgccatggacgcgctgttgggcacagggcctcgccgggctcgcggctgcctgggcgcggctggacccacgtcttcaggtcgcgcggcgcggaccccggcggcgccctgggcgcgcttctccgcctggctggagtgtgtgtgcgtggtcaccttcgacctggagctgggccaggcgctggagctggtgtatccgaacgacttccggctcacagacaaggagaaaagcagcatctgctacctgtcttttcccgactcgcactcaggctgccttggagacactcagttcagcttccgcatgcgccagtgtggagggcagaggagcccctggcatgccgacgacaggcactacaacagcagggcccctgtggcactgcagagggagccggcacactacttcggctacgtgtacttcaggcaggtgaaggacagctctgtgaagaggggctacttccagaagtctttggtgctggtgtcccgcttgccctttgtccggctgttccaagcgctgctaagcctcatcgcccccgagtactttgacaagctggcgccctgcctggaagcagtgtgcagtgagatcgaccagtggccggcgcctgcncctgggcagaccctgaacctacctgtcatgggcgttgttgtccaggtgcgcatcccatccagggtggacaagtccgagtccagtcctccgaagcagtttgaccaagagaacctgctgccagccccagtggttcttgctagcgtccacgagctggacctgttcaggtgcttccggcctgtgctgactcatatgcagacactgtgggagctcatgctcctcggggagcccctgctagtcctggcaccctcgcccgacgtgtcctcggagatggtgctggccttgaccagctgcctgcagcccctcaggttctgctgcgacttccgtccctacttcaccatccatgacagcgagttcaaggagttcaccacacgcacgcaggccccaccaaacgtggtcctgggagtcacaaaccctttctttatcaaaacactccagcactggccccacatcctccgagtcggggagcccaagatgtcaggtcaggctcccggtgaggtgcagggggtgctgctcagaagcctcgttgagtgtggggccgcctcagagcccgtggggatggccagagctgcgggcactgaggcctggccaccgggcgtgtctcgtaggagacctgcctaagcaagtcaagctgaacacggcccacctccaccgcgacaaggcgctgctcaaacggctgctcaagggcgtgcagaagaagcggccgtcagatgtgcagagcgccctgctgcggcggcacctcctggagctcacccagagcttcatcatccccctggagcactacatggccagcctcatgcccctgcagaagagcatcacgccctggaagactcccccccagatccagcccttcagccaggatgacttcctgcgtagcctggagcatgctgggccccagctcacctgcatcctcaagggcgactggctgggtctctacaggcggtttttcaagtccccccattttgatggctggtaccggcagcggcacaaggagatggccctgaagctggaggccctgcacctggaggctatctgtgaggcgaacatcgagacctggatgaaagacaagtccgaggtggaggtcgtggacctggtcctgaaacttcgtgagaagctggtaagatgcctcccagccttgtcccagcgccaccagcctggcacggagctgcgcctgccctgaccatggctgcccctncaggtgcgggctcagggccaccagctccctgtgaaggaggctacgctgcagcgggcacagctgtacatcgagacggtcatcggctccctgcccaaagacctgcaggctgtcttgtgccctccctagaacaaagccaagggccacggtcccagggccctaggtctgcctgagcctcccactccccagtggtggcggcactgggccaagcacacgctccccttccttggccccccgcccagactgcaggctccccttcctgcaccaccattgtctcagcagtaaaggcgacatttggaaccacaaaaaaaaaaaaaac

SEQ ID NO: 559202 - DNA, 1479 bp, Homo sapiens
  misc_feature (671)..(671): n is a, c, g, or t
agcgggactgttctgaggagcggcccggacgcgcgccgcccccgcccgcgtttccccggcaacccgcggccgccgccatggacgcgctgttgggcacagggcctcgccgggctcgcggctgcctgggcgcggctggacccacgtcttcaggtcgcgcggcgcggaccccggcggcgccctgggcgcgcttctccgcctggctggagtgtgtgtgcgtggtcaccttcgacctggagctgggccaggcgctggagctggtgtatccgaacgacttccggctcacagacaaggagaaaagcagcatctgctacctgtcttttcccgactcgcactcaggctgccttggagacactcagttcagcttccgcatgcgccagtgtggagggcagaggagcccctggcatgccgacgacaggcactacaacagcagggcccctgtggcactgcagagggagccggcacactacttcggctacgtgtacttcaggcaggtgaaggacagctctgtgaagaggggctacttccagaagtctttggtgctggtgtcccgcttgccctttgtccggctgttccaagcgctgctaagcctcatcgcccccgagtactttgacaagctggcgccctgcctggaagcagtgtgcagtgagatcgaccagtggccggcgcctgcncctgggcagaccctgaacctacctgtcatgggcgttgttgtccaggtgcgcatcccatccagggtggacaagtccgagtccagtcctccgaagcagtttgaccaagagaacctgctgccagccccagtggttcttgctagcgtccacgagctggacctgttcaggtgcttccggcctgtgctgactcatatgcagacactgtgggagctcatgctcctcggggagcccctgctagtcctggcaccctcgcccgacgtgtcctcggagatggtgctggccttgaccagctgcctgcagcccctcaggttctgctgcgacttccgtccctacttcaccatccatgacagcgagttcaaggagttcaccacacgcacgcaggccccaggagacctgcctaagcaagtcaagctgaaaaagcctttcaaggttgaagaccctggacaccaagccaggcctctacaccgcttacacggcccacctccaccgcgacaaggcgctgctcaaacggctgctcaagggcgtgcagaagaagcggccgtcagatgtgcacagctgtacatcgagacggtcatcggctccctgcccaaagacctgcaggctgtcttgtgccctccctagaacaaagccaagggccacggtcccagggccctaggtctgcctgagcctcccactccccagtggtggcggcactgggccaagcacacgctccccttccttggccccccgcccagactgcaggctccccttcctgcaccaccattgtctcagcagtaaaggcgacatttggaaccacaaaaaaaaaaaaaac

SEQ ID NO: 559203 - DNA, 114 bp, Homo sapiens
  misc_feature (99)..(99): n is a, c, g, or t
ttatgtaatattagaggagtataggctgtgactagtatgttgagtctgaagtaggagagtgatatttgacaggagacgtggtactagccagagagtctnccagtagctactagt

SEQ ID NO: 559204 - DNA, 331 bp, Homo sapiens
ggcgccgctgtggagccgccgccacgtgtgcgcatatgcaatggatgtgcgtgcgcgactgctccaggttcctgagcaagaggaataagcagacctacaggactgagcccaataacttggagggccgcaatttctttcgcttcaacggactgattcacaccaagagtgtgggcgtggagcccgcagaccaccgccttctatgtgcggaccaccatcaagaatggtcgcgccacgctcagaagaattagacacatgatccggaagaacaagtgccggcccgacctgtgcatgggagacattcgcaagggcagagccattctgtgcagacggg

SEQ ID NO: 559205 - DNA, 1452 bp, Homo sapiens
  misc_feature (671)..(671): n is a, c, g, or t
agcgggactgttctgaggagcggcccggacgcgcgccgcccccgcccgcgtttccccggcaacccgcggccgccgccatggacgcgctgttgggcacagggcctcgccgggctcgcggctgcctgggcgcggctggacccacgtcttcaggtcgcgcggcgcggaccccggcggcgccctgggcgcgcttctccgcctggctggagtgtgtgtgcgtggtcaccttcgacctggagctgggccaggcgctggagctggtgtatccgaacgacttccggctcacagacaaggagaaaagcagcatctgctacctgtcttttcccgactcgcactcaggctgccttggagacactcagttcagcttccgcatgcgccagtgtggagggcagaggagcccctggcatgccgacgacaggcactacaacagcagggcccctgtggcactgcagagggagccggcacactacttcggctacgtgtacttcaggcaggtgaaggacagctctgtgaagaggggctacttccagaagtctttggtgctggtgtcccgcttgccctttgtccggctgttccaagcgctgctaagcctcatcgcccccgagtactttgacaagctggcgccctgcctggaagcagtgtgcagtgagatcgaccagtggccggcgcctgcncctgggcagaccctgaacctacctgtcatgggcgttgttgtccaggtgcgcatcccatccagggtggacaagtccgagtccagtcctccgaagcagtttgaccaagagaacctgctgccagccccagtggttcttgctagcgtccacgagctggacctgttcaggtgcttccggcctgtgctgactcatatgcagacactgtgggagctcatgctcctcggggagcccctgctagtcctggcaccctcgcccgacgtgtcctcggagatggtgctggccttgaccagctgcctgcagcccctcaggttctgctgcgacttccgtccctacttcaccatccatgacagcgagttcaaggagttcaccacacgcacgcaggccccaccaaacgtggtcctgggagtcacaaaccctttctttatcaaaacactccagcactggccccacatcctccgagtcggggagcccaagatgtcaggagacctgcctaagcaagtcaagctgaaaaagcctttcaaggttgaagaccctggacaccaagccaggcctctacaccgcttacacggcccacctccaccgcgacaaggcgctgctcaaacggctgctcaagggcgtgcagaagaagcggccgtcagatgtgcagagcgccctgctgcggcggcacctcctggagctcacccagagcttcatcatccccctggagcactacatggccagcctcatgcgccggcagaagtgcgcctgggtgcagaagtgcgcctgggtacagatgtgcgccaag

SEQ ID NO: 559206 - DNA, 234 bp, Homo sapiens
atccaaagaattcggcacgaggggaagcagcactggtggtgcctcagccatggccttggaccctttcttcttctcgggcctccttttttaacttgaacaggcttttgtggaccctccaattgtttttgacttaaggccacccttgggtgttaatctggccccagggaaagaggggccacggttatcccttggggggaaacaaaatttggaggtaaaagtgtgacctggtacacc

SEQ ID NO: 559207 - DNA, 1085 bp, Homo sapiens
tgatgctgtgtgctgacgctgcgctgcgatctgcgctcgtgacccctggccgctgccgccatcactgtcgcccgcccagtcgccccgtcagcctgcttccccatcgccatgttgatggctgatggcctgcctgcctgcctgcctgctgtgtggctcgtgagcctgctgtgtgcctgtggctgtgctgtgccactgagtggctacgttgtgctggccctgaaacttgcctgcctgtgtgatgcctgatcgtgcggagccgcgtggtcctctgtaccccaagacggtccactgcccgaagtgcgccgacagtctacattagtactgacattgttgtccgtaaggaacgcacgtttgacagccacttcagtggccttgggtttgggcattgcttccgtcattaagcccaagccactcgtttggccccgtttccggcatcactcgttcgaacgttaacggttcgggaaacttttgtcaagccaccattttccccaagggggctgcttggagccgaacgcaaagcggtagcagacacgaactataagcccagaacgcgggttacttctgcgacgttgcggcacaagtttccccacccttgtacagcattggggtagccactgtggccccttgcgagtggcgccacgcgctgtcccaaacacccgtttagcagcccttactacgcggtacgccacacgacttgcgtgcgcccgacaggaggcaacgtcccaggctcacacgctcattaacacccgatattcgctgtgcgtcaacgcgacagcgcaacagcgcgcgttcacacgttaagatcggccccagactttgaggggagagtaatcgccccgttggcgagattacggcccaaagttaccgcgcgtagttcggccatcatcgacgcatgggccttcacgggggacaacaccgagatggggtgcatcccggtagggcaccgtccgttcgcgttcggtatcccaacgtgctaggcgccccgaggacagaccgagaacgccgtggagccattaaacgccccagagcgaacggcgggctcagcggcacccaccgttctccacagtgggctaacagcagggaaa

SEQ ID NO: 559208 - DNA, 417 bp, Homo sapiens
ggcacgaggagagtgtgagagagtgagagagagagagagagagagagagagagagagagagagagagagagagtgagagagagtgtgtgcgagtgtgtgcgcgccagtgttgcttcctatctactgttctcttccctatcttttactctctccccctctatgtcccctttcttttcccctcttctctctctttatctcctcctgtctctccatgtcttttctctttcactccttatcgctcttcttacttcgccttctctcctacactctctccctgttcccatgtttccgccatctttcacttttctgctctttcctttgcctcctctctcctcctgtctctttttgccttcctttccctatttttctctttattacctctctcccttttttcttctctggatctttctcgccttt

SEQ ID NO: 559209 - DNA, 385 bp, Homo sapiens
caccccgatatctgatcccagtgtgcaatagacattatgacttaaaaaaagtacataccttaatttaaaaatactttattagagacaatgatgtcaccaaaatggcagagtagaagcaatctggcttcacatctcccacagataagccaaaaacaaatatctagcacaaagcttatcatcagcaatatcccagaactcaaatctgaggctgatagtacccgtgagccacagaggactgaaaaactccaagcaaacagtaagagaaatagccttctctttgcatgatgccttttccgcaatctgccaggccctgtgcatgaaaaattcctcccagactcagcttcttcattggaaaaagttagatggaggaggacagccagctttc

SEQ ID NO: 559210 - DNA, 513 bp, Homo sapiens
taagtataaaaaaatctctatccttcggaaaaagggacaaatgcaactaaaattgttctcgtgtcactgcacatttaactgtcacagagtccccgaatgtcagaactggaagaaactttgctcctctaacccaaccccttattttataggcacagcaatagtcccaggaaattgtagtaatttgcctaaagccaaccacagaattggttagtactagatccaaaactagaacccgtatctcctaaccccatacccttcccattatataggacaagatatgtggttatataagtcttgcagaattctctgccatttcaatattcggtttactaggaaagttaagttgtacctttatttaaactaaggcacacgtagaaggaaactaatcaaacttgggcaaaggtacgttgtgcctagagcttgcttgagttcttgctgccacagttagtttgttggtatgggggtccgacaggctgtttgtgctttcaccgcaggtgtttccggcgtttgaag

SEQ ID NO: 559211 - DNA, 531 bp, Homo sapiens
acaaaacagaaaacagccctcccatagacattgaaagtggggattgaaaacaacaacttgcacattacagaagctgaaaaaggtatatatcccaacccagtaatgaaccataatgctgctaagcctcacttgcctgtttaacaaaatatataaaaagaaaaacaagccgagtatacattttgcaggtcctccaatcatatactgtgtgataaccatatcagaaatctcactgtaaacaacatattcatataaacacacgttataaatctaatcgtcattctgtattccatcttgtcattaaacaatttcaaaggaattataatttagcttatgtacaaatcaattattttttccttctgtgctttttattttagctcttcttactatacactcccaatgtgtgcttattaatcagtatactcccaagacttcatatttctttgtttctgcattcttctttcacagaagttttcccaattcttctgaaaacagaaacctcaatgtgagagtattttgaatccctcacagaat

SEQ ID NO: 559212 - DNA, 382 bp, Homo sapiens
aaggaccattctgtcctatccttcttagaagcttcgaactcaaaatcatggaaaggttttaagatttgaggttggttttagggttgctagatttagcaagtaaaaataaggatggccccgttaaattttaacttaaaattaacaagttttttgttaattttttgttttttgtctcagcatcagtatatcccatgcaatatttgaggtgtgctcatactaaaattatttgtgtatctgaaattcaaattaaactgggtgtctttttcttttcatctggcaaccctactaagatcataaacccttggaaatctgtgtgtgtgcgggtgtgtgtgtgtgtgtgtgtgcaggggtggcaaaagtactgtgggatgggccagaaata

SEQ ID NO: 559213 - DNA, 428 bp, Homo sapiens
ggccccagggaagatccaatatccatgggggcagtcataatcttggagctccaaaatgatcgtgccgtatagagctccatgctctcatatccaggtcacactgatgtaagaggtaggttcccatggtcttgggcagctccacccctgtggctttgcagggtacagcctcccttccagctgctttcatgggctggtgttgagtgtctgcggctattccaggtgcatggtgcaagctgtcagtggatctaccatctagggcctggaggacagtggccctcctctcacagctccactaggcagtgccccaatagggactccgtgtgggggctccaaccccacatttcccttccacactgctttagcagaggttctccatgagagccctacccctgcagcaaacttctgcctggacattcaggtgtttccat

SEQ ID NO: 559214 - DNA, 288 bp, Homo sapiens
cacgaggagaacaaggaagtcgaactggcttcgcgcgagaacgtgcgcatcaccgagtatgagctggtcgacaaggacgccgagggcgatgcgcgctttgcgcccaagatcacgctgcaagccaccacggtcggccgcgcgatcctgtccgagatcctgccgcagggactgccgttctcggtgctgaacaagacgctgaagaagaaggtaatctcgcgcctgatcatcacagcgctccgcaagtgaggtctgagcaaaacggtcttgttcacccagaacctgtagaag

SEQ ID NO: 559215 - DNA, 114 bp, Homo sapiens
ggcggggtgactctgaggatccctgggagcaggacactgtgggcagtagttaaagcatgcacatagaacaaatggcttctgcatcatcatctgttttctttttcacttgcaaaa

SEQ ID NO: 559216 - DNA, 115 bp, Homo sapiens
atctgcgacgggcgactcacactcatcacacagtaccgcagtttgcagcatcgagcattctagagacacgatgcgtcacaactctacagatgatgcaatggatctcacgtgctgc

SEQ ID NO: 559217 - DNA, 369 bp, Homo sapiens
gattagatcccatcgaccatggcagtgccagctactcttgacacagatatacttcagcactgatcttctgtccaaagaacatcatctgagcgattgagatctacaagctcttgagatcatgataatgattctctccacctggtgctcatataaaggtgtgagtgatttctagattgggcccctactggttaagatctctcttggtctgagaagagtgactgctccagaacaggatagaggtatggtgagtcatagcgtgtgtctccggcttgaccactcagctaattatgatccaggacttggcgctggacattggctgttctgctctgaatgaagtctgaacagaaccaaaatggcctcaggaaggac

SEQ ID NO: 559218 - DNA, 498 bp, Homo sapiens
ttcatagcatattaatggaagctcaccagaaaggggcaaaatgattaacgaaattgatggtttttagacagggggttggctttacaccaacgaaaaagaaagacacatgaatatgctctggatcttgattttatttctcttattctcacggtaggctgagatgctgttaaatgagatgttataagcctaaggcagattgacttgctgcatcaagtattttacactcctcggcaaagcaagtctgcttatcgtcagccttgcaggacttttttacaaaagctgtgaaatcatacataacagctttcagttgctcttttgttgcctcgggcttgagattcacaagctcaacaagtgcaggttgtttctagatgtggctctacttctgagaaagtgtgcatatatctgcttggaaggtgaatgattcagcattaaactctatgagaacgtatgtttggattgactccagagctgaaaagcatggccactctgttcaccaag

SEQ ID NO: 559219 - DNA, 172 bp, Homo sapiens
gtaatctgccatcccacaccggtgcacagtttgccagctaattcaaaaaactcctggtgccaggaaaaatccatcacattctctgcacaggaaacctttgcaccaaggatagttatgactatctcaagactctgcctggtgatgttcatattgcgagaggagacttcaatga

SEQ ID NO: 559220 - DNA, 414 bp, Homo sapiens
gttcaagcattccagtacactgacaaacacggagaagtctgccctgctggctggaaacctggtagtgaaacaatggcgtctcgctctgtcacccaagctggagtgcagtggcacgatttcagctgactgcaacctctacctcctgggttccagcgattctcctgtctcagcctcccgagtatctgggattacatgcgtgtgcctccatgcctggccaatttttgtatttttagtagagacggggtttcgccatgttgctcaggctggtgtcgaactcctgaactcaagtgatctgcctgcctcggcatcccaaagtgctgggattacaggtgtgtggccccaccgcttgccttttaacaattttcctaataaccgaattatattcctagcttccgaataaaatagcactaaatg

SEQ ID NO: 559221 - DNA, 260 bp, Homo sapiens
ctgacccaccaggatatgctgggctgcttttatcctcccagccccatcaacccttctaggctttctgatggaacaaatgggtggatagtagcactgtttattaaaatagggaagctgaattagggtggtgtcagggctgggggtgttactacagtttggaagtagaaagcaaggctttctcttggctgaaagtaggggaagtctgagaagtccgagggtcactagggagaaggtatcttacaggtgggtcagaacataag

SEQ ID NO: 559222 - DNA, 313 bp, Homo sapiens
  misc_feature (8)..(8): n is a, c, g, or t
  misc_feature (65)..(65): n is a, c, g, or t
  misc_feature (67)..(67): n is a, c, g, or t
  misc_feature (106)..(106): n is a, c, g, or t
  misc_feature (116)..(116): n is a, c, g, or t
  misc_feature (123)..(123): n is a, c, g, or t
  misc_feature (151)..(151): n is a, c, g, or t
  misc_feature (219)..(219): n is a, c, g, or t
ccaccccnggccctccccaaagtgcctgagattacaggtgtgagcccgccatgcccccaccctanantctaaaatcttaagtggtcccagtctgtgtatttagggntgaaaaaaanccctggnaaatcccttgttcactttctgtctcaantttcccagtaactaactttttctttctctctctctccctttctttatttttttgagatggagtctcantctgtcatctgctggagagcagtgcagtgacaccatctcagatcactgcaactgcactccagcctgaacaacaagagcgaaactccaaaatggg

SEQ ID NO: 559223 - DNA, 749 bp, Homo sapiens
gggctaacaacagccccgcgctgacaggcaactcgcagccgtagcaccaggcggcatgcagctgcggctcagcaacagcagcagtgcgtgcggcgtgctggcgctaccaagcctgtgcggtctccgcgtcaagcatgggcaatgtgctcccgctctggtggcaactgagaagaccatgaacctcaaccccatgatcctgattcaagatcctgtcgtcgccttacttcaagagttacagcgtctacgagctcaagacctaccacgaggtggtggactgagatctagctttagaggtcaccgcagcgttgaaccagtgggatgaaacggaagcatggagaacacatgcgggccagaacagggcatgtgcggacgggcgttcagaggctgtctggaacacggaggaaatcgctctatctaacaagcattatcgcctgttatacaaagtgtatttaccctgaagcttaactcgaaagcaagtgatgggtcttataacacacacagacatctccatatattagagcgcttggattcatgtatctaagatatacacagacccctacagatctgtgggacctggtgcgaatccttccttgatgcatgcaagaggacctcacatgtcgcaagactggtggcaggctgtcgctatgacccatagaacgaaatgctaccgaatctaactctcacaaacaactgcaacgtggcacactcacctaggaaccccagaaatccccgtcacaaatcaaccgcat

SEQ ID NO: 559224 - DNA, 758 bp, Homo sapiens
taagttaaaagttaaatggtagttcccaaatacttttcatatgacaatcttacataaatgtcccaaaacacttgggcgttatctcgtggtacccggtcaatagcgtggtctaagggctataaagcaggagaagccggtggtgacgtgggttctctgcggggagggcctcgtggtttctctccggcgggctcagggcttgcggggggcgtgggggccagggacgtcgtggcgacctagaagggtggtggacggcacagctgcagggaggccttctctttaaccctcgcggagaagttgggcacgtgggagccattctccctcttgttaagttccacaagagagaggcccgtttgccccgaggggaaccctccctctcgtcgggccctccacgagggttgggttgcggtgcaagccggcgcatctggggcccagtgcttcaagagagcatacgaggtgtgggacaacgagggggatacacaacttccaggtgtgtgcatgcgaatgacttgtttgaaaacgtggcccttgactcacgggggaaaccaagccccatgagggcttcttatccacccaaaacgaattgggatagaggggtcccccaatcatgccaatcatacacaagaaagccccctgggtcccatgggactggtcccgtggggggccagggccacaaccctgtttgggacgagggaaaaagggcttggccccaaacaggcgggaacaacaagatatgcgccatgggtgccctgaaaaaggaa

SEQ ID NO: 559225 - DNA, 125 bp, Homo sapiens
ctagaggatccccccacccagccataggcgcttgtcgcgaggaaaaagatctgacgcccagcctgtccccacagattaaggtcctgcggagtgtgaaataccccaccgagaaacaccgtgaaaag

SEQ ID NO: 559226 - DNA, 1294 bp, Homo sapiens
catagatgctcccgatggacacagagactttatcaaaaacatgattacagggtacatctcatggctgagctgtgctgatccgtgagttcgttagctcgcatggttggttggctgaactttgaatgcttgagtatctccacagaattggtgcagaccctgcatgagcgactgcccgttctcggacttacatcacgtgcggttgtgaagacgaaccgtaatatgtcggtgttaaagcacagacatgagattccacctgaggtccaccgctagcatgccacgacagagcatactgagggacacatgtgtgttaaggcgacgttcaagcaagcttacgattaacgacaaatttggtctacagagctcgctcggatcaccagttcaggcattgtagtgtctcacagttcttctaggctttcggcaacttgggtgtatctaacaatgcctggggagactcaaagctgtgcctagacactgacccttgagtttccaaagggcgcatggaacagaagtcaacacgctggtaaacgggattgggccaatgggcccatgtagtgaaacccaacagcgtgcttagaagggctccttgggactagcattcctaaccgaccaaacttcgtacctaaacctgacgaatgcccatttgcctgccttgaccgtcttccagggattggtcttacaaaaaattgggtagggtaatctggttaactgggttaaccttgattagggccggagctgggaacgacctcggatggtatcttcaaaaacccccggttattgggtaggggtcaccacttttggcttcacaaggtccaaaccggtttacacacccgggcaacggtaaacaacttcctggtcccacgcattgccaccccagtgaacaggctttcggacagttgaaagctcccttaccctggggggaccaatggtggggccttccaacttgggtccacaaggcaaccttgtgtgtcctggccacaggggcaagtctcccgaccttgttagacaaaccgtgtgctctggttgaaacgacctcaaaagatttagacccacccaaatgtgtgaaagcaagtgtgtgattcacatgggctccaacgagaacataaccccggaaagcactacaccgggacacgaaaaaaacgcacccagaataaaaacacacccagaacatgcagacgtgtcccaaccgggccaccaagcacgcagtagcagaagcatggagaccgcagcagggacaaacagacacatcaccgacgcagggaacaaacacagggtcacaatgagggcacgcactaaa

SEQ ID NO: 559227 - DNA, 1112 bp, Homo sapiens
tctttgcgtcttttcataccttcttcttttttattttttcctttatttgttccttgatcgacgagtgttttctactgtgaaatactgtagagctcattctcagtaggcttatctcgtctttcctaccacaggttagtacccacttaggtatgttgtcgatttcactgtacttatttattaacttctttactcaacttcctacattcttctccttgcttaagtcgcaaccttctttaatgtttctgttgcttttaggatgtctcgtcgatacatctccataaatttgaagtatctacatgtgttggtgcagccaggtttatagagtgaatgtagttaacaagcctaaaaatgtgctgccacctttataggacgagtcttctagaatggagacaacatttgcttgcatccacatagacctttatgttttgttttcagctgtaaacttgcctcctttggctacattcgtaaatgaaccagaagtttttttttctctatttctcctaatatgttagcttttgttcttgtcaagatgtatcatgggtattgcgtgctgctcgtacactgtaccacgaattttcattagcatgtggttcagaatatacaatgattaggtttttaaaaagtatcttgatggttcttttctacttataatgttcagacctttcagacacagtgtaccacagaattgtcataaactgttgttgtgtcagtgaactggctttttgctatggtaggtcattaaacacagcacttactcttaaaacactgaagaatttctgatcatcctacggagtattgacacattctacgaaattgtgtcagctgtctttttagtacctggatatattaatcgtgtcctctgaatggccaattgatagatggttcacgaagagaaatctcaatgaacataaagagaatatttattcatggcgacttaatctaaagttatttgcctgaaccttaagaaaactactgtgcgtaactctcagtttgtgcttaactccatttgacatgaggtgacaagaagagagtctgagtctacctgtggcatatgttggttaattttcagtgccttgaagatacattcacaaatacttcgcgtttgaggaaga

SEQ ID NO: 559228 - DNA, 387 bp, Homo sapiens
  misc_feature (110)..(110): n is a, c, g, or t
  misc_feature (124)..(124): n is a, c, g, or t
  misc_feature (161)..(162): n is a, c, g, or t
  misc_feature (380)..(380): n is a, c, g, or t
aacatgcgaacggactgatcgggtgctagtctcgaggggccgggaggtggacgacggcgctcaatcgaaggcgcggatcttggcgatcagctcgtcggcgtcgacgggcntgacgatgtagtcncgcgcgcctggcgcatgccccagaccttgtcggtccnngtcttgctggtgcacatgaacatgcgaacggactgatcccaacaccttttcaaggacaacttcgcacctctcatgttcgtcacaaatattggactacctacctggggacactggggaactcacgatcagtccgttcgcatgtttcacaacaattatcaatataaaaccccctgccataacccaataccaaacacccctcttcgtctgatcgtcgtcgncatgaat

SEQ ID NO: 559229 - DNA, 725 bp, Homo sapiens
gagttgtcagaaatttttatttaaagaagtaacattggttattgattggacatatatcattatggtttagggtatgagatacagtgtccaatgtggtattatcagtttaatatacatctacttgtggcaatagtgaacagtttcaagagatgaatacatatttcaaaggaggagaaaggcgtaactgcactttcatttcaatgtctgagtttgataaccaaaaggacttgcatttttagataaaaattttctatttcccaaatctcaagacctagatacaaaatgtagagctgcagatttagggcccgaatggctggagtagcagcaggtgttacctgcacatttgtgaacattttaccaagagaaaaaaggggaaagtgaagattctcatgtctgaatgtgtactcaatgaaaacgttactctgattaggtttgtgggccccatggtctctgaatcagtttaaggtctgaagatacaagagtcattgagataaaactattgattgttgccctgtgaagttggtagaaatttggtttagtctctctagaagtgactgtagaggactatagataccaaataggcagaaacacagttctgcttgcatatttaggggacagcatgcactttgttgcacaagtgtgagttgactggaagtctgaaaaggaaagtcccctctagagtaaattccactcgtgccgaaattcctgcaaccccgggggatcct

SEQ ID NO: 559230 - DNA, 402 bp, Homo sapiens
  misc_feature (395)..(395): n is a, c, g, or t
atccccaaccagtgtcgacggactgatcgcaagatgcacacagacataatcacttgaacccgggaggtggaggttacagtgagccaagatcgcgccactacactccagcctgggtgacagagtgagactccgtctcaaaaaaaccaaaagactttatcttatttcctgtatgtttgatcagtccgttcgcatgttaacatgcgaacggactgatcccaacaccttttcaaggacaacttcgcacctctcatgttcgtcacaaatattggactacctacctggggacactggggaactcacgatcagtccgttcgcatgtttcacaacaattatcaatataaaaccccctgccataacccaataccaaacacccctcttcgtctgatcgtcgtcgncatgaat

SEQ ID NO: 559231 - DNA, 223 bp, Homo sapiens
gggggggacttaaaaatttttaagcttgggcattaaatggtcctggattcaaatttagggtcaacatttgattaacttctttttcctttttgaaaaagggggataccattagaatgggggaggttttgaatgaaccaatttagggaaggttttttgggtttttgtcccctaagagggacttaataaatgataaatttttttaaataaataattttttacccca

SEQ ID NO: 559232 - DNA, 302 bp, Homo sapiens
  misc_feature (295)..(295): n is a, c, g, or t
aacatgcgaacggactgatcgggtgctagtctcgaggggccgggaggtggacgacggcgctcaatcgaaggcgcggatcagtccgttcgcatgttaacatgcgaacggactgatcccaacaccttttcaaggacaacttcgcacctctcatgttcgtcacaaatattggactacctacctggggacactggggaactcacgatcagtccgttcgcatgtttcacaacaattatcaatataaaaccccctgccataacccaataccaaacacccctcttcgtctgatcgtcgtcgncatgaat

SEQ ID NO: 559233 - DNA, 911 bp, Homo sapiens
ccgtaggttagtgaacctggtcagaggcggtcacctatgacaatcccggatcatgactatgtgtttgtgatctgcaccaggtcactaaaacgcccggaggctagcgagcagttccgatcatatccagatggagttactgatggtcatctacaggagtctgatcatacaggtagttctcactgcgagcatcgcatatcggaattactgacatcgttctgatagctatcctcttcaacaatatactctccggacaatgaaaccataaccaatactaaacaatcaatactcatcattaataatcataatggctatagaataaaactaggaatagcccctttcattctgagtcccagaggttacccaaggcaccccgtctgacatccggcctggttcttctcacatgacaaaaaactagccaccatctcaaatcatataccaaatctctccctaactaaagtaagccttctcctcactctctcaatcttatccatcataggcaggcagtgaggtggattaagcaaacccagtacgcaaaatcttagcataatctcaattacccacataggatgaatattagcagttctaccgtacaccctaaaataacccatcttagtttaatatatattatcctactaataacgatcctactactcagttaaaccaagcacagaacgtagtactatttggaactgaaaagtacagaatcaactagtcagcacttctctgcctggggcgcccgaacggtaggcaaggcaatgaaaacaagaaaaggctcaaacacaaaagaaaacgtaacgtatagtacgatacctcaacaccatacaggaaagggtacacagcccagccgacacacggaacggaaaaaagggcacaggaagaacaacggcgaacacagggagacaagaaacacg

SEQ ID NO: 559234 - DNA, 316 bp, Homo sapiens
  misc_feature (110)..(110): n is a, c, g, or t
  misc_feature (124)..(124): n is a, c, g, or t
  misc_feature (161)..(162): n is a, c, g, or t
aacatgcgaacggactgatcgggtgctagtctcgaggggccgggaggtggacgacggcgctcaatcgaaggcgcggatcttggcgatcagctcgtcggcgtcgacgggcntgacgatgtagtcncgcgcgcctggcgcatgccccagaccttgtcggtccnngtcttgctggtgcacatgaacatgcgaacggactgatcccaacaccttttcaaggacaacttcgcacctctcatgttcgtcacaaatattggacaagcccgaatgatatttcctattcgcctacacaattctccgatcagtccgttcgcatgtt

SEQ ID NO: 559235 - DNA, 240 bp, Homo sapiens
  misc_feature (233)..(233): n is a, c, g, or t
ctttcaaggtgacaaacttcgctacctctcatgttcgtcacaatatattggtactacctaccttggatggacaacttcgcacctctcatgttcgtcacaaatattggactacctacctggggacactggggaactcacgatcagtccgttcgcatgtttcacaacaattatcaatataaaaccccctgccataacccaataccaaacacccctcttcgtctgatcgtcgtcgncatgaat

SEQ ID NO: 559236 - DNA, 219 bp, Homo sapiens
cggacctagtgatgtaatgtatagcaatagagtacatctgtcttatcttttcgtaataagataaaggggcatagtcatatgatgacaaagggatgatttcaaccttttcttctcgccattaaagagaattgaaagaaacagtctttgcatacatatacagagagtttgtcagcctttcctagacacagccagccacagtcagactaaacattcaaagac

SEQ ID NO: 559237 - DNA, 288 bp, Homo sapiens
actctagaggaatcccctcaacagtgccaaataatctagtacaaggcctgcagagctaccgtggtgccacgttggatgaaaggggagctgagagttagccaggtctctgtctctggcaggccataccccacataagtggtaagactgacacaaacccaggagagctaacaggtccaaagtgtgcaaggcagtgggtgggggaagggctttgaaagacatctaatcccttctgagaacagggtgtcttagaggcacaaagggtgaatgcgtatccacccagaaaggtga

SEQ ID NO: 559238 - DNA, 1108 bp, Homo sapiens
  misc_feature (316)..(316): n is a, c, g, or t
  misc_feature (521)..(521): n is a, c, g, or t
accccgatgcatacaccacatgaaacatcctatcatctgtaggctcagttcatttctctaacgagctagtaagtatcaagtaagttattcatgcatttgatgaagccgttcagcgttcgaagccgaaaagtccataatagtagaagaaccctccataaagctggagtgacgtcatatggatgccccccacctctaccacacattcgaagaaccgcgtactacatagaaatctagacgaaaaataggaaggaatcagaaccgccccgagaagctgggttgtcaggctcaaacccctatggcacgtcctactgacttnttgtgccaacagaaaagagataaaacagaatagacagataagtaagcaattcgtcgttggtggagaggtcggagcggtcgcctgagaaacaaattagtaatctacagaagacaagtcaggtgtcgggaggggcaagggggcgccccgagcgagtgagtagagtctcacagccactcgtgtgtcccacagacgtgcgtgcacccanataggagggaactcctcgggaggtccaaacggacataaatgaggtcaggagtagtgtctcggcgcctccactaaacaaaagtcagaccgcgggagtggagaagcgcgagccgtcccttcggattagtaaaagtccccccgccaaagagcgagaggggccacgtgagagcgggcggcttagctttgcggggcgccaagtgaccgcccaagggagcgtcgacaaggggcagaaggggcgtgagatctacccacataggacgcccgcgttccgggggggaaggactttcataggggcagcaagtaaccaacgcgggggtacgaaagcccatgaagacctcgagaagaaattagctaagaggggcagggggaatcccaagggcgggatatcccctgaaaatggaacgtcagccagggagtgaagcttacgtcaactgcaacacctgatcacgcggctcacccctcacacgggaaacggcttaggtagcgagaaagtccgtgggaacctgacacggagagggcaaaggatcgaccgtgaagggcccctgaagaggaccaaccccacccccgggcataatgctcgggaggaac

SEQ ID NO: 559239 - DNA, 203 bp, Homo sapiens
gattttggatatttaataccctcattcctcttccttagacatttcaactctggcagctgattctaaagtatccatgctaaatttccccagtctctaaatttagagatttgagattcactcggtgtggcttctagtattattcagcacaatactcaatgagctacaacgtctggcacagataataggtacatactcagtaaaca

SEQ ID NO: 559240 - DNA, 919 bp, Homo sapiens
caaatgattagagggctggaactttcagtcccacccaccaacctctgggtaaggtgttaggggtgtataaaactcttgaacaggccgggcacagtggctcacgcctgtaaatcccagcactttggggggccgaggtgggcggatcacctgaggtcagaagttcgaggccagcctgaccaacatggaaaaaccctgtcgctactaaaaatacaaagttggccgggtgtggtggtgcatgcctgtagtcccagcttctcgggaggctgaggcaggagaatcgcttgaacccgggaagcagaggttgcagtgagctgaagatcactcccatggcaactcctaggccctgggcaaacaaggaaacaaagaactccggtccccaaaaacaaaacgacaaaacacaaagaaaacaaacacaaccatggggtggcggacaccggccaccccgcgaaaagcgtccccaacaaccacaacgtcaaggcaagcgagcaggccacccaaaggaacaccagaagaacgcggcacacacacgccccaaaggaaacacacgggcccaacaagcgcggcggagcctccaaccacaaagaaacaccgccggggagaaacgcacgcgtttcgaacaccaaaccaactgtggaagttccgagggcaacaggggcagcaaacacacagacgcacacagcacctcgaataaaaaaagccctcgcgcgagaactaacaaagaagaaaaaaatagccaccagaacacaaaacacaagccagcaagaccaacaaaaacgcaagaccagatagcaaccaccaccaaaagaacagagacagcagaaaagcaaaatacaacaacaagagaaaagcgacacgacacagcaaccataacaaccaaaaaaacccaccagcatcacaagacaaagaacaacaactacgc

SEQ ID NO: 559241 - DNA, 245 bp, Homo sapiens
actagctccttcaactggtaatccagtcagtaggcaactacagggtctccgcacctgacatgaaggcacatggaaggcttcgcagaacggagacggcatataaggcgtctttcagtcatgctacactatgcaaaaacctattttgacgcacacactatatgcagaaattcaatctcgattaccacgctagatgcatttaagtactgcaggtctctaagacgagtagagcactgacctaagttcca

SEQ ID NO: 559242 - DNA, 371 bp, Homo sapiens
tgagacagagtcttgctctgttgctgaggctggagtgcagtggtgtgatcttggctcactgaaatctccgcctccgggttcaagtgattctcctgcctcagcctcccgagtagctgggattacaggcatgcaccatcatactcagctaatttttgtatttttagtagagacaggttcacatatgcagctgtctgactcgactctagtgatcaccactgctcaaaatgctaagattacagctagagcaccacgcgatctttttttttttttttttttttttttttgagacagagtctgctctgttgtcgaggtcggagtgcagtggtgtgatctggctcactgaatctcgctcggttcagtgatctcgctca

SEQ ID NO: 559243 - DNA, 178 bp, Homo sapiens
cggctttgctgcatgagcagcagctgacgaatttcataagaaactggacgcaggacttaatctgtagtctttgacaacagtgctttcataaagactagttcttatcaaccttgaatgactacagattattttgtgaaggaggatgaagtaatgtgtgttcttgtgaggtgggaggggg

SEQ ID NO: 559244 - DNA, 382 bp, Homo sapiens
  misc_feature (119)..(119): n is a, c, g, or t
  misc_feature (255)..(255): n is a, c, g, or t
  misc_feature (299)..(299): n is a, c, g, or t
  misc_feature (306)..(306): n is a, c, g, or t
  misc_feature (318)..(318): n is a, c, g, or t
  misc_feature (322)..(322): n is a, c, g, or t
  misc_feature (324)..(324): n is a, c, g, or t
  misc_feature (358)..(358): n is a, c, g, or t
  misc_feature (366)..(366): n is a, c, g, or t
tccacgtttggattaccgtattaccgcacggttcccgtcaattccctcggggcatttaccatgccaccaccagcgccgccactggtatgtaatcgcagcccaatcaattatccccatgngccctatctttgattatatgggcggtcataactgtggggggcgggacacacaggagttcgtgaaagaccgttcgccgtccatcatcgtatcgtttgatccgcgcgtatcgttgggccgtccccaaattcgttcggncaccagccattgtcaccacgtaatgtattcacacttatccattnttcgtgnagtggaatgccngtgnanaccttggcttttataaccatataggcatatatgnatgtggtntcacaccgcgtggtcg

SEQ ID NO: 559245 - DNA, 692 bp, Homo sapiens
tttaattcggctcagtctaatccttttggtattcacccataggccaaacttagggctaggatgatgataaataaaagggatgacataactataagtggcaggtaagttgtttgtagggctcatggctaggggttaaaagggagggcaatttcgtagatcaaattaataagagaggtaatagctactaaggaagaacattttatggagaaagggacgcgggcgggggcatatagggctcgaagccgcactcgtaagggggtggattttctctattgtagccgttgagttggtggtagtcaaaattgtaatacattattagtagtaaggctaggagggtgtctgattattaaaattaaggcgaagatttatgcggggaaacgccatatcgggggccccgattattaggggaactagtcagttgccaaagcctccgattatgaggggtataactatgacagaagattattacaaatgctgtgggctgtgcacgataacgtttgtacatgtggtcgttacctaaaaggtgtgcctctggcttggcccagctacgggcccgaataacgggaggctaagagccgtgcctaggaccccaggtcaatgcgccgaataaaaggtataaggttcacaggccttgggggtggccaagaaagtccagccgaacttgtcgggaaccgaccaacgtgagcaacgca

SEQ ID NO: 559246 - DNA, 260 bp, Homo sapiens
gagctctcgttctgaaagcccatgaaggcacaccccagcagcaccgtcagtgccagccagatcttcaacacgccgcgggggcctttcttcaaggcgtggtgagcgatggtcacggtgacgctggaactgaccagcaggatggtattgagcagcggcaggccccaggggctgatggtgcccttgggcggcggaaagagtttcgggtcggggttgttgagcagcggccagacgaattcgaagttcggcgggtcccgagctcg

SEQ ID NO: 559247 - DNA, 739 bp, Homo sapiens
  misc_feature (389)..(389): n is a, c, g, or t
ggagagagcaatgtcccagtgtcatgacagattgggagagaggcagagcgtcaatgcatataacttgcctagacgctgataagaaggcagctctctcacgcgactgtccagcgtatgatggtggaaatctgtgtgtaagctgtgacaaccgtctatgcgcaacagatcatgatagcgagccttggcttgcgtagtactaccacagtggcactgaagacgctgggacatgccagatgtcgtcctagtgtacttcggacggaaccgttccgtaggacgccactgagtagacaacatcaccatcagaccagacttcgtagtcgaggagactttgtttacctacacgtacaggggccctttcgctcaactgtggtatcaaaacttattgcctnaacacgcaaagtattgtgctcgtcggctgtacatacagatagggcagctacgactacgagagcaaaccaccatacataggtcgattgtctactgacgtctattgtggacggcaatgtgtagagtactacccgagaggcatacatgcccagcgtcagattatcctcggatccactgagaggtatcatcgcacaacaactccttcgccagtgggtttggactttgcaatgaagacggcgcattgcacaatcaatgtgcgtaccgtcgtcgcccattgtctcataaccaagcggatcgccccgttgcaaggattgtgctccgtaggggacaacattgccaggagtattgaaca

SEQ ID NO: 559248 - DNA, 113 bp, Homo sapiens
gcatatacacagcagactcaggagcaccatgtcggctttctgtatttgagacaggtctccttaagttgcccaggatgctcctgaactctagggctcaatgagaaaatatttgc

SEQ ID NO: 559249 - DNA, 935 bp, Homo sapiens
  misc_feature (307)..(307): n is a, c, g, or t
agttcccttgctgggaactctgcgcgatttttcatggacaacttttccatccggataaggccgtttactcccctccgtttacacaaccttgctctccacagtatcggtaaatatggtctgggaacatgagttcccaaaactattgggccccttatcccccgatgctattgcacaacaaacctgtgtgtgccgcacaaagacaattaaagatgttcttccctgagacttcccttaagaagtttctcttggaagactctcttagtgcacacccatgcccaacccgtggccccccaaattaactgtgggncaccacgttacaggccggtataaccgcaaggttggcccagagcttgttaaaaacttcgtgttgaatttacaatcccttaaagagatttggtccttttccacgcctgttccgcagaaacgaggattattgttgtcccccacatcccttacaatcaagtgcgtacatcatagtcacaccagcccctgtaacacccgggcgtctatcttttcatgaaaccataaatatacatctgtgaacgagggggtgtaccctctgctgaagaaaaaacctcgctgcgattctgttgacaccacaacccccctcccattgtttgggatacactgtcccctataaattcggtgttccgacagccggtttcctcactatacatgatcccgttccaatgcatgcacccgtagtccgatcgcacttgcttaagagatatcccccgttctctaacggagatcgtcatttattctggcggacgtatatattgtttttgcctcactggttttttatagacactcaaaagatggtcttgtcatgaaaacatcccaggggcgagaattaggcgtagaaaataaaatccttttagagcaacataatcttttaaaaagacaaattaaaaacaccttttttgcccaaaaca

SEQ ID NO: 559250 - DNA, 443 bp, Homo sapiens
tgtgtgtgaaaaaaaacaaccccggagaaaaggggggggggggaaaaaagaaaaaaaaaagggaccagggacaaaagttctcccccccccccctttttttgaaaagggggagaaaccagggggtgcgcccctcactagaggggaggcgttttcatttcagatgaacaacacgaggaacactcctgcttaaaataacaccccagaaaccactccacagaagcactcggcaccatgaggacaagaaaagttagcaatatatcaaaaaatcgaacaacatctacgaggaaataaaaggacacatagtataaacatagtacactaacaatacaaagaaaataaacaagacaatgagaagcacaagagaagacacaatcaatcagcaatggtacatacagaaaaacatgaccacactgaaagatcatcaagcccaacaaagtaaccaa

SEQ ID NO: 559251 - DNA, 238 bp, Homo sapiens
cagagtgagaccctgtctcaaaaaaaaaaaattagccgggcatggtggcgggaacctgtaatcccagatactcaggaggctgaggcaggagaattgcttgagcccgggaggtggaggttacagtgagctgagattgcgccattgcactccagcgtggcgacagatcgagactctgtctcaaaagaagcagtggcgtcgtctgtggtttctgtgcgccctgtctgctgtgtgtgaactt

SEQ ID NO: 559252 - DNA, 302 bp, Homo sapiens
caagatgaaatgtctgcatgcaaagcaatggaacaccaaaaacattaaacacagatagataaggagtaaaagcaaatctaagacaaacaagttgactatcagagactatttcttaagacacaaccaggaacgcacatatattctgatataccataaactgacatgatatacatggataataccccaactctggataataactaaaataagctgcccttccaaaaatgtataggcataatgtaaaatcttacaaaagcaaaggtaagaccccactaaaagaggagaaatatagtctggtctgt

SEQ ID NO: 559253 - DNA, 1366 bp, Homo sapiens
tacatagcacccacagcctaattatatagcatcatcccgtctactattttttaaccaaatcaacaagaacctatttagctgttccccaaccttttcctccgacccccataacaacccccgtcctaatacgtaactaccgtgacgtccatacccctcacaagtcatggcaagccaagagccacttatccagtgaaccactatcacgaaaaaaactctaccgtctctatagctacatctcccctaacagaatcgtcgcgttaagtttatacagcagtgtgcacagcacgagccagcaacgtaactcgatagttgtacactatcctatgctgtcggaaacaccgacagcgtgtatgccgccagcctgtggccgtcatcaatccaccccagatgcacggacaaacgcaaggaccagacacacgcccgtgaaaaccgcaagggtcaggagtaaaattgcgcctatatgcttaacagcccctgaggttagggatacacccttgccacccctaaaatacaaattctgcaacctaacatgtataccaccgtgccagcacaacaccacgctaggccatcagcatgaagaacacttgctagcttcacattccagtttcctcgacacgtgggccccagacgaaaaagccgcaacccaaaacctacgcctgacggcacccaacaaccaccatgaaccgtcactgaccgtaagcctagaagcagccacacgcaaggcaaaagaaacaaagggtacacaacgcacataccgcaaccgccacaccgagagacgtgccaacgatcagcagaacccccaccataacgggcccccaaggtacggaacaggacgccccacaatcggactcggggcacacaacagacgatcaaccgcagacacagaccagaaacctccatggcaacacacatagggacggggacgtacatgggaaagaaaagtaacgggagcagagcaccaacaataccagtaacatccaaacaacaccccgatagaaccaacaaagcaacaaataaagacgggagacacgccacatcaacgcaatcggcaacaatacagtatcaccgcatagattgagaaggggcaactcacagctgaaggataacgaccagaggagccaccagaacaatgggcgcacgtcaagcacaccgacagcagcccacaggagcgcgttaacacacaatagcgaggagaacacgtaggcgcacggaacgaccaccataccgagacccacgaaccagcaacagcagagagagacgagagagataccgtagaccaagcgaccagaattccgacacagagcacgaacacacagaaccacgggaacagcgacaacagacacagggaaggacagatcacaatcga

SEQ ID NO: 559254 - DNA, 314 bp, Homo sapiens
tgcatcacctagggtcgtttgcaggtggtaaggccatttaccaagatagttgtaggtaaagaagggcagatttattagagaaattgtgaaaatatgtagcagtgggcagctcagctagagaaggggctacctgcaagggaggcaagggctggaggaaagttttatagggtcctgctgaagggtgctacgtgtggaatgaggtcattgtgcccgcaggtggtttgtgattagctgtctctaacaattgttcatacaataattgttcattattgttctcaacttggggctctccccaacctggggacccttcctta

SEQ ID NO: 559255 - DNA, 222 bp, Homo sapiens
gtcgacggcgtttccgagcgcccagcgtatggtctgtgcatgcgcatccacggggggaagggttcaaggagtgcatcatctgcgcgttcgccgaggggctgcgcagtcgtccgttgaccactttcggcaacgtgaagaccgatgtgctgaaggacaaggatgcgacgttcaagccgatgaattttgtcgaggtgattcggcgttcgcttgggctgaataaac

SEQ ID NO: 559256 - DNA, 379 bp, Homo sapiens
  misc_feature (98)..(99): n is a, c, g, or t
  misc_feature (104)..(104): n is a, c, g, or t
  misc_feature (106)..(107): n is a, c, g, or t
  misc_feature (113)..(114): n is a, c, g, or t
  misc_feature (117)..(117): n is a, c, g, or t
  misc_feature (121)..(121): n is a, c, g, or t
  misc_feature (124)..(124): n is a, c, g, or t
  misc_feature (136)..(136): n is a, c, g, or t
  misc_feature (140)..(141): n is a, c, g, or t
  misc_feature (146)..(146): n is a, c, g, or t
  misc_feature (159)..(159): n is a, c, g, or t
  misc_feature (168)..(170): n is a, c, g, or t
  misc_feature (172)..(173): n is a, c, g, or t
  misc_feature (214)..(214): n is a, c, g, or t
  misc_feature (222)..(223): n is a, c, g, or t
  misc_feature (225)..(225): n is a, c, g, or t
  misc_feature (227)..(228): n is a, c, g, or t
  misc_feature (230)..(232): n is a, c, g, or t
agacagtctcactctcttgaccaggctggagtgcagtggtgtggtcttggttcactgcgacctctgcctcctgggttcaagtgattctcatgcctcannctccnanntagctnngantgcnggnttacaccaccangccnngcaanttttgtgtttttngtagagacnnngnntcaccatgttggccaggctggtctcgaactcctgacctcangtgatccnncngnntnnncctcccaaagtgctgggattacaggcgggagccaccatgcctggccagaacaaatgcctttttaaaccttttaagaacatttttaaaatgtctttttctatgtcaaatgtaacgtttatttttttaaacaataaaattgatttgcca

SEQ ID NO: 559257 - DNA, 124 bp, Homo sapiens
ctgagtgatgctcagcctctctggggtgtctgtcttcaacaggaggcggatgagctgcttggcatcctcagagactttgaccactcaggattgtggaagccgtactggctcaggctaatcctac

SEQ ID NO: 559258 - DNA, 633 bp, Homo sapiens
  misc_feature (154)..(154): n is a, c, g, or t
  misc_feature (457)..(457): n is a, c, g, or t
acaacaaccaaaaaaaaaaaaaaaaaaacaaaaacggattacaattttaaacggaattactttctaaattaatgttggggctaaatttgggcgttttcttacaaccttaattccacgcaggcaggcaggttaattaccccatttagatacgaangatttggagtacacctatttttcccacaaggaaaggtcatttttaaaacaccttctaccaggttgggatagggtgaaattagggtaaattaaccctatttgggctccttgggtaccttaattcctagatagattggacctggtaactacgggtccatttacaattattggttatattccccttattctcagggtttcttggcccaatagagtggctcattttttaagataattaacgcttgaaaaagggtaggggtataacctcctttcacattatttgggggaatatttcctcagaattggntcattttttcttcccacttaggaaaacctttccatttaacaatatgtggaatcgtggtctccgggggttacatttggctgggggaccagggaactctcaccaattttcccacatttatttttcaccatatccgtggataatctaatgggtcacaaattttggcttttaacaaactc

SEQ ID NO: 559259 - DNA, 295 bp, Homo sapiens
cccctttgtctgtaatgacaatcagaaggaagataacttttcttattatagttgactattataaagtgcagattatggaatgtcaattcagttatagttttttttcttttggaaacaggtttttgctcttgtgccccaggctggagtgcaggggcataatctcgggtcattgcaacctccgcctcctgagttcaaacaactctcctgcctcagcctcccgagtagctgggatacacaggtgcccaccaccacacctggctaattttggtatttcaagtagagacaaagggaaaca

SEQ ID NO: 559260 - DNA, 880 bp, Homo sapiens
ggtcattaccccaaaagacacaatcccaaaagccactatccggaatgtcaaaatcctgaaagatcaacatccctaaagtctaaaatccctaacatctaattgaatccctaaaccataatgacagatttggaattcggctcaatcaaggcttctaaaagcacatttcaagtgttagcaaataaaggttgtttttttccattcagcccaaatgcatttggcaaaaaaaaaaaaaaacattccagaatgagtgtggttgggccaggcagtagtggttagttgacaaaacctctcgatttaaaacctgctttatttggccgtgccccggcattttcttcccagcgtgagtgaaattccttaggagagcccagtgtttcctaagggataagaaagcacttatccgtggaaatgagagcactccaaagatagtcatggatcgtgaaagccgggccagccttttcgggaccatctcgtgcaatggctctaatctatccctgaatagatccctttaatacacttggtcatctgtggaatcctttaagttaagttctctcgtggtcgtcgtcgtttccccatctgtcaacacttttctcttttgtggagacgagtctcttctgtccacccaggctggagtgccgggggtgcgacctccggtcccattggacctctgcctcccaggttcaggcattctcctgcctcagctcctatagttgggcttacggccccgcattgtgggtaatcgcttcagacagcaggtcccgttgcaggccgctaatctgactagtacgcctggcccagtgtggtaggtggcccccgcctgttatacggttggtctgtcctcgctatgggaactggcggagacgcgtcccagcggacaaacttg

SEQ ID NO: 559261 - DNA, 134 bp, Homo sapiens
ttgtgggtgtgtatatatctgatttgggaagaatttaaaacaacacatagctttttaatttgtttgaaacagactattctgcctgttacatttttgcttttaaccaattaaagaagccacatggcatttaggta

SEQ ID NO: 559262 - DNA, 747 bp, Homo sapiens
ataagacatatagtagtaggccgggcgcggtgtttcaccctccaatcccagcactttgagcgaggctgaggcgggtggataactgaggtatgtgtaaaatcggcctcttatctattataaccctgaggtcagtgagcataaccaaggattaattgtcaacttattttcactccaccttcgtaacattaaaattctggacgttcgaccttaaaaaaggcatttccaaagatgaatacatgaacacaccatacttctcaaaggacaacaaactacaactggttgtttagaagtgataatgtcctttatggttcccgaaccctctaaaattatgtgtaggggcaggctcatgtggggcttggcgacatgggtctcagaagaggcccataggcccaatagctttcataagattctctgagggttcctgtccgctgggtttgccaagtttcttactatatgatgtcctctttcccagaataatctcttggggaaaagacattgtacagttgtggaagagcccccttgcgcaaaacagttgttctctagcctaaaatccatccattaaggaaagtattcttaaaaaatggtggccaagggggtgcccaggctgggatccctaacatggacgaggggctcccaaaacgactgcagatcagctgaacggcgtgtacaatttaaaaccatgcggaggtgacaaaaaagaagacaaaaacggaagaaaaaaaaagagaaaaaacaaacaaacaacgg

SEQ ID NO: 559263 - DNA, 141 bp, Homo sapiens
acgcgcaggtctaccgacctgaactggatgaaacctgtctgtttaatacctggggcgcgggttacaaaatcaataatctctacgacggcaccttcgtgctggatgaacattttcgtccgctgtggggggcgtttcgcagcg

SEQ ID NO: 559264 - DNA, 604 bp, Homo sapiens
  misc_feature (1)..(1): n is a, c, g, or t
  misc_feature (114)..(114): n is a, c, g, or t
ngatgcagttcgcaaatgtacgatatgcggcccggcgcatgtgagtacaataaagtcggtctcatcaagcttatggtcagaaaacgtcactcatataaggcctgggctgtaatnatggtcctggtcttgatgtgggctgtaaggaccatcaatccgtgggatagactgggtttcatacatctccagaagacatgatgtaagagatagcagcgaactggtctgactctcgtatattgtgcacttctcatcaggcgcctagccaacggtggagggctgatctactgacatggcgttgctggttgccacgtgctggttctataacccaattagcttctctgattaccagcgatgtactaagcctgctggtttcatcagggcagcaatgaacgtaatcatgaggtaacattgtctagatgtagttcacacatcatgtgcagataactaagtgtatgtacccggtccaaagactagcatttcgcctgcataatctcaagtagcatttcccggttctgttgcgcagatattatctatgaacccatttgcacgaggagtaaccgatctcagctactctccaagtgagagagtgatggaacctgcatctagg

SEQ ID NO: 559265 - DNA, 157 bp, Homo sapiens
aagaaagacggaagggcttgactgtaatttcctcgattttttgttacgtggatttatttgccaagagctggttaaatactttttgaagaatttactttgatgtaggtcccctcactctaaatattcattaatttagtatgagtggaccgtaactcaa

SEQ ID NO: 559266 - DNA, 106 bp, Homo sapiens
ggccgaactgggcaaggtcattaatgatgggctcttctactatgagcaggcactgttggctgaaaagtttgaacctgagtattcccagatcaagccagaagtcgaa

SEQ ID NO: 559267 - DNA, 597 bp, Homo sapiens
  misc_feature (74)..(74): n is a, c, g, or t
  misc_feature (379)..(379): n is a, c, g, or t
ttgggtttcccttccccctttcggggggggagagggggggggagtgggggggacccctgggggcctggggcccntggcccccccgggtttttatgccccccgcgagggttttttttttggggtccggggaacacccccccccgggaaaagacccctttcccaccgtttgtgcccctttgggccggcggttttgtgggtgcctcccctttcccccccccggaggggggaggggtttgccccccccacccccccccccccaatggtgggttttgttcccccttttttcccaaaatcccccgggtggggggggtggttttggggggggaaaaaaaacccccccccccccccggggggggggggggccgcccccccctttttnttttttttttttttttttttaaagggggccggccggggcccccggggggtggggggtaacccttttttaaagggggggggcccctccccccgggaaaaatttcccccccccggggccgggccccttttgggccctttttggggggggggggttttttcttttttcccccctttttccccggggggtcccccctttttttttggttttttttttgttca

SEQ ID NO: 559268 - DNA, 508 bp, Homo sapiens
  misc_feature (364)..(364): n is a, c, g, or t
tggcgtattgttttgttaacgaatctggaatgcagaggcaccatgtaggtttagtggaacctgtgcctacggggactgagcgattcttctgcctcagtcttccgagtaggtgggactacgagctcatgccaccatggcctgttcattctttgagagtggagaagcgacagcaaatgagagtgttaaccacgatagccttgcattacagacctcatgacacatctgacttgttctacctaggctatgataatacaggtgtgagtcagaccacccagccaatccttatgtttagaatgttaaccttatatgtaaaacgtacatttggcaatgtgtatctaagacagtggctacattaaactgctgngtaggaggattatggaagagtgtgacccattactgagatgccgagcatacaaacggctgtctccgacttttctgtccgaatgtaacactcaatgccaccatcgctattttggagagagaaaacacacattctgcctttatgcta

SEQ ID NO: 559269 - DNA, 210 bp, Homo sapiens
tgcaactgtgcaagacaggctggttgccgggcgccgcgtcggaacatctggggccagcaggcccagactgtatccatccaagttcccgtgtagtccagaggtcgttagagctggtgtcataaagggtaattccccaatcccttccttatgagcatgtatagaacatgggctaggactatgtgccgcccagtagcgctttgatctggattc

SEQ ID NO: 559270 - DNA, 172 bp, Homo sapiens
tggactgtatatgtataagctctcaaatccttcccaacaattcaacacacacacacacacacacacacaccactaacaaatgcaagttggtaaataaacttataaatgaggcataacaaacaccttgtatatatatatatatatctaaggtgttgttgttattgggtgatcc

SEQ ID NO: 559271 - DNA, 82 bp, Homo sapiens
ggagacagagttgctctgtcgcacaggctgagattgggccattgcactctagccttggtaacaagagcgagactctgtctca

SEQ ID NO: 559272 - DNA, 165 bp, Homo sapiens
tctgcaggatccttaatatgctgtctcattccagcgtggtagcatgacttcttcatgatccttagggtgagaagctatggtgtccttgtaaggcagactttccgataacgtcgtcccggctgagggcattcttcattccaattgaccgttagaaaaggcaccagc

SEQ ID NO: 559273 - DNA, 115 bp, Homo sapiens
aatggcagccattagccaggtaatagccctctgggtactcaagtgaggcagccgtgaattgagatgtgctatgaaagtccaatacacctgctattgaaacttctaaaactagggc

SEQ ID NO: 559274 - DNA, 390 bp, Homo sapiens
ttagtttttgagtctggctctgtcacccaggctggagtgcagtggcgtgatctgcaacctctgccccccgggttcaagcgattctcctgcctcagcctcccgagtagctgagattacaggtgcgcgccaccacacttgggtaatatttgtattattagtagagacggggtctcagcatgttggctaggccggtctctcctgacctcagggtgatcagcccacctcggctcacaaagtgctgggattacatgggcgtgagcccatcttgcccagcccacatcatacagtttttgaaatgaaactttgccacaaccagcctttgtgtagcacacacatatatcactgaacctggtttgaaagaataacgttctttttccttttttcataaaa

SEQ ID NO: 559275 - DNA, 404 bp, Homo sapiens
tagagatagcccccagctggaacaagtacaaaggcttacaaagccttacctcttgcaagtagggataggtttactcaattcttgtaggaagctgcatcataccctgtattcatggatcggtgcagagacttatagaaatagctctcaccaaaagctttaattctccgcctaccttactcagatgaactcctacttttagaaaaccaagcggggacagcagagtcgagacatgttaaagagtcagaagaggaagaattatgaaaatcaagagggggaagtagtacggaaagcattgagttcctcttcaaagatccattgtcctctatttgcgaagcctatcttccttgccttcttgcccctagttgtggtacaaattgtccagcccttcccattctgtaatccaa

SEQ ID NO: 559276 - DNA, 399 bp, Homo sapiens
  misc_feature (114)..(114): n is a, c, g, or t
  misc_feature (126)..(127): n is a, c, g, or t
tttggctctcaatatgggccacgggggggggggggggccccctttggggccccccccgggttttttctaggggggtttttgggggggggtttttaagggtttttcccccgggcngccctttttccnngcccccccttgggtttgggggccccccccttttggaaggggggggcttttaaaacccccccccgggggcccccctggggtccgggttttgtttggggaaggggggggggcggggttcccaaggggggggcccgtttttttaaaaggggccggggggcccctttttttcgggggggggcccccctttttgggttccccctccccctttgggggtccccccccctggccccccctttttgttttgttttaagccctttttttggccccgttcca

SEQ ID NO: 559277 - DNA, 233 bp, Homo sapiens
gatagatcgagcttgtaccggtgagcggtgacaaccgggagggagcgtgatttacagcgccgacgtctgccctgcacggcgatgacctgattgaaaaccgggccagctttatcgaagcggacggtgacgccaccgtggaagcgcgtcgcctgaacaacctgcgcgaagggctggtgattgagcgtaacgccgagaagagcgactacaaatggcaccgctacaactactactgg

SEQ ID NO: 559278 - DNA, 242 bp, Homo sapiens
actctacaggatctcgctgatccgcttacgcaggtataaaatcttccacatgcttcagtcctgttgtgtgggcagacatctgacaccattaatgacagccatcaagaagtatccaggtacttcacagttctgtcgaagcatttccattgtgatggcgcggtcgcgctcttgccccggggaggaaacgcgtcgggcatgacgtcatcatacgcgacaacaccgattggccaaaccttgtcctg

SEQ ID NO: 559279 - DNA, 93 bp, Homo sapiens
ggcccccccccccccccccttttgggggggggccaaggggtttcccctgggtttttgggaaaaaaaaaaaaaaaaagggggcctttcccccca

SEQ ID NO: 559280 - DNA, 521 bp, Homo sapiens
ctgaatacttactagtccctcaaatattagctaggccaatacctatacttaagtgacatatatcacaactcaaaatcacctagttaaagaccttccctagcctagtcctaataaaaatcagatcccccgacattctctgtctacctcaccctagcttcatattcctcactgacccttaccgctatagtatattatattcatatgatatatttctaattatgacctgattccattcactgaaatgacaatcccgacaagaacaggaatatttgatctgattttacttcccgaggaatatctagggttgccaattttagcaaatacaaatacaggaatacccaattaaatttgaatttcagacaatgaatgctatctcttagtagacagacgtatgtccaaaatagtatgtgggacagacataaactaagaagttattcattgtttacctgagattcaaatttaagtggacatcctgtatttatatctggcaaccccagctgtatccccagatcctagactgg

SEQ ID NO: 559281 - DNA, 177 bp, Homo sapiens
aaggttccggccccccttttttgggggggggggggggggggggggggggggggggtttttttgtgccagggggcccccccccgggggccggttcccctttttttttttcccccggggggtttgccggcccccccccttccgggggggggggggtttttaagggaattttccttttta

SEQ ID NO: 559282 - DNA, 608 bp, Homo sapiens
  misc_feature (333)..(333): n is a, c, g, or t
ttcccacctcccgggaatttgttgaatcttttttctgtgaaagccaggttctgtctccctcacgcctggttaattcccttctgctccttaactgtcatcgcatggggttaatgagaggaggagagaaaacgtctgtggtttcgttttccttcctggatttcgacaatgtggatgcgtccttgggggaaaggtgggctcgggatccaggcatagaccgtgcgggggcctctccaggagccagtgtgggggagtccagcgcagcagggccagggccaggtggggcagagtgaagacaccagggcaccgcggggccagtgagtttgttgcctcagntgagacaaagtctcagcaaatcatcagtgttcctcttctgtgaggtctttccacgcaccaggccagggtgtcatcaccagacccctccggtgctgaaggatctccccggaaaatagatattaattgcttttcaatcaatgtattccatgtgtatcaatatattccacatgtatcaatatattccacgtgtatcaatatattccacgtgtatcaatatattccacgtgtatcaatgcattccacgtgtatcaatgcattccccgtgtatcaatgca

SEQ ID NO: 559283 - DNA, 313 bp, Homo sapiens
tgggaagctgtggctggacgcctaccttcacaaatgaagccacagcccccgggacaccgtggggaaggggtgcaggtggggtgatggccagaggaatgatgggcttgtgttctgaggggtgtccaaaaggctggtgtatgcgctgctcacggaccccatgttggatatttctacctatcgtcctcgcgtttatctcttcacatctcccacatagcaccgtgccctgatgggacctgagctgcctcatgcgtcagccatcagccatggtacctgcagagcctgctagcaacttcttacaaggagcacagaggag

SEQ ID NO: 559284 - DNA, 866 bp, Homo sapiens
  misc_feature (12)..(12): n is a, c, g, or t
  misc_feature (835)..(835): n is a, c, g, or t
acacctcccagnaacggcggaacatctctgagcacaatcacgccatttctcttgaaacgacgttttccgcaataccctgcactgggggagatctcgaaagggcgcatttacaccacggcgacggacgtcccagacgccaccagaagaaccggaccggacaacgcgcaaacaccgacaaacgcccgaacggcgacatcaccaacagacgaacggcccccgaggcacggcgcctcaccgacaggaagaacggctccagcagcgatcaccccgtgaccatcgcgagagccaccagagaacataccagaaaccccgcgacatcgcaacctaaagcccacggagccatccagcagcaccagcaggaaacccaggagagcacgtaccacccgactgccacaccggaacgcggacaaaccagcacctcgactggctgcgcaaccaggaacacgcagcacggccaatctaacaagccgagaggcccacggaaagaacgatgccagcgagaaagagcatcgacatggcccacctggacccaacggaccacacaacaaccctcgacacggaaccacctcaaaccaccaacgcaggcgcaccctcacaccatcaaacgacaccacacacccactcacaaatgatccacacaatgccgcactacccacacaactcctactatcacacacacgctaataacaattacagcagccacaaaggcgaacgccggcaactacacttctcacggacgcggaacccgcacgtacatacacatcacacaccgctcacaacaacaaaggccacacagcatgcaccatccatacaccgacgccacaacaagcacacngatgcgctgaactacgcccaccgacatcgcc

SEQ ID NO: 559285 - DNA, 113 bp, Homo sapiens
gggcagctagttgtgccagtcttccagcagcaggcaacacagcaacagtggcagcccccaacagctgtgggggttcaagtccagcagggcattcaacctcactggcatccacc

SEQ ID NO: 559286 - DNA, 912 bp, Homo sapiens
cccagagctgaaatagtccttgcgctaatccttacgccccgtggcaccgctttccggcatagttaatcgtggagcgttttaccgatgttcggctgcttttcgcgcgagatttccatgtgtcgacgacgatatagtctcccgtggccccacgcacgtgtgtgggccctccccccctgtggggggatcccgacacaactgtgggcgcatgattacttggctgagccagacagaggactgtaaaagttttgggttacaacaccgaggcgtttctccctcgggtgtttacccgccaaaattttctacgggggtttcaaccccttgcatgatgtttcgccgggtttgtccgttggcaacttgcgcggccccctgtttccaaagatggggcccccacggagggattcatcctcctaggggctttttactgcccgttggcgaccaaaactgcggtctttgaacgccgtgcggtttcattcccccggcacctaagcccgctgttatcaaaacccgtgcttatcgctagtacaggcccgataggctgtcggttccttaggccccacagagcttccacactccgcgggtaaataaactgcatcaccctcacaccccccttgttggttttgcattttcattttaatggggtcttaaacataaaagacgccaccccttctgccagttcacacccacgttgctctctaaggccactttaccctggcacccacaatttttcaaaaaatgctggcctgtatcaccatcggtttttttcattattagggttacaaaacccaccgttttcaccatcagttcagcccacacacgccctggataatataacttttttgggaaaatccatctttcttaggagaatttttttccaaatttcccaaaaaatttcttctttcaaactttcataac

SEQ ID NO: 559287 - DNA, 377 bp, Homo sapiens
ccaaggtgaggaccattgttatggccggacttggatggaattggacagcctgggtaaaatgttcgtccgaagctttgcctggcaaacccgatgtggttgaaatcgagaaattgactaggttcaaatggaggaagaccgagacgtaagggaaaaatccactgcctttcaaagaaccgtgggaacaggtgaaggatgcagggaagtcgaaaagaggggtgacctgccattgtgaattgtagattgaaaacggatggcttaatgatttaactccttttagttgttaaactttgtttgatgcatactgcctctgaaggccctagcctgcctttgcaatctgcccatctactagggtgactgggaaggaatgacttgactgc

SEQ ID NO: 559288 - DNA, 440 bp, Homo sapiens
ctctcctcagcagcgatggtgcatgctttcagcagtacagggcggtcaggtagaaatagtcaagttcttgctgtgcgtgaaaacttatgtggccctttcaatatttgaactgctatacgatgacatctataattttgtcatttttaaatctcatacaaataaatatactttgatatgtaaatatgcattaggttatgctattatttatatctatcttaagatttaaattgtaggtgtgtcatggaaataatttaaaggcactctgttcacattgcctgtgttcatgctttctaaggtttatattacatcagatgtatatttttggtttggcataagctactgttgtaattttcttggctttttgttcataaagaattttctgaaggaatggtaacctttcaaggattgtgaataaacatttttacaattaaaaaaaaaaa

SEQ ID NO: 559289 - DNA, 191 bp, Homo sapiens
aacgataggaggctgagatggattcatcaggtaggatgtaacctttaaagaacagatgattccaatattatttaagtttgtcatgaaaaaaaatttttatttaggagacaggtctagcgcggacacccaggcaagaatacagaggtacgatcacgggttacggcagccttgacctcccaagctcaagtgat

SEQ ID NO: 559290 - DNA, 186 bp, Homo sapiens
tcttcaacaagttgacagtacgcggtagggcaggcgggtggtatacagggactcgggaccacgacgcggggttcttactactaacactgacggcacgcgggacgactacccctgaaacgacgggacggtgagggacggcgtgacgtacgacgacgacacacaacgacgacgcggacgacgacacga

SEQ ID NO: 559291 - DNA, 373 bp, Homo sapiens
acgatctatgctctggtatacatgtctgaatgttggaagagggtttggatgccattcgtgacctgggaaagtcctttaccgtgtggcctctgctctctcatttgttccaccacctgtgacagccttggtgtgtacccatgcagggaattcctgccattccctgatccctgttgcattgttacctacaaatccgcctctctcttcccaggtgtcgtcatctggggcattaaaaaaacacaggtgttgttatctcacccccagactaatgggatcaaaataaggagttgggggattggagtgaagaggtgggggcattggtcaaggattgatacttctgagaatgctcccaggttataagttgccagtattgaga

SEQ ID NO: 559292 - DNA, 370 bp, Homo sapiens
ccgaggcaggcagatcacctgaggtcgggagttcagggccagcctgaccagcatggagagaccctatctctactggaaatgcaaaattagccaggcgtcatggcacatgcctgtagtcccagctgctcgggaggcagaggcaggagaatcccttgaacctgggaggtggaggttgtggagagctgggatcgtgccattgcactccagcctgggcaacaagagcgaaactctgtttcaaaaaaaaaaaggaaagaaaggaatttgggaacaccttctatctgccagcgtgaaagctactcaattttgcagaattaaacatgtaagagaaatcaaagtcttgctcccaaaagaacgtttcagaagttgtttt

SEQ ID NO: 559293 - DNA, 1034 bp, Homo sapiens
gggaaggtgagtggtagagagggggtctctgaaggcccttggggctgacagggccagtggagactctgccagctgattgcatcattcctgaggccagagtcgtgtcagcaagggacagtagccagagctcctcttcctttaccaggcgaagggtgcatccccatcatgaccttcctgtgccgcttcagtatcttgtgtgccgatcgtgggcacagggtgcaaggcttgggcggtttgtgagtcacatgcagtgctatcaagagtctggaacgctcgagtccctggacaggagtgaggaaagccaaggcatggatgcatgttcccagaagtcgaagtctagaatctcatcgtgtcatccggagtctgatccatttgcgtctgaagagtatatctcatatcagggctctggacaagatcatgatctgttgcacgttaagacttcgcatctctcgctggaacctctagaccactttagtatacgtatgagtacataatacacatagactaacggcgtaggcattaagctacctacgctcctcagattgtagccctgaataccctagagacgccacagggctattaacaagcctggatgactactagattgccacatacagatgaaaagcggggtagggctagagtaccctaaacctacagcagggacgtaccagtacactgataggtctgatgcgattgtgcggcataccattacgtcacggcaagctatcatgttcttaaatggagaactataatttataactcactgttcgtagcataagagcatttgcattccaaaaggctttcgcataacccctccactacccctggtcgctcactaagaatccttggaacgcaagggttccataattcccctcaatttgggcacaatgaggaaacagaatcacacggacgtcaaagcgggccttgatccaagcgtacccacgctacagacaccacaaggccctaagcccagcagaagaacacagtcaactgggataatacagcaatcaatccaaaaagtgcacataatccga

SEQ ID NO: 559294 - DNA, 284 bp, Homo sapiens
ccggcagccatggagagtgtgaaccaggtagagtgagagccagggagagtgtgaaccagtgtagagtgggagtcagggagagtgtgaacctgggagagtgacagccatggagagtgtgaacctgggagtggctgcctgctagagtgactgccaatcagagtgtgaatcagctagagcgggaaccagtgagagtgtgaaccaggtagaatgggaaccagtgagagtgtgaaccagggagagtgagagccagggttaaggtctcccggagggttaaggtctcccgg

SEQ ID NO: 559295 - DNA, 80 bp, Homo sapiens
gtttctgtttctttcttcctttctttttctttctttctttccttctttcctctctttcttttctttctctttccctccct

SEQ ID NO: 559296 - DNA, 945 bp, Homo sapiens
atgagatgcgcactccatgtcgatcatgtacaggttcgccattgccatccgctcgagcaccagataccacgacccagcatgcgcatcctactacagtccgtccagtgccagatggcgaacggcggcgtgcagcaggcggcggtgatggctactcaggagagcacgaggttagtgcagccaagctacggcgtagtctgctcgcttctaggcagcgacacgggccgctgctagacctagctgagtagcgtccctgagctggagcgggtgctgaaggcgccgcgacggacgtcggaaggagaagtacaaagaagtggggagctccgatttgaaggtgatgaggaaaattggcaaatctgtaactgcagacagatgggaaaaatatttgatcaagatatgccaagagtataacagtacctgggcatgggagatggagaagaaggggtatcttgaaagtgagtgtagaatgcaactagcactcttaaagtactatgtgagtgtgagttagaagacactctcaaatcaagaatattattaagtgaggaggatgccgaactatgcagtccccaagccactctgggcgagacacagatggctcacgtacggtaccacaggatcaagatcacacgtccgaagtacatagacgaaccgatgacaaacggcctcaggacaggctgtagaagctcgacggtggctggagccgacgacgaagcaacgtggcagacctgaccaccgcggacagaactctgtcggacgcccgtaacgggcgagactagcggaagaacagtacagaggacgcagaggacaatcaggggaacgagctacaccggggccggtcacgccggacaccacgcgccagcaccggcccggcgcggaaggcaaggagcagcgcgacgacagacaacgacgcgagcaggccagcgcccaccgcagcctcaccgaaacacc

SEQ ID NO: 559297 - DNA, 891 bp, Homo sapiens
aaactggctcctgggggtaagcggtgggtactggactaaatacccatccggagtatgcgcgtcgcgtagcacatgaactggcagtcattacctgtgcaccgtttgttaccgcgaccgaacaaatttgaagcgctggcgacctgtgatagccctggcttcagcgcgcacggcgtcgttgaaagggttggctgcgtcactgatgaaaatcgccaatgatgtccgcttgtgctggccctcctggcccagcgctgcgggaattggtgaaatctcaatcccggaaaatgagccgggcagctcaatcatgccggggcaaagtgaacccaacacagtgtgaggcattaaccatgctctgctgtcaggtgatggggaacgacgtggcgatcaacactggggggcgcttccggataactttgaactgaacgtcttccgtccaatggtgatccacaatttcctgcaatcggtgcgcttgctaggcgcatggcatggaacagtcttaaacaaagcactgccgccagtgggtattgaaccgaatcgtgagcgaatcaatcaattactcaatgaatcgctgatgctggtgactgcgtcttaacacccacattggttaatgacaaagccgccgaggatcgccaaataaaagcgccatcaagacagggctgaccttcaaagctgcgggccttccgctggggtatcttagcgaagccgagttcgacagctgggtacggccaagaccagatggtcggcagtatgacagccgggcgttaatctggcgcgttacggttgccgcccgcgcactggtcccaccgaggcggctgccctgagggtcatcgcgggtggctgaccttggccggctcggattttgcagttcacaaagtccgggctcccgggccttta

SEQ ID NO: 559298 - DNA, 646 bp, Homo sapiens
  misc_feature (47)..(47): n is a, c, g, or t
  misc_feature (572)..(572): n is a, c, g, or t
  misc_feature (581)..(581): n is a, c, g, or t
  misc_feature (588)..(588): n is a, c, g, or t
  misc_feature (605)..(605): n is a, c, g, or t
  misc_feature (618)..(619): n is a, c, g, or t
  misc_feature (621)..(621): n is a, c, g, or t
ggttttcaggttcctgtgtcttcccgtgagtgctcgctccacggcanggaggactaggaatcaggagtcagggccgtatgctggaggctgagccggggagcgcggctcgcctcgcttgcggttgtggcagcgaagggagaataaggaggtgcggctgaagcgatgttgccagggtgtgtgccctggtggccaagtaaatcaccctccgttgtgtgacaaagcacccgttgaaccatgtgtgcacctgtcttacaggattggcccactttataaggcgcaagaagaaggcttggtgtgtgggttggtggggacgtcatcacagagaggtgtggcaggtggagagggtttggttattcaggaccacaaatcatttaacattcggttacccacagagggagtgtggaaaatttgcctgttgtggttggccccaacggctggtccttacaaaacttcgttgggaactcagtgggattccttccacatctgtgtgggcctccccagaaaggcagtgggttattaccccggggattggagccatgggcagttggagctccgtggtaaggtttaatttntaaaaacancttcaangagtcaagataattcanggggaaaagaccnntngcaagggttggtaacttggaagaaa

SEQ ID NO: 559299 - DNA, 588 bp, Homo sapiens
  misc_feature (47)..(47): n is a, c, g, or t
  misc_feature (514)..(514): n is a, c, g, or t
  misc_feature (523)..(523): n is a, c, g, or t
  misc_feature (530)..(530): n is a, c, g, or t
  misc_feature (547)..(547): n is a, c, g, or t
  misc_feature (560)..(561): n is a, c, g, or t
  misc_feature (563)..(563): n is a, c, g, or t
ggttttcaggttcctgtgtcttcccgtgagtgctcgctccacggcanggaggactaggaatcaggagtcagggccgtatgctggaggctgagccggggagcgcggctcgcctcgcttgcggttgtggcagcgacggagataggagtgcggctggagcgatgtgccaggtggtgccagtgccagctaatcacactccctgtttggcagcaccgtgaacactgtgcaccctgtgtcttcagatggcacttaaagcagagaaagcctgttggtgtggcctgtgggagtcatcacgagacggtggccagtggaaggttggttatcggacccaatcattcacatcgctacccaagagtgtgggaaacctttcccttgtgtgtgcccacgcctggttctcaaacctcctgtggactccatggggatccctcaccacctgtgggcctcccaaaaagcaagtgggtatttacatggcatgagcccaatgtgcacgtgaggatccgtggtaaggtttaatttntaaaaacancttcaangagtcaagataattcanggggaaaagaccnntngcaagggttggtaacttggaagaaa

SEQ ID NO: 559300 - DNA, 137 bp, Homo sapiens
gcgtcgaccaatcctcccaccttgtagctgggactgcagctcacagcacacctggctaaaatgttttggttgttgagacggattctctatgttgcccaggctggtctcaggctcctgggctcagatggtcctcctgc

SEQ ID NO: 559301 - DNA, 342 bp, Homo sapiens
taggaaccccccctcctttccatttttatttattaaatagagacaggggctcactatgttgtttgggctggtctcaaactcctgggctcaagggagtccttttgccttagcctcccaaagtgccgggattatgggtgtgagccaccaccactcctggctattggctacctctggcttttttttttttttttttggaaagggagtttcattttgggggccttggcgggcctggggtcgaaatgccaaattttttggccaattgaatactcaacctccgggattcagggatttctcttccctaaccccccgggggggggggtataacgggcccttcccaccaaa

SEQ ID NO: 559302 - DNA, 550 bp, Homo sapiens
  misc_feature (350)..(350): n is a, c, g, or t
  misc_feature (374)..(374): n is a, c, g, or t
  misc_feature (550)..(550): n is a, c, g, or t
gaaaatgagaaagaaagagagagagagaaagagaaagaaagggagaaagcatggtctgaagatgagagaaagaaagagagagagagagaacggaacggaacggaacggaacggacggaacggaacggaccggaacggaacggaacggaacggacaaaaaaaaaacaaaaaaaaaaaaaacaacaactttgtgcggcgccgccctgcgcgccccttaaaaaaaaaggtctttaaaaaaaccacttcgtgttgggggcgccgcggccccactagtttaatgatgacaaccgggtggcccaatgaggtggctcccaagagagaaaccagcgggccaagtgaaatttaggggcngcgttggttctcctccaaccacanatataaaaaaaaagccgcggggggggacaaaccggacggcgtctgtccgtgaacacaaacttcccagagaggagagtctcccgagggccaacacagagggcgatcctacaccaacacgaggctgttccaaaaggcgagcacccgattataaaataagaccccggggcgggggaagn

SEQ ID NO: 559303 - DNA, 398 bp, Homo sapiens
  misc_feature (19)..(19): n is a, c, g, or t
  misc_feature (51)..(51): n is a, c, g, or t
  misc_feature (53)..(53): n is a, c, g, or t
  misc_feature (310)..(310): n is a, c, g, or t
  misc_feature (318)..(318): n is a, c, g, or t
  misc_feature (330)..(330): n is a, c, g, or t
aaaccaaatataaaaaatnaaaagttaaaaacataaggcaacaaacacaananatgaatatgtaagcactacataaagcattgattttgttaaaaaagaaaaggtatttaggttccaaaagccagttttgactaagggagggcggaagtcacgaaggtgggggcaacacacagcagggacaccacaactagtagacacaggatttgtgcacaaacttgagagcttgcacaagtttcgcaaaggagacctagcttgcccaaagctgaaattctccaaaactggagcttgcagggaaatgacagtgggctgnaaattttngagtttaacttnccactcccaaaaaggcctgctatcccctcccactccccactccggccttccttggcttggctttttta

SEQ ID NO: 559304 - DNA, 192 bp, Homo sapiens
taatgttaattgtttttaaaacggggttttttttccttaaagcaatttttttcttttcgatttaatgaaggattgctagctgaagcccgtttgccatagaaagaggtcagattgttttgaaaggggggcagcctgatttaaaacccaaccctgaacccttttaaagaccaattaaacatttttttcccgcca

SEQ ID NO: 559305 - DNA, 343 bp, Homo sapiens
accactaacaacataaaatagaagtggtagggagatagactatgggaaagagaggtaagaatacagcctaaagaagaactactatacagtaaagaatagctagtaggtaaataaggtacaaagaaggagataacaggaataatggctaggtaacaacaaaatataaaacaggagtaacaagggaggcatagtagtacagggtagaaataatgaacgtagataccaggttacataatacactagcagctagtaaaaggcgcgaacctataaatagcactagtaagactatactactaacaaggtaggctatacctacaagagtaataaaagtaggcagcgtgaa

SEQ ID NO: 559306 - DNA, 408 bp, Homo sapiens
attcggcacaggcccaaaggagcatctcggaggagaccaagcagaagctgaagtcagccatcctttctgcccagtctgctgccaacgcgaggaaggagagcctatgccagccagccctggaggtcctggagacatcaccaggagtctcgctggagacagacagacgaggagagataatggacatttgaggggcatgagccacgcagcccaggggacagcaggctggaatgcccctgcaggaccctgggcaggaccagaggccacatggatgccactccccacacagcccccaggcctgcccagcccacctcctcatggcatcctccctgtacccaggtcaggctgtccacaccacatgggagcccagaggaggaggggcccgccttagccatgtgaaggtggattggt

SEQ ID NO: 559307 - DNA, 138 bp, Homo sapiens
aagcttcattcccctttttggtgtatcttctatccgctcctcacactgttccttcacccccgttcacctgagttgaaaactaacgaccagagacatgcagaccatgttcaagaccctgtcgagaggatattagcggca

SEQ ID NO: 559308 - DNA, 1258 bp, Homo sapiens
caagaggaacaaatggaaactgagcagcagaataaagatgaaggaaagaagccagaagttaagaaagtggagaagacagcgagaaacatcaatggattctcgacttcaaaggatacatgctgagattacacacaattcactcacaacattgcatcacatcttgatgtgaacagcatgccattgaggccttggcatgaacttgcttcacttccaggtcacaatgccaaccaagctccagcaaaccacacagcagcatgcattcactaccactgcacacacaaataccggcgcattcacaagttcagtcaaggtaatccatggcacacacagtctaccaatgttgtatcaaccacagtttcaagcacacatgttcttggttggtgaaggagattccgtgcatcacccaagtgctgacatcacatctcttgctgaacaaagacagcatgcaggcaagcgcaataaaaccacaagatcaagggcacacgcaacagggccaaaccaaaaagctcagaagaaggcaacaaaccagggtccacagacttctacaatggcaggcatctgcatgctccaacgatggtcaatcagccacaaccataaccggggagcagcaaatgaaaagaacagcaaagacacacatgcaagccagcacgaagaaaaagccatccagtgaagagagagagactgaaatattctctgaaagggattctacactagattaataggttggcattacttggaatatacgagaaaccactaggacacagtcggcacgggggtttcccattcgcacactcaagcaccggtcggaacacctacaacactctcgtcctcagcactagcgctccggactgtactacaccctcgctctgcaccggacacacctccccttggctctcacacgtcacgcacaacacttctcgccaacggcttcttgtccacgtgatttaacacagcacactaatatacagctacacgtgtgagcacatacacgccagtgttaagcaaaaggtctacactgcgacctatcacacaacgtgtcgcgacacccatttttaatactacgccgagtccaaactaaacatcgtctccctacgaatcacaccaacagccaactcacaacggtgatcgatgctaaatgaaaccacacttctcacaacatacgacgtaccagccaatactaacaacaacacccacaatgcaacctagacaaaacaagaagagatgataaaccaaaccgtcacgcaaaatcgacatcaca

SEQ ID NO: 559309 - DNA, 760 bp, Homo sapiens
cacgtagtacgtcgtagctcacttgcactatgtcctatcaagtaggagctgtattcgcatgcataggaaggctgtcatttcactgattgtccgctattctcaggcgtagaccctaggacaaactacgccaagaatccatttcagcgtagtcatattcagtcggcgtaaaatctaacgtttcgttcccacaacagattgctcggcctatccggaatgccccgaaagttactcggactacccgatgtgatacaccagatggagtacgatcctatctatctgtaggcgtcattcatttctctaacagcagtagtgattaataatgttgatgattagagaagccttcgcttctgaagcgaaacagtcctaataagtagaagaacccatccataaacctggagggactatatggatgcgccccatcctatcagacattcgcactgaacccgtgatagcataagcagttctagaccgaagcaagcaacaaagcaaccgcagcaccatcagaaactctgagggagcaagtcctctgcccccagcaggaagcattcagaaacacccaactgtcgaggagccaaagcacccaataagatggacatcaccttggttgaccgcaggtaccgagagagcacgaggaaccaagacaggaggcagtcaatcaccgacactacagacgacagggagccgaacgatgagagacacgacaacacagccggggcagcgaccgaggacaacgcgagatccacgaccgtcaagcaattgc

SEQ ID NO: 559310 - DNA, 103 bp, Homo sapiens
atttggagccacatgctgccattcggataatcatccaatagttggatgatcttaaggaagtagttggacttccaggtcgccctgtcttcccatgctcatcacg

SEQ ID NO: 559311 - DNA, 488 bp, Homo sapiens
ggaccagatctccgtgtctggattcgtgcctgagaccccttgaggactacaaggcgcccacgtgctccagttcaccacccgcacggcgcagtgccggaacacttggcggccctcgaggaggctttggacgtggacccgatggttctttaccaaatgaagaaatccgtgaaagccatccacagctctgggctggctcacgtgggtaaatgaagagccgtgacaccccggctctggagaagtttggcggcaactgtgtatgcagagatgaccccgatttaggaagtgcgttcctgaagttctcagtgtttaccaaggagttgacagcacttttccaaacctgattcagaatatgaccacatatatctccttccctttggaccgatttctgaagggggacctgaaaggagtgaaaggggatttgaaaaagccttttgataaagcttggaaggactatgaaccaacaataacccagatataaagaaaaaaaa

SEQ ID NO: 559312 - DNA, 838 bp, Homo sapiens
  misc_feature (195)..(195): n is a, c, g, or t
  misc_feature (199)..(199): n is a, c, g, or t
  misc_feature (802)..(802): n is a, c, g, or t
cctaagaggatccatggcgtttactctctgaagacgttgaatcagactgcctgggaattaagtgacaggaggctgagtttgtggggatgtcttatgccttactgaaactgatgggataagtggaaatctgcttgatgaaaggaaactgcagagaagagaataatttgcaacccattcttctgaggcccaaattanctcnataccaacacaacataaggacactataagaaaactgtaagtactcttcataagcacaggtatgataatttttaaattaaaatttaataaatgaaatccaacaatacacaaaattgattctacattgcaactaagaagggtttataccaggaatgcaaggttagtttaccattaaaagaacaaaatcagaaaagtatgtggtcatctcgctagaggtttaaaaaaaagcatttaagaaaaataaaaatctatttatttataaaaatagcaggaatctggggaagaaattcaatgttctcagtctcaagaagggcattttgaaaaaaatatacaagtaaaatacttatttgtaaaagaatgaatctttttccatttaagattaagaaaaaagtcagggatgtttgcactcacaaattcttttcaatatttcagtataaaaagtcaagagaaatacataaaagccattcagatttagtagaagctggaaaacagtctttttggctcataaaatcatgtatatataaatcctatgaaaacaacacaaaaatacttaaagtaataagtgtttttgtattacctaataaacccggcagcggccgggccnggctcgcgcgaacaatcacagtatatgaacattgca

SEQ ID NO: 559313 - DNA, 86 bp, Homo sapiens
aatgcaatccctgaacgtggaatatgtttccattttttggtgtcctcttcactttctatcatcagtgttttacagttgtaattcca

SEQ ID NO: 559314 - DNA, 246 bp, Homo sapiens
acctatcatttgtatgaattgacaaggaatttgcgtgaaagtgtgcagagatacattagttatagaaactgaactactgggctgtagtgaggaaggacctgcggatgcatattacatcatataccgatacgtgtttctggtgaggcacccaccgtttctgttttcttctgttctccttccagagattttctatgcctaaacaccatttgaagccatgactgtatcgtgatgaggggttattacagt

SEQ ID NO: 559315 - DNA, 899 bp, Homo sapiens
tcctagaaggtcgtgtcacgtggaatctcttaatctcagcatccggaactccaggaagtgaaaatgtccgtcagatagaattctatatataccatttctttggaaccttcagtcctcaagattccaacatcatgacctcagtttcaacgacagtttgtccttagttcctctagtgtcactgctcttagggtgctgcctggtttgtgcgcaagcatgtatgaagccgcgatgcatgcacatcgacgccttttgtgaagagtgatggttctcaggcattacaggcattagtgcctgctaggggggtatatgcacgagaaagagaaaaatggacagtatgtgactttgcaaaggcctaactgaggtaaaagctcaccctgaaaacctttgcgcttaaggaggctaaaacctgagattggtggtgtgaaagtgttccatataatcatgtcaagataatgggagctttgcacataagtcattggttctccatgagatgggcaactagcatactgtatcgcttggccaaaaaatgttttctttgccatgaaatgttgccctgaaaaatgcggctcataaattggcctcgttcggttgtcacggaagttagatggctggattacctagtaagtatggcatagtcctagaatttcctcaagctgtgacatatggagaacgagttctgcccggaatctaggaaatcccctgggcggttaatagcggaccctatcggggagttttactaaagtgtggggggcccccctgaataattgagtcgcgatggggaggaactttctggagacctaagctggtcatcacggggatgtgcaaaaattcgggcggttgaaaatagccgcgggtaacttcgaaaaccctgtgcagagaaggagacacgacgaatccgg

SEQ ID NO: 559316 - DNA, 215 bp, Homo sapiens
  misc_feature (93)..(93): n is a, c, g, or t
  misc_feature (109)..(109): n is a, c, g, or t
  misc_feature (133)..(134): n is a, c, g, or t
atccccccgcggctcatgtctacggagcctactctgaaaatgtggacggaacacactcgctcgctcctttaaaggagatcaccagcacactcnttaacaagctcccgtntgcttgtctttttttgtgcgtatnnagtccactgaccaagtcacccttaagaggggctgcctggggctcctgttttttagctgcgtaagacattaccgcgttggct

SEQ ID NO: 559317 - DNA, 444 bp, Homo sapiens
agggttgaagtgatgattgggtaagcctcggtggacattcagactgactagcacagagaaatccatgtgcacaggaaacagtgctccgacttcactacaccaccaactacattttacactcgtacaatcacagatactgccccacacgtgcctgagagggtctctctgagaggcaaggtactcatcccatctggtcctttttgctagtctccttgtcctcccagattgtgatgcagcttgttggctttcctctccttcattcctgggctgtagagactgtttatccttgtctgtctggcatcaactgcactctcctctctctctttctctccagtgtatgtccatccaggtgtatcccctggacaggcacttcattcttgacttttggaacttcacgccctcctacagcttcaaatatcaccactaagcaaaaaccgtcactgt

SEQ ID NO: 559318 - DNA, 849 bp, Homo sapiens
tacaacagatcatttgtagttatttgatcatttcaggccaataaccaatgaatacccagactttgagtgcaaatagtcaattcaaacagcacactgtctggaagtgtgcggccgacttgctcatgcagccaaatgtacaattcatattgctaaatcttaggatggcttcactgggcaaagctacgatcaagtgatttttttttcaaataaaaaacttattcgaatgactacagtatctattaaaaccatgttagcacaaattacaattgtaaactccatgataaataagatagacaaacttgaaggctcctaggcttgataacgcaaatggataaaaatgagatgtgacatttgtcactctaataaaatcgtaattgcagggctaaataaaacaatacacccccaaaaatgtgcatattaatacaagcaaaagtacattattaaggtgcttcagtttcaattatgactctgaaaaattagaccaaaagccatatcataaaacgcgtgttggtatgcgaaaaatataataacccagaacttgacgaaaatagacataataagaatcatcatagcatatgttaacttagtatgtataaatactacaatagccgataacattatcgttgtttcatagattagtctatttggtattaacgtaatatactagatgagcaacgtagatcaataatcgagcgattgtatacaaatgggtaaagatcgggcccgagacgtcccgatatacctagaccgttaaatgagtattgcagggaagaattatgtcatgcatcttgctaaaataattgaggagattatatgagttcacacgataatgcgtaaaacatatatccg

SEQ ID NO: 559319 - DNA, 414 bp, Homo sapiens
  misc_feature (118)..(118): n is a, c, g, or t
cctccaccagttaacaggcattgtggaaggtgaaggcataaaatgcgcagtgctcattgaagtgttattgagtgctcaactagcaagagaacctttgaacacaatgggagctacgaantacggtcatgcttactctaatatctgtgacgtgtggacaacttgccacttcaacagttctggacacttttaagctcccccgaggagaagataggaaacttggacaccctgtgtgggattgagaatcacaaaggggcagtctcgcacctggtcaagataaagctgaactgaactcttcattcacaagtaggattctcgtaagaggcaggaaagcagggaccgtctgtcactacacacagcaagaagaggtgaaccttaatgagggaagaaaacagattctattaggggaaaaaaaca

SEQ ID NO: 559320 - DNA, 753 bp, Homo sapiens
agcgggttccttcgccggcgccagggtagcggtgtagctgagcagcgtcgcgcgcgctaccgacacaggttcggcccgtaggcgtctggcagcccggggccatcttcagtcggagcgcctatggccgcagccgtgcgggccgggagtcggtcgggtactgcttgcgtcctcggtcgttgcattgtgtttgctgctgagccgcgggccctggccctggggctggagacgatgcctgacagagatgttgctgcgggatgtgataagctcttaccgctccactatgaccgctataccagctctcgcgtcaggctggatccgcatcgcgcacagtgtgaaatgtgttggaggcgacaggctgggttgtgattcttataccaccaaaagtcatacagtgtcagaacaataggctgggatgggtatgatgtacagtgggaatgtagagacggacttaagatagttgtcatacaaagtttggaaacatagctgtggtgagctgtgaaggctatgagtacctctgaagaccagtatgtactaagaggttcttgtggcgttggagtataatttagattatagagaagcttggcctgcagagaactgaaggagtctggaaagcagtgaacggctttgactctattctctgattattattactaagtggtcctcggcggattcctgtaacatgagtggattgagttaccatcgtggtactccttgggatcgcctgttgtaagtctataagctgtacctgagtga

SEQ ID NO: 559321 - DNA, 333 bp, Homo sapiens
tagtcggacctctctgctccagattcgtgtagggataaactctgttgtgatgaaagagaaagaacgagtgaagccaggcgtggtggctcacgcctgtaatcccagcaccctgggaggcggaggcggaggcgggcggatcatgaggtcaggagatggagaccacagtaaaaccccatctctactaaaaatacaaaaaattagccgggtgcggtggcaggtgcctgtagtcccagctactcgggaggctgaggcaggagaatggcatgaacccagaaggtggagcttgcagcgagccaagatcgcgccactgcactccagcttgggtgacacagc

SEQ ID NO: 559322 - DNA, 1349 bp, Homo sapiens
  misc_feature (256)..(256): n is a, c, g, or t
  misc_feature (426)..(426): n is a, c, g, or t
tcagtttgtaaatgatctaatagactctgatcttgtgtggacacgagcagaattggctgtgtccctggatcagtctgcatactggtatggtccatagttggtcaatagccctattctgatatctgtctgttctggatccttgtgagcgcaattctcgtctcacggtcacgtcgtatactatcagaatcttggatgacgagcatagtgaggctatttacgttaactcgaatagggcagtacacagtagaggaccganacgatgtgtgcgtaatgagcacgcttggcgtgatagtaagagtgattccaggaaatagtaaatgtgcatcttaattgacgtatgtcagtggacacagtttacttttcactattcacttttggtaactctattttgtgtgattcctctagagttgcttgctactgatctcnttgtgacggtccgcgtttagtgaaccgggcctacacactatttgctaattgatacccggtagtatcgttgtgtaattttctgtgcaattgggtcgctagatggtacatccaagcaagtaactctcgtgtccatgggcacttatgagttcctccccgtcacggagacggtgttcgacaaacgattgcttcaaaaatctcaaactatctatgtatacttacgtctcggggtattacatgggggatctcgtaagttggccaatctggccatgcactgtagttcctataaatacctaaataaatctcttataggtatagaattgcttcgagcgcacacattggagaagggcctagattgtatgccttttccttttaggaggtttagactgcaattgtaattggaagccacgttactgtggaggggcgcgtcttaattaggtagtctaattcctctccaagcgacatttcgcggaagtttattcgatacctttgtgccccatttgtaccacggatcaatttaacgggttcttgccccatatttaaaactacgcaaccgtggaattccaaaggtttgacctcaaagtttcccaagaacttggttggaaagggttccctttgtagggcgcccttacacctgtctggtgttcctttcgtctttgagttccttgaggaaatagggggcgttcacacgttccctttcttgtgggaagggtgttcctcgggcgcgggaaacacaagcctttgggcggggagagcgcctcctgagtctgtcgggcaccggactattagacgatttctgctccccccgtctggttggctgtgtcggagagcgcgtctttccgcgacttagtgtcgcgccgccgggcgtgagcaacacgcgcgtggggtggaccccacatcacggtggtctcgctatggttcataac

SEQ ID NO: 559323 - DNA, 1123 bp, Homo sapiens
cgtgtgtggacaagaggtggttggtgggtggctgaacggctaactggcagagcttagcaccccactctcccaagccaccccctgcaagcagcacagccagggcatataccagctcacgcgcaatgcccgttacctggcttccttgcctggctctgctttcttccaagctttgcctggggcctagccctgctacgaggctacagcactctctacaacgcaacggtatgctttcttccagcccctagcgctgtgggcactgtatacaagtaggaacttcctttcctctcacttcccttttaacccctagctcacgagcatttcagcccgtcttgctacctcgattcctcctgctgctcggacagaggctggggcgcagtgcccagcctgcattcttccgaccctacctgccacttctgcttccccgcctatcagatggcatggcacagctttcgctgcgcctattgataggagtggaggactggcctggcgggccttctcccatctacccaggcctgggcacggacttccccccctaccgcacaaaaaaaacagcccgcccacccccaacgcactccaacccccccacccccgaccgccccacaccacccagcgcacggcacagaacacaacgaaacagccagacacgaccacaccgcagccacccgccccgccacccccaaccccacaaaccaacacacgtaccccacccccccccggccccaagcaccacacaacaacaccaacacacaccaaccgacacaccccacggctcccacaccacagaacaacacgcccccaccccacccagcgcacccccacccacacacgaaagcagaacgcaccaccgccacgcagccgcgcaccccgcgccccgccgccctccctctccaccagcacccctccacccgcgaacacgagaaagcgagcgcagacgccaccggctcccccccccccccgggacgccagcaaaaggaggcaacgagggggagacggagacctcaccctccccgcctctcccccgcccccgccgccaccacagcggaccacagacagagcgggaacaaaagccagccccacccccgcgccgccaggcaagacaaaacaagcaccgacaaccacaccc

SEQ ID NO: 559324 - DNA, 212 bp, Homo sapiens
cgtgtccgtgtatccggggccgcctatctgttagtgttctcatgtctggatgagagctcaccgactatagtcgcagtcactcttgattctgaggcagggtgctttcgtgaacccggaggttgcggctgcgtgagccaatgatcaccccactgcactccagcctcggtgacaaagtgcgcacccggtctcaaaatcaaccaaaaaaattacaa

SEQ ID NO: 559325 - DNA, 238 bp, Homo sapiens
  misc_feature (44)..(44): n is a, c, g, or t
  misc_feature (53)..(53): n is a, c, g, or t
  misc_feature (164)..(164): n is a, c, g, or t
gcgcattcagcagcgcgatagatcgtctgtgctacatgtcgtgngttgcggangaggtgcagcgagatgccatgtgctgccctgggacactctgtgtaacgatgtttgtactacgatggaagatgcaaccccatattagaaaggcagcttgatgagcaagatgnacacatgcagaaggaacaactgggcacccagtccaggaaaccaacccaaaaggaagccaagtattaagaaatca

SEQ ID NO: 559326 - DNA, 230 bp, Homo sapiens
ggaggttgcagtgagctgagatcctgccactgcactccagcctgggcaacactgaggctccatctcaaagagagaaatacattctacccagagaacctgaaaagtcaaagggttgttcatagggagcctggatttcagttggagttaaggtaggcagaggagcccaactctctcattttaagcccctctatgcttttccatttgtacaacgtggtatcctctggtccagt

SEQ ID NO: 559327 - DNA, 544 bp, Homo sapiens
  misc_feature (58)..(58): n is a, c, g, or t
  misc_feature (72)..(72): n is a, c, g, or t
  misc_feature (325)..(325): n is a, c, g, or t
gtattaaccaacttatcactagacatggttttcacggacaggtaatacgttgtagccncttccactatgtcntatcaataggagctggtatttgccatcataggaggcttcattcactgatttcccctattctcaggtacaccctagaccaaacctacgccaaaatccatttccctatcatattcatgggggtaaatttaacttttttcccacaacactttttcggcctatcgggaatgccccgacgttactcgggctaccccgatgcataccccacatgaaacatcctatcatttggagggtcattcatttttctaacagcagnaatattaataattttcatgatttgagaagccttcgcttcgaagcgaaaagtcctaatagtagaagaaccccccataaacctggaggggctatatggatgcccccccccctcccccccatttgaagaacccggatacataaaatttagacaaaaaaggaaggaatcgaaccccccaaagctggtttcaagccaaccccatggcctccatgactttttcca

SEQ ID NO: 559328 - DNA, 983 bp, Homo sapiens
  misc_feature (294)..(294): n is a, c, g, or t
  misc_feature (538)..(538): n is a, c, g, or t
  misc_feature (552)..(552): n is a, c, g, or t
  misc_feature (638)..(638): n is a, c, g, or t
  misc_feature (642)..(643): n is a, c, g, or t
  misc_feature (649)..(649): n is a, c, g, or t
gggactcggcgggtcctcctgggagtctcggaggggaccggctgtgcagacgccatggagttggtgctggtcttcctctgcagcctgctggccccatggtcctggccagtgcagctgaaaaggagaaggaaatggacccttttcattatgattaccagaccctgaggattgggggactggtgttcgctgtggtcctcttctcggttgggatcctccttatcctaagtcgcaggtgcaagtgcagtttcaatcagaagcccccgggccccaggagatgaggaagcccaggtggangaacctcatcaccgccaatagcaacagagccccagaaagcagagaactgaagtgcagccatcaggtggaagcctctggaacctgaggcggctgcttgaacctttggatgcaaatgtcgatgcttaagaaaaccggccacttcagcaacagccctttccccaggagaagccaagaacttgtgtgtccccccagcctatcccctctaagcaccattcctccacctgatgatgcaactaacacttgnctccccactgcagnctgcggtcctgcccacctcccgtgatgtgtgtgtgtgtgtgtgtgtgtgtgagtgtgtgtgtttgctaaactgtggtctttgtggntacnntgtgtntggatggtattgtgtgtagtgagactgtggtctcgctttacccagggcagggctgaccatgtggccgtgtgcatcctacactgtccccgtgtggggcctcaaacactactgctctagaagcgtggtgtgccagagacagccgctaccggataagggatgcgaggggaagacacggggcgaggcccagcgctcgggaccgggagagccacttggacgagcttaggaaacttgagcattaaacatggtgcttcactgagccgggaggttcacaggaagcagagggggccagaggaagacaccggatccgccaagcagcgccaaggggagggaaccg

SEQ ID NO: 559329 - DNA, 328 bp, Homo sapiens
  misc_feature (91)..(91): n is a, c, g, or t
atctttgctgctcctcttcaagtatacccagatctggtgctgctctggcacagcaggtgctcactatatagagttattgatgaatacagtnagtacttatcaaatatcatcagcactgttgagttcttggctgggcgcggtggtgacacctgtaatcccagcactttggcaaggtcgagagggatggatcgcgaggtcaggagttcgggaccggcctggccaacatggtgaagccctgtctctactgaaagtacaaaaaaattggccaggcgtgctggtacacgcctgtaatcccagctactcgggaggctggggcgggagagttgct

SEQ ID NO: 559330 - DNA, 629 bp, Homo sapiens
tggcgggtccggcgggcggtttggctatgagcgggaccggagctgaggcaggaagagccggcgccactggtggacgaacggaggaggctggcggcggcattagcgaggaggaggcggcacagctatgaccggcagatccagcctgatggggacattggaggcccagcaaactggctgcagggcctcatcgtggtgcttctatgatcggcattgaaatcggactttggaggctagaaaatttgctcaacgaatcttcattcttgggccaggcagttgacaatggactgaacccaatagctagtgatctaacgacacagggtaaaactcccagaaggataccccgggaagactccgagtatacctttggattccatggtgacctatggggggtacttggtattgggccctggcagacattaggggagccttaggcaaaggaccctcctaataggggacgccgatgtcttacaagagattcctatccaaactccgccacattgggcttgggcaactcgttggacaagcggtgtggacgcaacttggacgcggcactaattactgaagcaaaatgtaactaaccccaggaagatctgtagtttgagactagtaccgacatttccgactttgtc

SEQ ID NO: 559331 - DNA, 114 bp, Homo sapiens
attgccagatcgtcgttctgcttctcatgatctcgtattccgacaccctccaacatggaggacaacagcagcagaaagtccaatcttagagctgctccgcattccctgttgctc

SEQ ID NO: 559332 - DNA, 123 bp, Homo sapiens
caagtaaattgtagccaccaggtgaactgcactaaaagtaaatactcaacaccatcatcactccaggcaacaacagcacacacacattcacatcccagcatgtgcacagcttcaaacagcacc

SEQ ID NO: 559333 - DNA, 742 bp, Homo sapiens
ggcccagcaacaagcatgaagtaactgggctgggtgctggctgatctcctctaagtaaggaagatgctggagaatatgagtgccatgcatccaatgcccagggacagggttcagcatcagcaagaaattacagtggttgatgccttacgatgaacataccaggtgataaggaaaggtgaaggtgccgagctataaatctccagaatattattagttctgcatggttaacaaagtatgtcatggatatactactattatccggattctgtgctctagataatgctttctggtattgaatccaatccatcgtaacacttctagttatattgcactggttttacacagagaataatacaaaataaagattcacacaatcaagatctaattcagagaagataaatctaaatatactatacacacaaaaaaaattactcggcctaatccggaatgccccgacgtatactcggactaccccgaatgacatacaccgagatgagacatcctatcatctgtaggctcatggcatttctctaacagcagtaatattaataaatcttgcacggatctcgagaagccttcgcttcgaagcgaacagtcctacatagtagaagaaccctccataacagccgtggcagtgactatatggatgccccccagcgctacacacattcgagagaagccgtcatacattgacctctacgaccaaccacaggacggcatcgaaccgcgcaaagctggtccc

SEQ ID NO: 559334 - DNA, 224 bp, Homo sapiens
taccgcttactggccacgcatcagttgccgaggaaatatccatgttcttgccgtcggtcaggacttgtaagtcacaggtaccagaaatcatcgtggtgcgcggcttgtagcccaggcccttgaggatctcgctggtggtcgcggtggtgacggtgatgtcggtccagccgacatcggagaagttgacggtcttgcactgttccggttctgcggcgtgtgccacg

SEQ ID NO: 559335 - DNA, 130 bp, Homo sapiens
  misc_feature (99)..(99): n is a, c, g, or t
  misc_feature (101)..(101): n is a, c, g, or t
tgtgggttgctgtgccccagccctgccagcttacgaggacacactcaagccgtgggtgctgtttacgggtgtgtcctcgtaaacagcaccacgttgagntngggcctgccaggaggcctttccctagccg

SEQ ID NO: 559336 - DNA, 1467 bp, Homo sapiens
gacagaatatggtcccgagatttgtggagcccagcgatttgtagagaacacccctggactcctaccgctgcacaccagcctgtgaccctggcatatcagacccacgccaggggggcggatgccaggatgtgaacgagctgtgaaacactacagggctgtctgtggagctgccctgaagtgaacactgtcgaaggctccttacctctgtgtctgccccaacagcccggaagagtatgaccccatgactggacgctgtgttccacccacgaacttctgctggcacagttcccagagctacgcagaccccaggcacctgactagccccgatatactgcccagccaggaccaccctaccgacaaccccatgcaccccagccggaaccaaggcacacctacggcacgggacccatgctggcagacagtggacagccagaggagtggcatacattgtgacaacaagcaggccaccgagaatgccatgctgcacgaagcattccctggccctcaggacagtgtcgacaattgcgcccgtgatcgtgctggcatgcatcacatgctgggatagacagggcgtgcgcgcacagcacagcggctatgcaccggccattcccagaccaagagacgacacggcggccacacacgggtacaccaacacagactgagcacagggaagtcgcatccagggctgtaccgaagccaggacaaggcagccaacagagcgcgatgcataagccacaacagaaagactagctgacgacatgaaggaacgtcacacacgacccagggagacaaccgggcgggcgatgacatccagacaggcataccgcacggcacgcacagcacacgcaggactagccccaaccgcaaacacacaacagacgagacagcacagcgggaagcagagtggcccggcactggcagccacgcaaacgacggcacacactggagcacgcgacgactgacacacgaggccacacaagacaaacagagagagcagggaggcagtgaagagcaaacgaagaatcgaccaggcgcagcacccgttagaagacgcgcgccacatcacaacaggtgcacgacactagcatagcagcaaaactgggatagccaacaccagcaaagtgagagccaccgcccccgggggacgcaacacgcacacgagcaaccccaagcaggggcgcctggagacacgcagctacactcacacggcgcagctcacaacgcccctaggaacaaggtacgtcgcaacagcagacggacgagagtcaagcacacacgaggggcaactcaggagccgcagagacctcagccaccacagacacgcgccaccatgagtagcgccaggccaatcaagagagagacgacacgcagacgacgaatagggaaggagcaccacgagccacagcgcaacgcagaccacgagcaccgtcacagcgggccagcgctgacgcgcaggcgacgagacga

SEQ ID NO: 559337 - DNA, 85 bp, Homo sapiens
ggtaaaagattcccataagactgaccacaaatttaagaaaccaaatcctgtcgaaggtaagcatatgcccttctgtcgtcttctc

SEQ ID NO: 559338 - DNA, 1773 bp, Homo sapiens
tgtggttgtgattgcggaggtggtgtgtgtgtggtcggcctgtctttcttgttttttgtggctgcctgcggatgtttgtgagtgctggcgatggatgggagatgggtggttgtttgtgggtggtggatggtgacccgctgtctgctgtgttcggggtgatgggtgaggggtggctgggtgctcgtgtgagttttggttgttgggttgccgccttcggcgtgtggggtgtgttgcgtggttggttctgcagtgtgggctggtgtgtggctgctgcttgcttgcatggagaggtgtgtggggttggggttcgtgtgcgtccgctgggttgtcgtatctagtcgggtgtatcgccgctcgttgtgttgtgagtccactccgttggtgggggtgggttccgcaccacccgggtggtgtgttgtgcgtcctcgggtcgatcgttcgcgtagttttgtgtgttttactagtggagtggggttgttgtgggtgttgtgatcaacctccccgtcgtcggtgtgttggagcgtcgtctcagctcggtcctgctggtgtatttatttggtgtggttgctctgccaccccggctggtgcgggggtggctgttggtgtaggagagactctcttgtgtgaacaaccccccctccgttgttgtgtgggtgttttttgatgtgtgggttggggtgttctcccgcagtgcgtgccgctttataggttgggtttgtttgtgtttgtggttggggcggcgggtcgttatattggtgggttgagtgttgctagccccttggccagagtgcggtctatgtcttgtgtggtggtcgcccgatctaattatggctgggtggatattgtgtttgtgtggtgatacctgcttttggtggccagcgtaatgttgtgtggtgtgttcggctacgctatcgatctgctctctgttgggggcggtttgtgtgtgtggtgtattatgggtagttgtttttttttttcgactgtggtgggtgccgctgcttgttgttggtgtcgccgtccctttttgttgttgcttttggcggtgtggattgttgtgtttgtgtggcgggccgttctgtggctatgggtgggttcttcttcgctgcaacccacgtcttgtgtgtgtgtagtggcgagacagctgttgttgttgagatggtgttctgttgtttgggtggtggttgtgggttgggtgtcccccccccccctctcttcgttgagttgtgatctgtgtggttttaaagatggggtatattgtgttttatcatgctggtgtgtccccgcgcgccctcgtccgcacccccttcttgtgttgcccccccgtcgtcgtcgctgtataatagcgcgggttgtgggtgctgtgtgttgttctctctctctgtgtgtgttcggggagagagagtggaagagtgtgtggcgccacacaggtgtccactcgctatatctctgatgtgtggtctgtggtacacactcgcgcgggctcgctgagctctgtgtgtggggcggttctctttcacacactaggcagttctgaaccacgaggtttcaccccctgcgggactccccgggtgttgccacaaaaagagggggatatattttatatatttgttgttggagggaccccacacacaagagaacatcttcttggtggccgccgcctttggtggtgtcccttgctgttggatcaccattttttaaaaagagaggtcccctttgtgggtgaatttttttaaaaaacgagggttttaatttaaaataaataaaataaaaaat

SEQ ID NO: 559339 - DNA, 430 bp, Homo sapiens
  misc_feature (199)..(199): n is a, c, g, or t
  misc_feature (218)..(218): n is a, c, g, or t
  misc_feature (251)..(251): n is a, c, g, or t
  misc_feature (296)..(296): n is a, c, g, or t
  misc_feature (319)..(319): n is a, c, g, or t
  misc_feature (323)..(323): n is a, c, g, or t
  misc_feature (413)..(413): n is a, c, g, or t
  misc_feature (416)..(416): n is a, c, g, or t
aatatttgcttgttgaaaaaaacatgttaacagatgtgtttataccaaagagcctgttgtattgcttaccatgtccccatactatgaggagaagttttgtggtgccgctggtgacaaggaactcacagaaaggtttcttagctggtgaagaatatagagaaggaaccaaagcctgttgagtcattgaggcttttgaggnttcttttttaacagcttgnatagtcttggggcccttcaagctgtgaaaatgnccttggactcttagcttctgcatgggatctgggtcaagtagaaangactgggggatgggggaccattnctgnccatggatttggggaaaggaagaataatcctaaatccaggtggggtccattgaatgtgattatttagattaatttaggctggtctggganaangagatggtgcggtc

SEQ ID NO: 559340 - DNA, 969 bp, Homo sapiens
gggagtgggccaggacgccagtgctacggacgcgccgggctaatcctgaagtggggctgcgaggtcaggctgtaacctgggtcaatgtgtggaatatttggggggctcgtgctgcagacttgtgccaaatggacgggactattacggaggctctgtcggtggtgagcgacgaccagtccctctttgactcagctgtacggagcggcagcccatctccccaaggccgacatgactgcctcggggagtcctgactacgtggcagcccacaagatcaacccctcccaacacagcaggagtggatcaatcagccagtgagggtcaatgtcaagcgggagtattgacacatgaatggatccagggagtctccggtggactgcagacgtaagcaaatgcagcaatgctggtggtgcggaggcagagtcccaaggcccattgaactacaacaagctatagtggaccgagaagaacttgggaccgcctccttcccaaacattgaccaccaacgagaggagagtcatcagtccccgggagaaccccaacaacatgtggaccacaggagcatgtgatggcaactggctggacgtgggccatacacggagtaccagggttgcatgggagactctgaaaccatcccttgatgatgccgaggaaacattgggattgagcacaggaaacctagtgtaacaaattgaacaaagggagggaatttaccttacagggagaccaagtaggctctcgtaagcgaaacacccgggaaacgttgcaatagaaaaggcacaagacgcttcacaaggtttacgccttcaaagcggacaacagttcacacttgcttgagacccttcattaagttacgaagcctgtccacagagacgcgtgccgcgcaattccgtgccacagaatatgaacgtggtcccaggaggacaggcacccgtctcttgtcacgcaacctccaagattccagaacagaaa

SEQ ID NO: 559341 - DNA, 199 bp, Homo sapiens
tcagatgtcagtgcaggtgacttctctcctcctggaggacttctctaactctccagacccaagcaaaggtcccctcttctttgtcctcatcaaagcacttaccatgctgagggattgtataactagttaccaaggctgtctccgtttcttgaccacgcctgtagtgtcacctccatttgggcaggtgtttcaccttttc

SEQ ID NO: 559342 - DNA, 1198 bp, Homo sapiens
  misc_feature (465)..(465): n is a, c, g, or t
  misc_feature (471)..(471): n is a, c, g, or t
cattgagcacctgctgtgtgccttgcagtgtctgaggcacttctagctattatttcctaagggttccagcagcccatggataaacttcaaagagtgtaagctcctaaaaattgttcgtattttctgcacatttttgtagttttggagaagagagttaatggagttcttgccattctcagaattatttgatccctttaggaatgagcatctctagcctctgcctgttcatctgggacaatctgcacctgggcgtggacctgctgcttcagatcagtaggtatcagaatgaactcagttggatggggcagttcaggacccctggcctccttttagtctggaccccactctcattcctcatattctcaattcactctttctactgagttactatcctagtaatgacaatgcctcctatcatctagagacttggtttgatacaatgcattcacatacaactgctcgttntgattnctataactggggaatacagaaagcaaatatgcggtgcaatggaggatgtctccattaccccagataactccaaaattctcacctagttaccagtgcaggaaattcgttcgaaggcagaaatggaaaatgaataagaaacaatttggatgtgttccaaaaatggagagttgtcaggcactatatcatacaacctgaaatatcaatggtgaagtagacagttcacctccacagggggcaggaggttggacccagggcaatggatgttttatatggatggttaaccggtctgtggccatgaggtggaaagctgtgtacacctgtgaagccatcatcacaatcaagttagggaacatatccatcacccaaaaaagtgttctcatgccctttggtaattcctccctcctaaatgtccccaccctaccccacatcccagtttctatgcaaaaaccgctgaccaactttctatcactatagatttgtttgtattttctagacttttatataaaaagaattatactgtatgtacacttttttgtctgtttttttcacttaacatatttattttcagaatcatctatcttgttgcaggtgtattcctttttattgctcagtagtattccactgtatggatataacacaatttgtttatcattcacctgttgagggacattatacttgcttctaaatttttactatcacaaataaagctgctgtaggcattcaaaaa

SEQ ID NO: 559343 - DNA, 624 bp, Homo sapiens
attgagcctgtggtcctgccgctgctctggtttgcagagagcggggccatggagggggagactcttcacacattctacactcagctggttgatgcccaaggtgatgcactatgcccagtacgtcctcctggcgctgggctgcgtcctgctgctggtccctgtcatctgccaaatccggagccaaggtcctgaggacaccgtgagccagccaggcctggccgctgggcctgaccggcccgcggaggccctaggcgccgcgtctcccggatctcccagcggagagagcaccagacccacagactgagccatcccagcaggccatgtgcgctgaaggacacactgaaacacacgccacatggcagacatagacaacatgcggtgcaggcatggtgcagacactcagggatggagctggtgctgaagggacttgtagggagaggctcgtcaacaagcactgttctggaaccttcatctccacgtggcccacaggcctgaccacagggagctgtgagtccatgcgtcacccttcctcagggtgagcctggcctgtcccgtatcagacgttgggcccaggcatactccacctccaaggtgaaacactgcaagtccggtgtggaggtcccc

SEQ ID NO: 559344 - DNA, 152 bp, Homo sapiens
ggttgtttctagaggatcccgatgctcactctgtggtaggtgcttgagtcagacagaccaatggttgtgaacctgtgcaggtaccactggactggtcacactcgtggggcgtgggcgccagagtgagactgtctgggtaactgagctcgaat

SEQ ID NO: 559345 - DNA, 757 bp, Homo sapiens
tgggcgtctgggatgtactttattggacaagtggtggcccaagtctgttggtctggaagcactggggccctggaacccaggcactgagttggaggaggcccagaatttacagggctgttgggagcgaggccacaaagcgtgttggtgaggtgagccaaggaaagaaaggttctgcttgtcggacattggagagctcggccaggcgactgctgctcctcgtgctctagccggcttggccgctgttggaaagcagccagggggtcatcctccagggcatagtgctccagcagggttcgcacgtcctccagacgattcagtgcaagggtcttgaggaaggcaagacagatccaacaagacccgggtcatcagagttgccgtcccaggccgctagggaaccggccggtaaatagggctagcaggcggaaggctaccttctggcagtccacaagttactactcgagctggggtcccccgattcagacttgaaatattccttgacttgggtgtccatcccatgtatctgtgtgggacgtacccgaaatagggcggacaggagatgaacgccatgggcggtccccactatcactgagtgtggaaaggcctgtcatgccagtctctggacgtaaagatgaccgttgcactattacggggcacgctgctggaacaggtcttcgattgcctggggcttttaaaacttccagcaggggcagcgacactcaagatgaggaagaccgccgttattccaaaagaaccggtg

SEQ ID NO: 559346 - DNA, 369 bp, Homo sapiens
ctgtacatcccagacctttgagaggcagaggcatgttatttacatgaggccgggcagttcaagacaagcctgttccaaatggcaaaaccccgtcacaaaaattagctgggcatggtggtacacttctatagtcccagctactctggaggctgaggcaagagaatcgcttgaacctgggaggcagaggttgcagtgagccaagatcgtaccactgcactccagcctgggtgactgagcaagactttggccccccaccaaaacaaaacaaaacaaaacaaaacaaaacaaaacaaaacaaaaaactcaaagaaattgctctctaagtacactaggatttgtggaaggatatctttctgggcaatcaagctt

SEQ ID NO: 559347 - DNA, 137 bp, Homo sapiens
aatccaggcatgtaccctgcctaaccccctagcagccaggtgacagaaatagagaagatccaggccagagccggctaacattattcaaacagctaatcctaaacctgctcaacctgcctcgcccattccctcccaca

SEQ ID NO: 559348 - DNA, 1952 bp, Homo sapiens
cgagtgattctcctcgaatacctcctgccggacgcggagacaccggggacgggggatcctgccgcaagcataccatcccctatcctcactctcccccgccacaccgagagaccctatagtacctatccactatcacaccaccacacacacaacgacagggcagagaaactaggagctccacagaagaacacacgagcatacagggccacacctgacacgacgcgcacaacgccacaaggaaacgagaccaacaacgacaagacgtcgagcccgcagaaagacgacagaacgagagagccacacacagccgcacagccccataccagctcagataccccacgcatcacagccaacaaacgacaaacaccaacaaagcaacacacacacccggacacacaccacacaaacacacgagataacagcaccaagacgacacaaacacacaacacaaaccgcacgaccaacgcaggaaacacaacacacaacagaacacgagcgaccacaacgaacatacgaaccccaccgcagtacgaccccacacacccccaacaccactccacagagaacaacaatgacctacagacgaaacagcgaagaccaaacacgcgaagacacagcgacaagaggaccacaccacacagcagacaccagaccggcagctcacacacactacagtacaaacctaaaacactgcgaaatacggcacaaccacaccagagcaccgcatccgcacaaacaacaaagagcccaacctaaaacagcacatcagtacgagcaaacaacgatgaaccaacaagaacgacagacacaagctacagcgacgaaaaactatcgctcagcaagacgcacagcagatcatagcagacacacttaacacacctagagcacggccgctctgaccagcgccaacacagcaaggaccgagacaagagcagcagcaagaacaatacataagccaagaacagcaacagcatcgaaccacccagaccacatagagagctatcacgaccacaatacacgacgaccacaagcccgctcagtacgcagaaagcagagcatcacggaaccaacaacgggcccacgcaacattcagatgggaagcacgaccatgaagcgacaagaagacagaccgctgagccaccagacgcaaagagagccaaaacactcagagaaactaaaggcaacacacagaccagcaaacaagaccacatggggagtctacgctaaccagccataagcaacccaagcagatcaaccaaggaactcaatataagagaggaccacagtacctcaccaacgaggcacacgaacaaatgcacatgggcaactaacaacactgacaagagaacatcaacagagaggcacaagatgcattagacgcgagggcataatagcgacacagcacacgtagtgaggagggacatacgcaaacagcaccgagcagcagctccaaagcgtagtctctgaccaacgatgagcgcgacagagacagctacaaaccgaagcagcaaaagtgcgagacagcaccagagagcagagccaagcatcctcgaaccaccagaagacagaacagcgacgacgcatagcactccagcaccggcatctcgacagcgggacagcagagcacaacggacagatacgtgaacgatagacaagagcaatgacatggatagagcacgaaggacatacacgcagcgaccagagcaaacacagagaacggcaagcagagaaaggaaaagacaatcaactacagaggagagatcgggctgctcgacacacacatcctgagtaagagcaagacaaaagcgatagacagagaatcgaaggacgagagagcaagacaacaaggaaccagaaggtcgaggaagaaacacaagagacgaaataatacagacacatccgaagcgagagaagcagtagtagaagcacagtactagacgatgaagcgaaac

SEQ ID NO: 559349 - DNA, 126 bp, Homo sapiens
tcccctgctgcgggggcccccaccccgattcctctccccaaaaacggtgggatgggcccccattaactgcagcagcatgctgaggtgtccatgttgtttgcctttgtataaaaaaacagcctttga

SEQ ID NO: 559350 - DNA, 342 bp, Homo sapiens
attttttttttaaaatttttattttttaaaattggaaacccctttccccctttgggggaaaaaaccaagggaaagccccgggcccccggttttttaaaaaaccctttttagggggaaaaaaaatttttttggcaaaaaaaagttgaaggtttaaaactgttttttttgggggggggggcccaagtttcccccggccctttaagggtttttagggggggggcctggggggggggggaaaaaaaacccattttatgtttttttttttttttaaaaggcgggttgttttttttttttttttttaaaaccccttaggggaaaattttttttttgggggtaaaggga

SEQ ID NO: 559351 - DNA, 529 bp, Homo sapiens
  misc_feature (127)..(127): n is a, c, g, or t
gttaattcccaccttggccccagtgtggttcctcaaagtaggacaaaggcaaaagtgtcccccagtttttgtttccctttgtttacgcccaaacccaaggcccccaagttggagaacccttcccgcngggtgacttgccccatttcagggaagcccctgggcattttggacttaacgcccgtgcatttcaccccgttaaacagttccttggcccgggtggggtttttcccccccaacgagcgttattttttttccgttaccccgaacagcttaaaaaacccccccccctgggtttttttgggcccctttggggttgtggtcccccttaaatgggtggaaaaatttttttggaaaaaacatggtggccccttttattggaaacaaattcccagcccccgacttttttttttttcagcgggggggtcccggttttccgggttccggagtaaaactccaaacggaaaattcccgcccggttatccagccctaagtttttgggggagcccaaataacccggtttgggtgccca

SEQ ID NO: 559352 - DNA, 671 bp, Homo sapiens
  misc_feature (595)..(595): n is a, c, g, or t
aaaagaacataacacacatgctgtttttattatagacaattttcctgttttttttttaacagccagtccctacttccccaggtaattatctagggggcatacactggattttctggttatacaatcctatgtagacctacatatacataaacaaatgcttggctatcattttacagatttttttccttttaatgcaacaatgtttcattaaaatttcttcaaatcatctagtttaactcagttcaatctttttaaggggctggacaatatctggtattaaaccataatgtatttattcttctataggggggcattactttatttctagttcttggctactataaattatgtcaagagaaaatattctcatatatatgttggtatgaactggtatttttttcttcttcttctcaggattagaatcggtgggcaacaggataaatatattttttattttatgggagattacccaggttgtttttaggaagacttgaacattttccatttccccccttaatgttcaaggatattttcttaaacttttttggcaccctctaaaaaatgaaaatttccaggcacccaccacaaacctttntgatcacgtttgggtaacattcaggagctatattttaaaagttcccaatgaatttgagtggtattgaagccctgtt

SEQ ID NO: 559353 - DNA, 1093 bp, Homo sapiens
ataacatgtataagaatcttcactctttggattttcacgtcactatgtggggcgtggactcttggaggttcaattaaatcctgagtattgggtcagtggcccccatctccccttaatgtggcgctttccaactgtgtcccaatgtgctatgcgacttgggcacatcatcggagatccagaaatttcacaccggaattgactggggaaatcttagcaatcaacttacagagctgtcttaattgaagggttacctgggacccatctagtgcacgtggggtgcccaatgcagaggtccggtgaagcatgcacctccgtcacacccactctgttttccagccggttccgtcaggtgttttcgacccacctcggggggcttggtacgtggaacaccagtaaggggagaccatcagccagaggctgccactgtgacttcgaggcgtgccaccgccacgtactgatgaggggtgctccagcaccaagagcacggacagcgggcaatgccagaggatacctttgccgccacctcctgcaccgagaaacatatgaagaatatggatatgatgatacatacgcagaacaaagttacgaaggctacgaaggctattagcagccagagtcaaggggactcagtatattcatcgactatggacatggggaggttgcaagattctgtgatgaagcttatggccaggacgactggaatgggaccaggccgtcgctgaaggcccctctctgctaggccagtgaagggagcagtacagagagcaccacataggcacgcgtcatgaaagaacaaacatgagggggaaaatatcagcttatgagcaaagttgttagctgatttcttgtatctcccaggattcctgattgcttaacccagccacagacaagtaattgtctaagtgtttttcttcgtggtccccttcttctcgccccaaccttataccattcttaactctgcagtcgtggcttctgtagtgtagtatattaaaatgagttaaaatagatttagggatatggaattaattttttaagtgtattaatgacgctgtttctttgctggtgataggagataccggaccttagaattaag

SEQ ID NO: 559354 - DNA, 432 bp, Homo sapiens
gaaagcacggtgagtgaggtcccctctcgccgctccagcaacatggttacctgacgaagtcccactctcccctgtgagattttctccagcctcgcaccattcccaactaggcgccctccaaggctctctgagggcaattggaggcttctgcttggatgaggctaaatccctaatggcttggttaatgagctgctgggatggagtagttaatgagcctcagaaatgttaagaaacaaatgtcctacgtccagcttacaaggagagtcacatcagaatcaaggctaagcgaaaacatttaaaataaaaggtttatgagcatgctaatggccctgtcctgaagtttccagcagctaattaatgaccagacacagcataaagaagctttgtcacagattcaggcctgtaattccatcctgttgagcggaacgccat

SEQ ID NO: 559355 - DNA, 158 bp, Homo sapiens
ggctttctagtattataaaaaataatctattctatgagaaaagaggcgtctgtatattctgggaatcttctccgtttcaagcattacgaacacttttaataaactttttttagagaatggttcaaacaacaacacacaaaaacaccaacaaacacaac

SEQ ID NO: 559356 - DNA, 200 bp, Homo sapiens
tagacctgtacgaaatatgtgtctaatgctagtgtaaccccaaacccagctaaaactgttgctattgaagaatggtgaaacagcacaatgtggaggcagaattaccagtctgccacaaagagaaagaattctatgtgagtgaaaacgctctaaaagaggtgatgctgattaattagttatactctcagccgagaggactg

SEQ ID NO: 559357 - DNA, 228 bp, Homo sapiens
gggacggaaaaaacccggcccaaagggggccccccaaaagttttcgtggaaaaaaccctaaggggttgctccccggaaaagaaaagggaaagctatatatatgggccgggatgtggccaaccccccgtaaaaaatgggtgccccgcatgagggcaggactgtcaaaaattttttttagctgggaaaagggttttttttttaaaggttctttgtaaaggggccccttta

SEQ ID NO: 559358 - DNA, 148 bp, Homo sapiens
  misc_feature (31)..(31): n is a, c, g, or t
  misc_feature (88)..(88): n is a, c, g, or t
tgatctagaggatcctcatggtgatgatgtnacagactgagatgagtctttcacaggtaggactgagtgttccaatactttttgaagnctagaagtcatttatgtgtctgagatacatctattcaaggacataccaaggaaatgctca

SEQ ID NO: 559359 - DNA, 686 bp, Homo sapiens
  misc_feature (344)..(344): n is a, c, g, or t
aggcacacttgctgtgtacaatgactgagccctttcttgtatgttgcttccttggccgagaggtgtgcatgcgaccgtggcttttcccaaagtttactgactttgtggtttaccctcttcaccttccagggacgcagtcgttacgaggttagactgtggcagctctgtgcagtgtttgagcctacagacacatacatagggccaaatggagattaatatactgactcgttctcctggaatacggctagacctatgctgacaggtttgttgctgtggacgagggcccctatcgaggggggcgcctatctcatctttgacacatgcattcgggatgcgactacaancagtgtgactggatacgctggccttgtagctgcatctctctggcaggactactgctcacactgtcaccatggcctggatttcttccaagcgagccttgaccacaggtgtcctcttgatggctcctggccagttgtatgtaatcgttaaagggaacgttaaactgacgtccgacgtccctattctgaactcacggtgtgatcgatctccgaccctattacctcgcacccgaactccctgctgcacttgagttcccctcattagaaccacggcccctctgtatacggacagggcctgcctctggtgctatgccttgaacaggctaattgcccgcgccctttgct

SEQ ID NO: 559360 - DNA, 166 bp, Homo sapiens
acagaagaccggacgctctatggctctcacaatggctacactctattgacaacaggcgtccgtacactttcacagtccccgtgcgtcagggccactccagacatccccgatctcatgccctaacgctcgcatggctgacgtacgccatgcccacgcatcttgccgg

SEQ ID NO: 559361 - DNA, 216 bp, Homo sapiens
  misc_feature (13)..(13): n is a, c, g, or t
  misc_feature (46)..(46): n is a, c, g, or t
  misc_feature (48)..(48): n is a, c, g, or t
  misc_feature (107)..(107): n is a, c, g, or t
  misc_feature (109)..(109): n is a, c, g, or t
  misc_feature (114)..(115): n is a, c, g, or t
  misc_feature (128)..(128): n is a, c, g, or t
tcactaagaaagncagtaactttactgaattgtctgcaaaatacananttataccttatttccagcaggagaaacttttgaaaatttccacttttattcactacagncncctgnnttaagtcccttcngatacacagatgtgggcgaacttagttataacatcttgtcatctagtggcgacaaagtccagcttatgccgctgtgagcctctatttg

SEQ ID NO: 559362 - DNA, 118 bp, Homo sapiens
ttgtcccaccttatgccgtggttgcttacctacctataatgtggtatataagctgctgtcctggacactgcatacaaattccaatgtgtacttcatagtgtaaaaatttatattattt

SEQ ID NO: 559363 - DNA, 847 bp, Homo sapiens
ttttggcggttttccccccttgggggcttttggcggcagtgccatttcggcccccttaggtggggttgaatttgccccctccgctgcttcgagccaaggccttttcttggccattagggggccacgattatggggaattatgaggttgacctgtttaaccgacccgaggagggcgttattagccttgcttccgagaagaacctgccatgggacttgaattaagctcccgcggaaaggccaattgtccctctggaggctctgaatgaacccagttcaaggacatctgctagagagaggggtgtctgctttttccacgtgggagaaggagttgccaccagatagtttttgatcccccggtacattacttctccatccctaagagagaaaaccaggtgtttgatccagtatgtaaagacccgggccagaggaagaaccgccggggaaagaaaaataaaataatgccagcccaggaagatttccaaacaatgatggaagaagccaaatttaatcccagagccacttttagtgaatttgccagcccagcatgctaaagattccagattccaagccattgaaaagatgagaagaccgagaagccttgtttaatgagtttgtggcccctgctaggaagaaagagaaagaagattcgaagacccgaggtgagaagattaaatcggatttctttgaactattatctaatcatcacttggacagtcagtctcgatggagccaagtaaaagaccaagtagaaagtgatccccgttaccaagccgtagatagttcatccatgagagaagaccttttccaaccgtaccttgaaaaaatagcccagaatttagactccaga

SEQ ID NO: 559364 - DNA, 759 bp, Homo sapiens
  misc_feature (9)..(9): n is a, c, g, or t
  misc_feature (129)..(129): n is a, c, g, or t
  misc_feature (206)..(206): n is a, c, g, or t
  misc_feature (215)..(215): n is a, c, g, or t
  misc_feature (219)..(219): n is a, c, g, or t
  misc_feature (243)..(243): n is a, c, g, or t
  misc_feature (247)..(250): n is a, c, g, or t
  misc_feature (253)..(253): n is a, c, g, or t
  misc_feature (272)..(272): n is a, c, g, or t
  misc_feature (276)..(276): n is a, c, g, or t
  misc_feature (280)..(280): n is a, c, g, or t
  misc_feature (298)..(298): n is a, c, g, or t
  misc_feature (303)..(303): n is a, c, g, or t
  misc_feature (313)..(313): n is a, c, g, or t
  misc_feature (325)..(325): n is a, c, g, or t
  misc_feature (347)..(347): n is a, c, g, or t
  misc_feature (362)..(362): n is a, c, g, or t
  misc_feature (373)..(373): n is a, c, g, or t
  misc_feature (383)..(383): n is a, c, g, or t
  misc_feature (408)..(408): n is a, c, g, or t
  misc_feature (416)..(416): n is a, c, g, or t
  misc_feature (469)..(470): n is a, c, g, or t
  misc_feature (477)..(477): n is a, c, g, or t
  misc_feature (505)..(505): n is a, c, g, or t
  misc_feature (514)..(514): n is a, c, g, or t
  misc_feature (523)..(523): n is a, c, g, or t
  misc_feature (527)..(527): n is a, c, g, or t
  misc_feature (575)..(575): n is a, c, g, or t
  misc_feature (577)..(577): n is a, c, g, or t
  misc_feature (584)..(584): n is a, c, g, or t
  misc_feature (597)..(597): n is a, c, g, or t
  misc_feature (601)..(601): n is a, c, g, or t
  misc_feature (638)..(638): n is a, c, g, or t
  misc_feature (673)..(673): n is a, c, g, or t
  misc_feature (735)..(735): n is a, c, g, or t
attcaaagnatcagcgacattttgcgaatatagaaaagattgatgtaaaactattgtgttatgacgtgatttagtctctatagtcaaaattgggtattttttctttgtcttgaatttcatgaagtatcngcctgttcattaaaattttgaaagttcttacgtccacgtgagtatgcatcttgaagcttagcaggaacttgtgttcnagggtcctngtcngggtcttttcataaatctccttgnacannnngcnattttggtctgtagctggnggtnaatnctttgagcgaggaatganaggcnactgtctgcnaggcttcctggnatgcggaaatgacatcacggcngctattgtggagttnaggccacgcgnagcacgtccngttcctgtgggggcagagactttcngctggcanggtttctggcgctttccatgccacgtggcttacgtgtacgaagagagggaggnnagggccngctgtgcggttgtggtaatgctgggggngaaagagcnttttgtgcnatgntagcgtgagacttcccacttaattgtcccaagaaatattcgtgctggngnggttagngtccgcgaagagngacnaagtagacggttttctcctgaatggtaataggtgaangaagggtaaattctggggaggtctggaccatagangacattcagggtgactgggtaactgcggatgccaccatatcgggcctgtatttcacattganagggtcctgtttcatttctcgtga

SEQ ID NO: 559365 - DNA, 129 bp, Homo sapiens
tactggtagaagtagatttacgccaaatccatttcgctatcatattcatcggcgtaaatctaactttcttcccacaagccacggtcaacccacaagccacggtcaacccacaagccacggtcaacccac

SEQ ID NO: 559366 - DNA, 419 bp, Homo sapiens
  misc_feature (29)..(29): n is a, c, g, or t
  misc_feature (95)..(95): n is a, c, g, or t
  misc_feature (101)..(101): n is a, c, g, or t
  misc_feature (120)..(120): n is a, c, g, or t
  misc_feature (147)..(147): n is a, c, g, or t
  misc_feature (170)..(170): n is a, c, g, or t
  misc_feature (207)..(207): n is a, c, g, or t
  misc_feature (215)..(215): n is a, c, g, or t
  misc_feature (236)..(236): n is a, c, g, or t
  misc_feature (366)..(366): n is a, c, g, or t
agccaaaatcatgggatatcttttctcancccgtccattcttcttgtgtctctgctttcttttttctggagacagtctctcaggaagctttctcntgggcnccaactcatcatgctgtcnatgatgtcacaggctcacagcccaaanagttccttgtaggaactgagagnttccagccacaaagagattttattcctgctgaacagnttggctangctttttgaatcgtccgactnagaccgccggatccgagttggcgtaatccgccacggtcactcggccgagcaggcgtcgtgggcccggaattgagtcgctttctctcttgggcatggcgaccgtatcggggcgaggcctgctagcggccgngccccgggccatgtctccgccggagagcggccccggagccgcaagccatcgcc

SEQ ID NO: 559367 - DNA, 590 bp, Homo sapiens
  misc_feature (584)..(584): n is a, c, g, or t
tccatggccggtaccagccgcgtggggctgccaggactgccttgggccttatcagggccggcccaaatgtggttgggggaaacctgtaatttccttcttaccaggggttggaattaccaggggattaatacggttctggaaaaaatggttaacctaggggaaattaaggaatttaagggtttaatttattagacgggcccaacttttatatttttagaagccttttggtaacctaattcctttggatcactatttggcatcagtcagggatactggttttcctttggggctgtaatgattaaccattgccgggaccactattttaaatccttacgttcaggggttggtaactgggccttataattaggctgaattatggtttcagggcctacaattaatgggaatggttcacagcctagctcctattaacattggaaattccggatttttaccaacttggaatccttttttagtaatatgttggccttccttttttaaatggtccaaacctatttttaaatggccaggttactaaccactggttcagatccttgcaccaattccagggtttttccgtaatgttnttgggg

SEQ ID NO: 559368 - DNA, 132 bp, Homo sapiens
agcctatcatcttgctcatcaccatgcggattatctgcggtcacatcgtcataggttgtttctggtcctctgttttcacaacggtccagcgataggcactgtactctgacaatccttcttggcacagtaaat

SEQ ID NO: 559369 - DNA, 430 bp, Homo sapiens
  misc_feature (324)..(324): n is a, c, g, or t
tagatgagcggcctatgtctcgacgttatggtatataggaatgctgtgattataccacatgatttggatcttgagatttgctgaagtagcttatcagcttaaggagattcgggcgtgagagaatggggttctctaaatatacaatcatgtcatcggcaaatagggacatttggacttcctgcttttcctaagtgaataccctttatttctttctcttgcctgattgaccgggccagaacttccaacactatgtggaataggagtggtgagagacggcatccctgtcttgtgccagttttcaaaaggaatgcttcccgttttagnccattcagtatgatattgggggtgggtttgtcataaatagctctcattattttgagatacattccatcaatacatagtttatggagagttttgagcatgaagggct

SEQ ID NO: 559370 - DNA, 692 bp, Homo sapiens
aaaccatgaagagaaagaaaaagttaaagcggaaaactggagtggcgaacgacaccttacagctgttgtccgttgcctctgggctgaagtctcaatctaaacgctgctgtgtcagctacaccaactcgcccaccatccaggagggggcaggacaagtacctgataaaactaggaagtacttcaggcagcagaggctagcgacgaacatacttactggtcccacgtgtttcacctgtttcacaaacgtacttggcaggccagccgattgccagctgaaatgacacgttgcccgagcttttaactctcctatatgaccgaaaacttcctcagggttaccgatcagatagatctgacgtgttgaattgggatccacgagttcataagcatgaccccagtctatcaaaatagcagattgcttgagtaacaagacgtacaccctgaagaaacgatcatggagacttagcttgctgagcctgtccagaagatgaggctctcatctccaggtgatgaagtgcactggatgggatactggatgaatctttgcttgaaacctgtccaattcagatcaccattacaagtttttgcacggactgggtggactggctcttattgctgaaagactacccatgctatatccagaagtaattcaacacggtgcagtgctccagttgtaacatctaccactcaggaaa

SEQ ID NO: 559371 - DNA, 786 bp, Homo sapiens
atgggtccgcactacctttatgagctgtagcactcagcatgaaggtctgcagctttactgttgaagctagtgagaccacaaacccagtaggagaaacaaccattctggacctgccacctttgagagctgaacagggtgaaggtctgcagtttcactccttaagtcagtgagaccatgaactcacctggaggaaggaacgactcccgacgtgccacctttaaagagctgtaatactcacagcgaaggtctgcagcttcactcctgaagttagcgagaccacgaacccaccagaaggaggaaactcccgacacatccgaacatctgaaggaacaagctctgaacacactgtctttaagaactgtaacactcaccgagagggtccgcagcttcattttcgaagtcagcgagaccaagaacccaccggtaggaaccatttccggacacaatacattgtagtaactctgtatactgtccccttcctctgtttatttggtggctggctagattattttagtatagtctgttctccctgcttcccctcactatgtcaagctcctcactgtgtccagctcctcaggggaagagactgctgctcctgaagggaaaaagctgagtgtccactgtcacgccaggttgacagcggttttagctaatttcttagttccattctcttattttgggagttcagatatgttctcttactaaaacatacgacaatactttttaaaaactgaaaaaatatgaaataactattggcttcaatattgacattctgtattcaatatt

SEQ ID NO: 559372 - DNA, 142 bp, Homo sapiens
tatgttattcagtttgcggctctcttttcttgagtttgagtaacctaattttaataaagaaataaatggctgggcgtgtatggctcacgcctataatcccagcattttgggaagccgaggcaggcggatcacgatgtcagga

SEQ ID NO: 559373 - DNA, 177 bp, Homo sapiens
tttctaagatcccagtttatttttttaatagtgatggggccgccggggcagtggctcatgctgtaacccagcactttgggaggtcgaggcggtggattacttgaggtcaggagtttgagaccagcctggtcaacatggtgaaaactcccatctctaactaaaacgcctctagcagtg

SEQ ID NO: 559374 - DNA, 339 bp, Homo sapiens
  misc_feature (324)..(324): n is a, c, g, or t
catggtagcccaccctgtaatcccaacactttggaaggctaaggtgggcaaatagcttgagcccaggagtttgagaacagcctaggcaacatggagaaaccccgtctctacgaaaaatacaaaaattatctgggtgtggtggtgcacacctatggtcccagctactcaggaggctgagaggtaggaggattccttgagcctgggaggtcaaggctgcagtgagccatgatagcaccaccacactccagcctggacaacagagtgagaccctgtctcaatatcaaatttagcaaatataattcattcttgctatgtctggccggncgtggtggctctgcc

SEQ ID NO: 559375 - DNA, 565 bp, Homo sapiens
tccgctgttcaatctggatggtgggtgtgagggttgagttaaatagtaggatgccgccgggcacaggggctcatgcctgtaatcccagcattttgggaggccaaggcgggcagatcacctgaggtcaggagttcgagatcaacttggccaacatagtgaaactctgtctgtattaaaaatacaaaaagtacccgggcatggtggcttgcacctgctgcttgagaggctgaggcaggagaaccgcttaaacctgggtggcagaggttgtggtgatctgagatcgcacgactgggctccagcttgggcaacacagcgagactccacctagaaaaaaaaaaaagagtgggcgcagtggctcacccctgtaatcccagcactttggaaggctgaggcaggcggatcacctgaggtcaggagtttgagagcagcctgggaaacatggtgaaaccttgtctctactaaaaatacaaaattagccaggcgtggtgccaggtgcctgtaatcccgagtagctggcttgttcaccttcatctggtttgacctgttccttcctgaagccttatag

SEQ ID NO: 559376 - DNA, 185 bp, Homo sapiens
  misc_feature (181)..(181): n is a, c, g, or t
aaggtaggcgtgtctgtacaagtggttaaatgtgacttggagcagctgctaggggctgaatctgactcagccatttactaactgtgtgaccttaggcggagtctcactctgtagcccaagctggagtggcgtgatctcgactcactgcaacctccgcctcctgggatacaagtgattctcngtgc

SEQ ID NO: 559377 - DNA, 434 bp, Homo sapiens
cctgagagggggctcctcttggcatcgtaatgagcaagcatagcacaaaaagacaaggtgcagacaggtacatgacctcaatgaagaggaagataaaattaggcacaaaagatgaaaccaaaagaagaacaaaggtgatcccatgaaacaaaactggaaaggaaaaatacacaagagcaagattcagtgaacaacaactgctcctctgagaaaagagctggacaaacgttaactgacagaacgagctggaaaccccattcaagacataccacaacatcaacctggaatctacacgcctaacactcaagcagggggtgaataggtgcgacaacagcggaagcagacacagtgcagacaagacccacagggaacaagggggcaaaaaacaagaggacgcaacaagaggggcaaaaaggccccagagaaacgacaag

SEQ ID NO: 559378 - DNA, 506 bp, Homo sapiens
cctaatgcagatatgactttgctgaccagaaacttataacacccaagtccctttgaatacctgaaaagccttccctagaaggatgggtacaaacaagcccagagtgtgaagactacaataaacacctaactcttcaatgcccagacattgatgaacgtccacaaacatcaaaaacagccagcaaactacgacctcaccaaatgaattaaataaggcaccagagactaatcccagagaagcagatgtgtgacctttcagacaaagaattcaaaataactgtgttgaggaaagtcagagaaattcaaggtaacacagagaagggattcagaatcttattagataaatttgacaaataattaaaaagaatccagcagaaattctagagttgaaaaatccaagtgacatagtgaagaatgcatcagagtctcttaacagcaaaattgttcaagcagaagaaagaattaatgagcttgaagacagactgtttgaaaatacatagaggagac

SEQ ID NO: 559379 - DNA, 740 bp, Homo sapiens
cctggaatgacggatggtcctctttccttgcctaacgcagccatggctcgtggtcccaatgaagcatctgaatgcgggtggcagctccaaatgcattgtgatgcttggctaaacttgacctggtgtgttttgctcctcgatccataccacctggtccccacaatgttgagcagacgtgtctccaccctcatcatttgtcctgcaggaacatgacttaacgtactgcccatgacaggacgatgacagtaacagacgactttgccatgcacgcgtgttcattacaactcgagtggccacggtcctgaactgcatatacacctaccctgactggattcatggcatgtcatcagccattgacaacgacgggagagaatttccgtctgatctatgacaccaagggtcgctttgctgtacatcgtattacacctgagcgaggccaagtacaagttgtgcaaagtgagacagatcttagctgggcacaaaccggcaatccctcatctggctgactcatgatgcccgccccatccggctaccccgaatccctcatcaaggtgacatgataccaccccacgactaggatcacgagcactggccacgcactacctgcacttcccactcaacgtaccgccacctggctatacccttgtgtactgcgttgcactgggcgaggcagctcaaaccttcaggccacgaacttcgggatggtgattccatcccatagcgctcgtacgaaggccaac

SEQ ID NO: 559380 - DNA, 147 bp, Homo sapiens
gaaaatgcagaatttgcacactgaggagtaaagagcgggatgactttatcacctggtttgactgtagtcaccccaggtgataaagtcatcccctctttactctcagtgtggaaaatgcagaatttgcaaaaacccagaaagcaacta

SEQ ID NO: 559381 - DNA, 354 bp, Homo sapiens
ccgttcagcagggtcttgatcccctgtgccgtcgactcttactttttcgacggctcccccacccgccttcaggaggggacctagccgggagttacaacgaccaccgccaggatggatagaattaacaaaagatcctctttcgctttaatctattgaagcggattttggacccagcagatgagcccagatgatgtccttgcaaagcgacttaaaataggaggggcatttaggccatataacgtctttaaaatttttgcatttttcaaaaggaagggatttttgcaaatattttaggtgcccacaataatttcccccccccacaaaattgtcagtttttttcataaattattttag

SEQ ID NO: 559382 - DNA, 125 bp, Homo sapiens
accaaccagaacgattcatgcaggactttatttcctattctacaaacagaggatcagtagctgctaaggaaatttaatggacatcatacattatgatccaacgaacgcaagaccgctcttacctg

SEQ ID NO: 559383 - DNA, 177 bp, Homo sapiens
ggccatgctggatacctaatagactgactgatctatctcccaagaaagtctgcattcatgttacaatgcagatctcactgccgtaagcataacggtccagcgctcagtggagaaatgtatacagccagaatgggagggaagggtgagtgggtggtagatcagaaaagaagggggatg

SEQ ID NO: 559384 - DNA, 114 bp, Homo sapiens
tgcaaggagaggggttctgcgctccttatattatttcatatggactaaccattgttatatatgtgcattatacctaatattgagtattaaaggataagtcttaatgctcaaagt

SEQ ID NO: 559385 - DNA, 367 bp, Homo sapiens
  misc_feature (159)..(159): n is a, c, g, or t
  misc_feature (178)..(178): n is a, c, g, or t
  misc_feature (201)..(201): n is a, c, g, or t
  misc_feature (206)..(206): n is a, c, g, or t
  misc_feature (218)..(218): n is a, c, g, or t
  misc_feature (227)..(227): n is a, c, g, or t
  misc_feature (253)..(253): n is a, c, g, or t
  misc_feature (263)..(263): n is a, c, g, or t
  misc_feature (267)..(267): n is a, c, g, or t
  misc_feature (289)..(289): n is a, c, g, or t
  misc_feature (326)..(326): n is a, c, g, or t
  misc_feature (333)..(333): n is a, c, g, or t
  misc_feature (337)..(337): n is a, c, g, or t
  misc_feature (347)..(347): n is a, c, g, or t
  misc_feature (350)..(350): n is a, c, g, or t
  misc_feature (357)..(357): n is a, c, g, or t
ggccgatggtgaaactttttgagaccccctatggcctttttgtcaaaaccttccctggagctcaaaaaaagcctttttgttgtgttatttgcagggcagatgatgtttgtgtaaccacataatggttattcccccttttttgattttgatttttgctgngttatcaaaaacttgaatnctgtgagaaaaagtgaattttcngttgncgaatcagcctnttgttcccntggtgataaccctaattgaatatatntatgagggcntgtnttagttaatggaaaaaaaaatncccccctaccatacatagctgcaatgtgtccaatggntgatttnattnaataaaatgnccnagtgttnaatgaggcca

SEQ ID NO: 559386 - DNA, 419 bp, Homo sapiens
  misc_feature (159)..(159): n is a, c, g, or t
  misc_feature (178)..(178): n is a, c, g, or t
  misc_feature (201)..(201): n is a, c, g, or t
  misc_feature (206)..(206): n is a, c, g, or t
  misc_feature (218)..(218): n is a, c, g, or t
  misc_feature (227)..(227): n is a, c, g, or t
  misc_feature (253)..(253): n is a, c, g, or t
  misc_feature (263)..(263): n is a, c, g, or t
  misc_feature (267)..(267): n is a, c, g, or t
  misc_feature (289)..(289): n is a, c, g, or t
  misc_feature (378)..(378): n is a, c, g, or t
  misc_feature (385)..(385): n is a, c, g, or t
  misc_feature (389)..(389): n is a, c, g, or t
  misc_feature (399)..(399): n is a, c, g, or t
  misc_feature (402)..(402): n is a, c, g, or t
  misc_feature (409)..(409): n is a, c, g, or t
ggccgatggtgaaactttttgagaccccctatggcctttttgtcaaaaccttccctggagctcaaaaaaagcctttttgttgtgttatttgcagggcagatgatgtttgtgtaaccacataatggttattcccccttttttgattttgatttttgctgngttatcaaaaacttgaatnctgtgagaaaaagtgaattttcngttgncgaatcagcctnttgttcccntggtgataaccctaattgaatatatntatgagggcntgtnttagttaatggaaaaaaaaatncccccctaccaatacatagctgcaatgtgttagttaatggaaaaaaaaatacaaccctaccaatacatagctgcaatgtgtccaatggntgatttnattnaataaaatgnccnagtgttnaatgaggcca

SEQ ID NO: 559387 - DNA, 405 bp, Homo sapiens
gttttagtgtttctaagtagagacaggtttcaccatgtaggccagactggtctcgaattcctgacctcaagtgatcgcccgcctcggcttcccaaagtgttggtattacaggcgtgagccacctcacccggctgtgttttcatttctttataaggcaggtgatgtcggctttacatatacagtagtactttacaattatctttttttttacgccaaacaaggaagtcagttttcaacgaaaaatataaactagctgtgtacctggctgtggttaaaaaaaaaacaccaccccccacaccgtgggtattacagaaggtttctgacttaattattacggacaatcatcggttttatggattctatgtcaaggctcacttactggctcattcccattacatatgtagc

SEQ ID NO: 559388 - DNA, 161 bp, Homo sapiens
tgctgcgcgtctcggtgtgactctcagttcacccagctggcttggatcaccaccccccggaaagagggaggcttgggcccctgaacatccccctgcttgctgacgtgtaccagacgcttgtctgaggattacggcgtgcggttaacgctgtgaagtggagg

SEQ ID NO: 559389 - DNA, 196 bp, Homo sapiens
tcagttcaaagaaatcagctattaccagacagtgccagttcgtgtccccagtgcatgtattaccatgcagtgatcatagctcaaagcagctcgaactcctgagtgctactagtgatcctctcgtgccttagcctcccatggtactgggcttataggcgtgggccagtgcacctgattggccagcaaggaccttctt

SEQ ID NO: 559390 - DNA, 378 bp, Homo sapiens
  misc_feature (114)..(114): n is a, c, g, or t
  misc_feature (256)..(256): n is a, c, g, or t
  misc_feature (311)..(311): n is a, c, g, or t
  misc_feature (368)..(368): n is a, c, g, or t
  misc_feature (370)..(370): n is a, c, g, or t
cggaatctcactctgttgccaggctggagtgcagtggcacaatctcagctcactgcaacctctgcctcccgggttcaagccgttctcctgcctcagcctccagagtagctaggnttacaggtgcgcaccactatgcccagctaatttttgtatttttagtagagatgggtctaaccatattgcctaggctggtctcgaactcctgagctcaagcgatcctcttgcctcaacctcccaaagtgctggggattacagntgttgagccaccgcacccggccgcattcttctaaaatcacagtacatctgggttnccagtggcccaggggttttcaggggcagaggggttccagtggtgattcaattttggnanggggcctt

SEQ ID NO: 559391 - DNA, 181 bp, Homo sapiens
  misc_feature (79)..(79): n is a, c, g, or t
  misc_feature (82)..(82): n is a, c, g, or t
cacctccccacactgacaatctttgccacccccatcctgtgctgtccacctcctctcagccagaggaggctcttgggcntgnagaacacgtgtgtctctgtgtatgtgtactgtgtgtctgcgtccgtgtctgtcagactgtctgcctgtcctaggggtggtctaggatctggtctgacca

SEQ ID NO: 559392 - DNA, 268 bp, Homo sapiens
gagcaatagagctagagtctgtctcataaaacagaaaaaaaaaattagccaggtgtggtggcatgcaactgtagtaccaccatactctggaggctgaggctggaggatcacttgagcctgtaaggtcgaggctacagtgagtcatgatcgccccacggtactccagcctaggcaacatagtgagaactcatccttaaaaaaggaaaataaattagctgggtgtggtggtgcccacctatagtcccagctcttatggcccaggctggag

SEQ ID NO: 559393 - DNA, 478 bp, Homo sapiens
aaatttttctgtatatagaaaggaaaactagcttgggcaacatgatgaaaccccatttcctctgcaaaaaaaaaaaaaaaaaataagaaagaacaaaacaaaccccacaaaaattagctgggtatgatggcacgtgcctgtagtcccagttactcaggatgattgattgagccttggaggtggaggtaacagtgagctgagattgtgccactgtactctagccagggagaaagagtgagatcctggctcaaaaaaaccaaataaaacaaaacaaacaaacgaaaaacagaaaggcagcctgcaagagaatgacaagctggggacaggacaataaaaataaacaaggaacagtgtttcctttatatttgaatgacactatgaatgcctctaagtccttgaattacacttaaaatgagccaactttttttttaccaacttccctcctatttccatgggaaaaaataaatattcatcttct

SEQ ID NO: 559394 - DNA, 409 bp, Homo sapiens
acttatccctgagaggctgctgtcaggatgcctggtccctttctggcaagcagcaggtagctaaagaaaaccagcaggtagcaaaggatgtcacactgcatcaggccttgctgcggctgccccagtatcagactgatcttttgctcaccttcaatcagcccccgtgtcacagcaggtctcttggccctgaaaatctgtcatgtccaccttggagcctgagtaactttgaacagctggtaactagtttgactcttcatgatcccaacctctttggtccccagtaaagaaagttgagacacaacgtgctactgaggactcggggacccagttatgagagggggagtttctttctgcttcttccctggatgtaaacataagacacttcctctgcagaaataaacttgcttta

SEQ ID NO: 559395 - DNA, 282 bp, Homo sapiens
gatctggttggcactgctgtttgagaaggcgcgtgagctgtgctgtctggtgactactgagcacttgaaatgtgactagtgcaactgaggaagtgaatttttaattttgtttgtgattaatttaaattcatattcaaataggtacatggcactagtggctactgtactggacactgcagctagagaacatttccatcatcacagaaagttctcttggccagcactgctctagcaatctcattccacgactcccattggactcgccgacatctctgaacaagt

SEQ ID NO: 559396 - DNA, 145 bp, Homo sapiens
ggtcgcaagagtcccggccaccggtggcgtcaagaagccccaccgctgcaggagggttgcgaggcctacctggtggggctatttgaggataccaagctgtgcgccattcacgccaagcgcgtcactattatgcctaaagacatcc

SEQ ID NO: 559397 - DNA, 490 bp, Homo sapiens
  misc_feature (220)..(220): n is a, c, g, or t
  misc_feature (425)..(425): n is a, c, g, or t
  misc_feature (486)..(486): n is a, c, g, or t
taagatcaaaaacttttaatttccaaacatatattgagcaaaaaataattaaaatcccagcagcagcccttttttcctagaggaaaaaaaaaaactacaacgtatatctaagggagagaacatggcggtgtgaggtgaaagatggcagtttatcctcagcttcttccaaccaagcatgaggacagggaatctcctcatccacagctttgaaggccaaagntcagcccttcctgaagagctggggtccctggtgtatagagagggttacctagcaggacaccgtgcctgcctacaactggtcgtccagtgcctgcagccctcagagaggctccctgggcaggaggagagggaggcatctgcagcatctttgagacagagttcacgcctctgtggtagcccgagcagaggtgaaaacacactttttnctgtttccagccgcttcttcctggaaaagggggagcaatggttcatgggagtgacttagcntcct

SEQ ID NO: 559398 - DNA, 1044 bp, Homo sapiens
cgcgtcatggggaacgagcagacatcttcaacgaggaggacctagacgactagcaggactgcgccttcttcaataagaaggagcttcctcaagctgtattcgcgattctatgaggctgggccccaggctcgtgcccaatggactacaggaagagccccgatgcgtccaagcgatgcccactgaagcgccatcaatacaatccagatgccagagcctcgcgcgcgtagaatcccgttgcgaaccgcacagagcgatgcgtgcggcgagccgctgtattccgacggactggtgagaggagaaccctcaacatttcacatcggatctttgtggacatgtatactcgtgatcatgcggagatcgttactcccacgatgcagcttcaagagacaatacttattgcgcttcaagtatctatgaacttcaaactgcatgtacatagcttcaatcttgctagagggaaggacctggagacttgactgctggccccggactcactaaagtcagagctggctagaggacgggaaaagtcggtgcttgtcgtagctcaccacaggtcattagaaatgactgctgacttgagacggtgaccgggaagctgggctttgctgactcccgaggacttgattgccaatgcccctgactttcctcatacaactttccaccatcccggatctgagagacactgccgagggctgtcggggggactacgaaatgtcactcataccctgccctgaggttcaccctggggtgtgagccttctaatgctcgccaggaaagcaggagaacttgccttctggggttttactcctccaaatagtattcctgtggccgttttagcaagagaaaccttaccgggacgggcctcgaaggttagggccttccccagacccttggcgttcaccccgaccatgcactacccggccccgcaacccttggtccccatcttttgcaaattggtcggcgcacacgagacctaactccagaggctaactaaacgcaaccgtcacctggaacaccctagatacttatcagtcacctcctatg

SEQ ID NO: 559399 - DNA, 181 bp, Homo sapiens
gatctaacaggctcccggtccaggcactgcacagcctcccaggctccggcagtcctgctcctggcttttgccctgctctgcctgccctggcttccaagcaggctggtgccgtcccaacaccggttcctgttcacccaggcttccagtgcctgcagggtcacgcagctcgcacattctgtca

SEQ ID NO: 559400 - DNA, 157 bp, Homo sapiens
ttctctgatgctccagaagcagaggtgagtgggtcgagatgcacactgcactcagcctggtgacagagcaaggttcatccagaaaaaaaagtcactgaatgaattccctgcctgatggcaaaattaaattacagactgtctggctgtgaggttgaca

SEQ ID NO: 559401 - DNA, 245 bp, Homo sapiens
  misc_feature (35)..(35): n is a, c, g, or t
ggagcacctgctgtattaagacctctacttttgcnatatgtagcaaattagattcttgcaagatgagctaacattaggaaaggtcctattatatttgactttttttttttttttaaataaaaccacttttgcttggcctcggatgtatcagttctggataactttaaagctggtaacagaacaaactgtgttcacacacaggaaatgtctccaaacaaaaagtgggtgtgcagtttacagtttaa

SEQ ID NO: 559402 - DNA, 376 bp, Homo sapiens
tcctccttcagctccatgtccctccctggtgccccaactgcatcgcctggtgctgctgcctaccctagtctcaccaatcgtggatctaactttgctcctgagactggacagactgcaagacaattccagacacggacaggcaaaggtgggggtgtcttgccccagtggcagggccagcagcctcatcatcgttcaagttctagtgagcaacatgttcaacaaccgccagcacaacaacctggcccgcctgagggctttcaagaaaatccggcccttcctggaaaatcaaaccaccagctccaccattgaaaaattccctgatctaactatgtttccccccttttcagaatagaactattggggtgaggataagggg

SEQ ID NO: 559403 - DNA, 477 bp, Homo sapiens
aggtgggccaccccctcccttcggggtggaaattttcccttcttggggagtggcaaggagcgtggtttctgggtttttgtgtcccctcatggccaattcccttgggaattagggtgggttccctgtaaccgtttccataaggatttgtcccgtgttttactggggggtccccgcccataaaggccagtggggttttttggggccctttttggggggggggtgtccccccaccggaaagcccccttctcgggaccccctttcccggggaaagtgtcctaccattttggggaccccttttgggggtggggtttttcccccttccgggttttggccttcccccaaatcctttggggtttgggccttcccccccccccgttggggcccctccccttttttgggcccttcattaaaaagccttttccccccttgaaaacataaaaatgatttggtgcctaaaataaatacaaatgtccccca

SEQ ID NO: 559404 - DNA, 113 bp, Homo sapiens
gcccccccccccaggggccccccccccccctgggggttttttttgggtttggggggggggggggctttttttccccgggggggggatttttcctttaggggtttggcctttta

SEQ ID NO: 559405 - DNA, 1096 bp, Homo sapiens
tagcaaataaagtagacatgatttggatagttggtggcagttctgtttataaggaagccatgaatcacctaggccatcttaaactatttgtgacaaggatcatgcaggactttgaaagtgacacgtttttttcagaacttgacttggcagaaatataaacttctgcctgaatacccaggtgttctctctgcagtgtccaggaggggcacacacatcaagtacaacattctgaacgtatgtgagaaggatgacttacactatgaaggtgttttctggctttaaggttgttcccccgtccctctgagccaccaagtcatgcagtttctccacattcagcaaccagcgcgacttcttgttggacttccgtatctcatgcgcatacgtccattgctctgaacgcaacgtgctccggcagtgtcctgcactcactccttgcgctcatatccgcatctctcatttcatcgaaccccatctccttgcgtcgtgccctggtcgtctccgcagagccccgccctggagtcccgccagcgccgtgcttaccgctcgagctgcccattccactcccactcacatgtggctcctcttgtccacctccttgacccttgtcacggcctctcctccctgctccgcgctccgttctctctctccccgattcgacgatgccgcgtacccctctcagcctcgagcccgtttcccctagcttgcgccgctaccaccggctccggtacatgttgtatccccgaggctccgctcgacccatgttgccgccgtcctgcgcccccgggcaccctcgcccctgcccggcactgtccccttgatggggcacacttgactcttctctcactggctctaccactcggcgcgcaaccgtatgcctctatttccagtactctgttgatctcgctgttgtcatcctcacttatcacacccacgttcgatcccctacgccccctccctcgccctcgtcgccgaccgcgcacctggcccgggccacgccgctgtacatcgttgcgctccgtctcccgcctcatgccccccctccgccaatcctcagtgtccgcgtttcacctctcctatctgcccccttccgcatccc

SEQ ID NO: 559406 - DNA, 1303 bp, Homo sapiens
ggagaaatacaggtacctagcagctcgtcggtgatctggggtgagagatgtcaccttataagagtggctctgtgcatgcttgtgtggggatacttcgctgtttagcacagaccacccgtgacctagccagtgagccacacagggccccatgtggctctttcatgtcctcttattccgttgcctcctctctcatggaagcacgagggtgcctctattccttgtccttgccgttctagtcgacacccagcgtgtggcgctttctgaggctcttgccatcatgagggctgctgagtgctcggtagtgtcgcgtcccacgacaagtacttgaagcggagaccagcaggaaaattcgagagttgtggctggtcccaaacattaatgcaggtgacttcattcgtttactagcaatttacttctcgatgcaattcgtatttgtggatgactcgatctcgaccgggacctgaagaatgcgctgtggcagaccccactatgagtagagggaggattcgctttcacctttcacccttgcgtacttcctttgtgcctttgttcctcctgcttcttctacaaatagctctatccgttaaagacgattctacattgcgcctgttgcaggcatggggttgtcgttggttgaagccagttcctgtggggatctccgtctccgcagcccatttgtgaattggagaaaagtggctggaggtccaatgcttccctgggtcgaagcatcgggcatcagttggcccctgggctagattggttggggcctgccgcatggacgcaaagtggtttggtttgcctagaaccgcaacccaagtttatcctttggttggactttcggaccgcacgtgtccacccggccgaggggccccccgcaatctttgcgcggtttgaataaggggacactctgtgtgcaggagcgttttcggttattcgtggtccacctttggggagttgttctaattgccctgcgtcaattattgttcctcttaaactaaaaattgtccccgaccaaagccttttttataagtcgtggagacattgtcttgtgaatttatttgcgcttgggggaggacgaagagaaggcataaacgacagaattgcggggtccagacatttattcttggcgaccaggaaagcaggtggtaaatatagggagctgggcgcgctctagtgaagttgcacaatagccatatatgagaccctctcctccgaaggagatgattatgagcgggagtttttgaggtttacaagagaagagacactatatagggtaggagagtatataggcaagaacaccata

SEQ ID NO: 559407 - DNA, 1045 bp, Homo sapiens
  misc_feature (368)..(368): n is a, c, g, or t
ggtggtgtgccaggcagttgggtatgcatcaggcgtggagcagtagaccgacgtgggagggagccatgaagcattacagaggtggagattctggatgcgagagcagcatgggagcagacgctggtgtttcttggatcgatggtggagtctgcatgccatcattgtggtagatcatgaatctcttcattattaaccatccgtagtggtatccccgtgcgccagtactcgtacttgccatggcactgccaaaggtgcccagttgcgccatgagatggatgacgtgatgatatctgcaaaaatgcgttgcactcgatagtgggcaaacatcgcgatcaaacatgtatcttaccgaggagactgtgggcgtnccaagattcaagacttggggtgcacagtggtcttcctatgcagagtattgctgggaggtccatttgtcatttatctgcatctattctaactatccgatgtgccctctcatcgaatagggccggaagactaatagaaggtttcactgttcccatgcttggggcactatccatgtgtggtagtcaccctcgactcgtgtcagtctgttcgagctctagtatccaactacaatacaaagtggcctgcctgggatgacgcatcttcgtgcactcggcttctgccatggcaataggtcttttgccgcaagatcttcgacgaacctgtgactactacgtgtaggtcttcgacggagtggattagcctatgtacatcgactcttccctctctacatcccaccttagcgttcggcagctcaggaggtgatgacgtggtgctcggcgtcttgtgtgatctgacagttcggcctgttctttccatccacatggccctgcggttgactgaggcctgctttggtcttggacggggaagattccgtacttgcacttgagagcccttcatgtggtgttctggtgggtctgccgacttcctaagagtggggccggatccgttccgcactggggcctgttccgggccctttctgttgggttcccgatacttggccggcaccgcggccctgggt

SEQ ID NO: 559408 - DNA, 162 bp, Homo sapiens
atagagtgggctgcgagtggggcattagtgcctgtttgagcggggctgcatgagtggggcgccgagtggagcattagtgccgatggagcaggggccagtgccgatagagcagggtgcctggggcctgatggagtgagtgtgctatgtgctgactggagcact

SEQ ID NO: 559409 - DNA, 279 bp, Homo sapiens
gctgacttagagttaccaccaacattggcctcgaccatgtcaagaagaaggtgctcgacgatgccgacaaccgcaaggcgctctggtcgcggttgcagttctccctcgagggcgagcccgatccctggttcgagttcgacaaggcgcaggtcgacgcgcgccagttcgagccgttgtccgtctgagcccgccacccgcatcgagacactggagctgcatcatgagccaatggaaaccgatctgccgcgtcgagaccaatgttggggggtcctctagagt

SEQ ID NO: 559410 - DNA, 443 bp, Homo sapiens
taattctggcttgttaattaccagatatatatctatatcatcttttttgtttgttgtgtttgttttgtatgagacggggtctggctctgtcacccaggctggaggtgcaacggcgcgatctcagcttaactgcaggctccatctcctgggctcaagcaatcctcctacctcagctgcccaagtagctgggagtacaggtgcttgccaacttactcctaactaattttagtattataagtagagatggggttcaccatattggccaggccggtctcgaactcctgacctcaggtgatccgaccttgacctcccaaagtgctggtattacaagcgtgagccacgtgcccggcctattacatatttaaagatggaggatagagaggtaggtactcttccagttgccagcagaatgttggttggatcacagtcaagccaacctaaca

SEQ ID NO: 559411 - DNA, 292 bp, Homo sapiens
  misc_feature (137)..(137): n is a, c, g, or t
  misc_feature (158)..(158): n is a, c, g, or t
  misc_feature (194)..(194): n is a, c, g, or t
cgggctgtttgtttgattcctgtgcctagtcgcggctctatattttgttttttccccgtgttcacaatgttttcagtggggggcccctttttgggtccctttttttgcaattacttgaagacccccacgctaaaaantgaatgttacttgtgcttgcngcttgggtccaccttggggccggtgtttgaattaantaagttcctttaacggtaatatttccggcaaaatcccatggttgggttttgtttttaaccttgtaacgcttgcaatcccaataaagcattaaaagtca

SEQ ID NO: 559412 - DNA, 271 bp, Homo sapiens
gctgacttagagttaccaccaacattggcctcgaccatgtcaagaagaaggtgctcgacgatgccgacaaccgcaaggcgctctggtcgcggttgcagttctccctcgagggcgagcccgatccctggttcgagttcgacaaggcgcaggtcgacgcgcgccagttcgagccgttgtccgtctgagcccgccacccgcatcgagacactggagctgcatcatgagccaatggaaaccgatctgcgcgtcagccaatgtggtgtccactact

SEQ ID NO: 559413 - DNA, 275 bp, Homo sapiens
ttgcgcacagaagttagttaggtgagtgatcccgtcgggcttgctaaataatatacgagtctagcctcatattttctcatcagttctacagtctccttcctatcgtcatcccactaaagactgtcaataatcatttcctcaagctgctgctgtcttagctcaacgccatgctgcgtgccatcccactggttcttgaccctttccaattttgcgtgtaattgctgttctcatatctgacctgaaagcttcatttctcaatttctgtgcccgttcca

SEQ ID NO: 559414 - DNA, 181 bp, Homo sapiens
tggcaggatagcgggtgacggtccggctgtggatgatctctaccctgggatggtgggtgggtatccctgtgacgaggtagggatagggcggcggcgggggcgcggcggggatggcgccgtagccgtgcgggccacacgagtagtcgccctggccggcctccaggttgtaggcgggcggccg

SEQ ID NO: 559415 - DNA, 417 bp, Homo sapiens
gcccgagcaagattggaggaaatactataaagtggggcctcttgattttggcgggactcagaaacagaaacaacttttcattgggggagaagcttgtctatggggagaaaatgtggatgcaactaacctccctccaagattaaggcctcgggcaagggctgttggggagagactttggagttcccaagaagtcagagatatggatgacgcctatgacagactgacaaggcccccctgcaggatggtcgaacgtggaaaagctgccccccctctttatgctggatattggaaccctgagaacatgtaaaaaaaggagggggaaaaggccccagccatttggactaccatccactttattttggaatcatgtaaaataagaaattaggctgttttttgaataaaaaattttatgatgga

SEQ ID NO: 559416 - DNA, 101 bp, Homo sapiens
aatttaaaaaccttttatttcctttttttgtttgattacattaactagggcttccaattatattaaaaaccattttttttttttcacttcaaaacccccca

SEQ ID NO: 559417 - DNA, 137 bp, Homo sapiens
ttcctcccccaccgcccgtcagccgtgcgtgcggtgacagacttttcccacaccctcaaagcgccttcccacaagtgctaccgaactgctcacaccccttgaacgaggctgttcctacgtccttttcgggtctatcc

SEQ ID NO: 559418 - DNA, 327 bp, Homo sapiens
  misc_feature (197)..(197): n is a, c, g, or t
cgcctcctgggttcaagggattctcctgcctcagcctcccaagtagctgggactataagcatgtgccatcatgcctggctacgtttttaaatttatttatttgttgtttgtttgcttattgggacagattctcactctgtcactcaggctggagtgcagtggcactatcatggctcactgcagcctccacctcctgngcttaagcaatcctcccacgtccacccccttagtacctgggactacaggtgtgcaccacctcacccaactaatttttgtattcgctatgtttcccaagctggtttcgaattcctggggtcaaatgaacca

SEQ ID NO: 559419 - DNA, 347 bp, Homo sapiens
gcccaggttggagtgcagtggggcgtgatctcagctcactgcggagtccgcctcctgggttcaagtgattctcatgcctcagcctcccagttccttgggaggctgaagtgggaggctagcgtgatcccaggaggcagaggttgcagtgagctaagatggcgccactgcactccagcctgggtgacagagcgagacctgtctcaaaaaaaaatactgaggattcagggttaactagatcctgcaggccataacctccattccagttgttactttattggtgttttagcatgtataggtagtaattatgggtcttgtccagttctggacaggtttcaaaacatggggtt

SEQ ID NO: 559420 - DNA, 814 bp, Homo sapiens
gggggggcggggccgggccgtgggacgggcggaggcgcccgagtcccgcttccccgggcccttccaccccgagcccgactcagcccgcggcacctggccccgccctgtcggccggcgccctgagcccagcgcctgcgagcctgttcccctggctgggcttggctcctgggccccgggaaggcagcggaggtgttcaaccttagcggcgagtgggctccagtctccgctgggaacagaagctgcgcggcccctcttgggcctcggccccggggatgggggcttccccgggcgggcggtccccggaaggcatttttccgcggcgcgggagtgagaaggcggtgccctgaagaccccgggcagaggtgattggcacccagccccccgggggccggacaccaaaacgcccggggaaggactaccggacggtggtttgctggagccccccgggaagcgcggcaaagacagccgtggcgcggggaaacgcccccagggcattcggcttggaaaaaacggggcggtgggccccggcaggcggaagggctcggaggagcatcccgcctttggaaggggagccttggcgaggctggcacacaaagcaaagggcagcgttcagacgatgaacaccccatgaaaaacaggattttacacgtggagaagggggttctcgtaaacattgccggggccgtgtctatgatagccactggtctgtccatctctggggaggcgacttccttcttgggagaggccaggggagaaacccccatctccattcgacacacgagcatccattcggaaactcagggactctttagaa

SEQ ID NO: 559421 - DNA, 407 bp, Homo sapiens
agtcataacctcacagtacttagactgtagacttattagtggctgtagatattattagttcagaagaggtctactacagtacagtgggtcgcgaatccaatatggctggtatccttagaagaagggacagaactgggcacagtggctctagcctgtaatttccagctacttgggaggccaaagtgggaggactgcttgagccaaggaatttgagattgcagagaccaaggattgcagcactggactccagcttgggcaacagagagagagaccctgtctctaaaaacaaaaacaaaccccccacttcatagagacaacttggtgcatgcacttcataacgaggacaaattggttcccttacaggcttgaggtggactccacatgactactttaaccagtcattgttg

SEQ ID NO: 559422 - DNA, 418 bp, Homo sapiens
atacattttagttttgacaacaaagtaaatccctctttgcccaatttattctcattataaagtaagaacaagatttccaccttaaaaaaagctctttaatagacgaatatagctaaaccactgttaacgtaggtcttgtagtgagatacctgctagaggctatattatatgaccaacacactattattatgaaactaaggacctcaatatggccaagctgttgtttaatttgtattggggggaaaaggcagtttaaaagatggaaacattgattgactttcatcagaatccatgttattaacagagtttacaaggcagaaatgtagggtttatagtctttgttgttaagtaaattgacttatatgcctcttaaaatggggaagaggtgagcagcatgcatgttcacaggaccataatg

SEQ ID NO: 559423 - DNA, 1002 bp, Homo sapiens
cgaatctataagaaaggtgatattgtagacatcaaggtaaacataaaattgggaaaataacactacagaagatagaaaagttggatttaatctagtgtaggaattcaaatactagtgtatgttgcatctgtaagagtatagaatggatttttttttttttttttttttttgggaaagggagttccactctgtgttggcctcaggcgggagttgcaatgggcatgtgattctcaccttcaaccttccgccttccctctcccggattcaagcagttctcctgtgccatcagccttcccaaattagcggggaatacacaggcgttgcaccattgaataccgggctaaatttggtattttatagataaagaaggtggttttcctccagtgtgggctcaggcgtggtcattgaacaccttcgggtgatctgcgtggactcagcctcccaaggtgcggggatatacaggcatgcaccagttgatcccgggctaatttggtattttagtagagaaggggtttctccatgtgggtcaggctggtcttgaaccacctcgggtgatccgcgggactcagcctcccaatgtgcggggataattacgggtgtgaaccaccgtgcccggcctaaaagggatttttaaagggtgctatcttagcagaattaaatttcctcattacccggtgggagtaacagctagtggacattggggtgggagggggcgacatcatgagttcaccaggtgggcaaggaacgcctttgggcagaggtctattactggggaacattctctacgttggattaaaccctcctagggaaggtggtcttcgtggacggtaaggtgtttggacccggataagagaagggtttgaatgggaaccagtgtgaacttccggctcgtaagctgtgtccctgaaacttaaactcactagagaagacggggcagggatacagctgtaggggcgtacagcacagctcagagtcattacggggtgacacagggtgtaaccc

SEQ ID NO: 559424 - DNA, 202 bp, Homo sapiens
agatggagtctgagggggggtgcagatgactcttctgaggagggggacctacttgatgataattaagatcggggggattaccagcttgagtttatcaaggatgatgaaaaagaggcttatggaggagaggagttacacagacagcgccacttgcagggagtgtactcttaagcacatatgtgtggggtatgaatctctatct

SEQ ID NO: 559425 - DNA, 658 bp, Homo sapiens
tgtgggcgcgctgctggaacctccggctgtcgttgcgcttacagttcctaaccccgaccctgcgcgcagcccgcactatggcagccccgccgcagctaagggctctgctcgtagtcgtcaacgcactgctgcgcaagcgccgctaccacgctgcgatgcccgggctcacaggtactcgggagattgctggaaccggagccgcagagcgtgcccctaacgcgcagtgcatgaccgtactctaccgggatggcagcctacaggagaagctgtgggccatactgcaggccacatatatccactcctggaacctggcacgggttgtgttcacctacaagggtctccgtgccctgcaggcctacatacaaggcaagacctacccagcacacgcattcctggcggacttcctcggcggtatccaggtgtttggagcaataacatcaacaggcagatcaacatgtacctgctgtcacgcgtcctgtttgccctgagccgcctggctggagagaagggctacatccctggacccaggtgggacccgttcccagtgatcactgcggagctgtggtggctgtacttaggctctttgagtatcaccgaaccaccctgaagccctggctgagtcctccagacctaccttatgaggccagcggtggccgcc

SEQ ID NO: 559426 - DNA, 208 bp, Homo sapiens
cgcggtccgggcgggccgcttgcaactcaacgagaagccggtgcaggacctcaacatcgtgctcaaggtggagtcctgatggggctggccagaagcgggcgaggaaaaggggccgggttttgttttgttttgttttgttttgttttgttctgttttgttttttagtcttagtaaagcataggtactggattaaaatcatggcaattct

SEQ ID NO: 559427 - DNA, 190 bp, Homo sapiens
  misc_feature (116)..(116): n is a, c, g, or t
tgtgtacgagaagagctcaggtggaaaaggagggagctactctcaggctgcgtccagcgacagtgcccaggactctagatgtgtctctcacagcttgaacaaggcctgagacagcntgtcttagtgagtggacttgagcatgcagtgatttcgttcactgcctcccactttgtgtacttcaatgagcctc

SEQ ID NO: 559428 - DNA, 84 bp, Homo sapiens
cattggctaagcggatgaggggtgcaggggaacagtgaaaaaaagcatctttaaggtcaagaacggaatcgcctcagttgatag

SEQ ID NO: 559429 - DNA, 458 bp, Homo sapiens
  misc_feature (10)..(10): n is a, c, g, or t
  misc_feature (15)..(16): n is a, c, g, or t
  misc_feature (21)..(21): n is a, c, g, or t
  misc_feature (23)..(24): n is a, c, g, or t
  misc_feature (50)..(50): n is a, c, g, or t
  misc_feature (83)..(83): n is a, c, g, or t
  misc_feature (105)..(105): n is a, c, g, or t
  misc_feature (193)..(193): n is a, c, g, or t
  misc_feature (241)..(241): n is a, c, g, or t
cgtaccctcnacctnntgtancnnggggagcattctataggcgtggaagntaaaggcgtgagccatagtggagctgatagaanagaaaatgtaggcataagtaangataaggcaggcgagaaacctgcccgccgaaagatcaaggtttcctcagctatgctaatcagctgagggttagtcggggactaacgcncacccgagaaggggaagtggatgtacaacaggttaatattcctgtacnattaatctaataaaagtgacggaacgagataactaccgcgtactgacggaatagtacgttaaaggagcagttatagctttgatagtacactgaagcttcggccgaggtgatagagtggtgacaacgtttccaagaaaagcgaagattaatgcccgtaccgtaaaccgacacaggtgattgggatgagaattctaaggcgctcgagagattcatggct

SEQ ID NO: 559430 - DNA, 432 bp, Homo sapiens
aatgcgctgagcgaggctttacaccattacatggctggtaccatgagaactattcctatggcgcgggatcacgatgcagatgggatcacagctgaggacatgtaccacataattgtaacaacacatgcagtcactcttcaccccacttcactgctttgacgatgaggtatccatcttttctttaaccagaggacgcccatggggcagatctgaatgcaacggtctaccttacctttcatgatagcaacttaaggaatagcacataggaattttcttaattcatacaaagtttataatcatatagaattactactgttattacacacacacacacacagtcctctcgcaatcttaagacaaaaggctttcttagaaactggtgtggatctaatgccatccaagtattattggcggcgtttgtatgctgaactg

SEQ ID NO: 559431 - DNA, 339 bp, Homo sapiens
agtcacaccaggaggaacctctaggtgggacaatgacaggatcaactgggatggcaggaagggtaggaaatgtttacacaaggaaaatctgaaaatcaaatcttttttttgggaaaagggcccccgtttaaacattgggggaccgaccggcccaccgaccttttttttaaaaccctttaaggggtgcacccgcctttgggggaccctactaagaatttgggcttgttttttaatttagggggttttttggttttttttggaaaaaaccctgagaaaaagaaatccttcccataaaccccccacgcggccctcctggaattctttattttgatgtttttt

SEQ ID NO: 559432 - DNA, 348 bp, Homo sapiens
cccccctttttgccctgggggccctccactccccttggagtttggatggacccatgggcccggggcttttaaacacccccccttttaattttgggttccccccccctggaaacccccgattggggccccgggggaagcctaggagagccgaatccgtgttttttaaaaggcaggcctggcccaagtgccaaccctccggggttcccgggggcccaaaaaaaaacccagtcccctttgttaaaaggccgggctggcccaagtgcccaccatccggggttcccgggggcccaaaaaaaaccccagcccgctttgttgggatttgtttttttttaaaaaacccttggccca

SEQ ID NO: 559433 - DNA, 391 bp, Homo sapiens
gaaccctgggggaggggggccctttcccccctgtgttttttcagaggaaaaaacaccgggagggtgttggggttttcccgggggggggggggccccccttgggccccgggggggggggttttttttttccccaggggggttttttttttaggggggggaaccccttttttaaaggttttgaaaaagggggggggggggggggggggaaaatccttttttttttttttgtttttttggggtccttttcccccaagggggtttttgccgggggggggtgggggggcccccccaggggggggggggccttttttttcccggggggggggttttttcccccccctttccccgggctttttggccccccccttttttttttttttgcccccccgga

SEQ ID NO: 559434 - DNA, 350 bp, Homo sapiens
agggtaggggacttattttctgagacagggtctcactctgtcacccaggccaagtgcagcggcactatcgtggctccctgcagcctcaccctcctgggctcaagcgattctcctgcctcagcctcctgagtagctggggttacaggcacaccaccacgcccaggtaattttttgtatctttagtagagacgagatttcaccatgttggacaggctggtctcaaactcctatcgtgatccgcccgcctccgcctcccaaagtgccagaattacaggcatgagccaccgctgccagccaaatgtataattttttaaattcacactttggtgaactgggttaactgaggaaaa

SEQ ID NO: 559435 - DNA, 435 bp, Homo sapiens
tatactttggaaattatattctagtagtatattcaccaacacactttgactaacatttaagcagatatcataaatccaaaatagggaaagacaggcaaatacactccagaaactaattttgaattgcatatgtagttttctttgttatttttctaaagcaccattattattactattagaaagtcactaacctgttcatctgaaacagaatttccatttaagtctgaggaagggcttgtccggtcacatggaagattatcatcagagacatcagtattatagccactgccggttggagaatcagaagaattattggatgtcagcactccacccctttctgtgtcactagctttacccataattccaaaactgttatataaaacagcaccagactgtcttcctcctataaaaataaaaaaaagcatttattataaa

SEQ ID NO: 559436 - DNA, 215 bp, Homo sapiens
ggtgactgtgcccttgactgacctgtatatgttgtgtgagtctccacttgtatttaatgaattagtcatcatactgtgcagtacagtttccattagggagttacaaagcgttatatgatgcagaattgcaaattaaccactccatgagtggaaactgagacattatgtagtttttacatactgtaatattttctgaattaattctttcatttcca

SEQ ID NO: 559437 - DNA, 177 bp, Homo sapiens
cggctctagaggacccggtgttatcgatgcaccaaaccagctgcaggacagaagcagaacaacgtggtttggtggagagatctgataacaaaaagttgggaaataggtaaaataataacttgtggttatttcttctttactattacacctgaactcaacaggtggcatcgatgagca

SEQ ID NO: 559438 - DNA, 148 bp, Homo sapiens
gcttgtggagatgaatagatttccactaaatgtgtcttaatctgatctccgtccgagtcgtggcagatactgtttattttaatctcgccttggaagttgtcctgtaggagacagaaattcttagttgtctgtatccctgtggtaaagt

SEQ ID NO: 559439 - DNA, 874 bp, Homo sapiens
ggagaggtgtaccggaacggcggcgacagggtgtcccgaactagagtggggcatacagttatcttgctgctatgcttcgaagctgtagtctgaatcaacctaagttttcaaaccagaaggtgaacctctgagatagaaaatcaagtatatttgtatgacagaagggatgtgggatcaaggcaggacagccttggtagcagtggcccttgaatcagacaacagtggagtgcagtcatttccagcgaccaacaggatccaaggccagatgtgattgggctgcatttggccctagtgcttggattgcccaaagacgaagcttcatgtgacatgcaaacgtctatggtagtaacataccacgcaggatatgatgccaaagtggatcgaagataatgtcatacaagtgtgaagtctggttccaaagcaagtgcaatggggaagtcttccaaggtggattcaaacttcaaccagaatgtggcaaaccaggtagattggggacattgcattcaggcaacgcccccacatctacgccatccagaatcatgccattggatgccagcaagcaaccaggcctcaactggagcacttggttccatccgttctgaatgacaagtaatacagtcatcgaacatggtgggtgaattgtgcccctgacaacaggcatatatgttaagcagaagcaaatcacaactttggtggaccacccgatatattttgtcagtgaggccaggtgaacgcagttgtgactatcatgcatggggctgctttaggtccaccgcacagtggatttcatcctccttattggcaagcaggacctccaggactcagcatcttcccagaatcggagacaaaggcatccttcatcagggatcgtcgc

SEQ ID NO: 559440 - DNA, 171 bp, Homo sapiens
gtcatatgattctttagatttccttaaaaattgatctcctatgccaggcacagtggctcatgcctgtaccctagttctttgggaggctgaggtgggaggatcacttgagaccagcagttccagatcaatcttggcaatacagtgagatcgtgtctctcctaaaaaaaagcc

SEQ ID NO: 559441 - DNA, 351 bp, Homo sapiens
  misc_feature (29)..(29): n is a, c, g, or t
  misc_feature (224)..(224): n is a, c, g, or t
  misc_feature (249)..(249): n is a, c, g, or t
  misc_feature (259)..(259): n is a, c, g, or t
  misc_feature (288)..(288): n is a, c, g, or t
  misc_feature (290)..(290): n is a, c, g, or t
  misc_feature (331)..(331): n is a, c, g, or t
tcccgagtagctgggattacaggcatgtnccaccacacctggctaattttgtatttttagtagagacggggtttctccatgttgctcaggctggtctcaaactctcgacctcaggtaatcagcctgcctcggcctcccaaagtgctgggattataggcgtgagcaccttgcacccagccagccccatctcttaagaaaaataaggtggcaggggagagtaaggntcccagccaggacccccaccatctnagggaccttnggaaaggcctcctgcccagccctgctggngnctctgaggctctctgggagggtctcatgactgtggggactnctggatatccctattggtcc

SEQ ID NO: 559442 - DNA, 228 bp, Homo sapiens
ctggacattcctccagtgagtctcagggacttccttttcttcagccttctgcatctccctgatgagccaggtgggacagagatgacagaagattaaacacagagggattggaccccatggagtcctagctggttttgacagtcaagatctcgagcagggagtggaatggtgagtgaaaggccggacaccgtattgtgcttgcattggtgcagcgtggtgcgatggagc

SEQ ID NO: 559443 - DNA, 111 bp, Homo sapiens
cacgaggtttttttcaatttcagcaacatacttctcaatttcttcaggatttaaaatcctgggggatagatctcgcctcatgacagcccgttcaatgttgttgcgacatgt

SEQ ID NO: 559444 - DNA, 469 bp, Homo sapiens
agcctataaatggaagagcaagcataccaaaagatggccccaggaggcttatggaaaagatcagctgcctgatgaaatggaatatgataaatgttaaatggtacactgaatattaaaatgctacatttgcagaaacaagcttgacttgaagcagttcaacaccaccacttggtccaagttgtaatgcctaatttgttaagagggtgaaaatgtacagactcccacacacattcctggacagggctcataagaacatacttattgtctttagcaaagaggatagagcacaggagatattagttaaatgtttatattaaatcagtgtttctactgataggatgttgaaccaaaccaccaaggcaccctaattagtgaaccagtccttcttcagcctccaagaggaggagtgtttgttcatgaataagctgttgctacagagacagtcatgttggtcatattatctttgata

SEQ ID NO: 559445 - DNA, 809 bp, Homo sapiens
gatcagatcgatgtaccaggtggcatatcatttggtgcaacaatctccttctcatgtaacacagggtacaaattattggctcgagttctagttttgtcttattgtcaggcagctctgtccagtggagtgacccgttgccagagtgcagagaaatttattgtccagacatcatcataaatgtgacaatggaataattcaggggaacgtgaccattatggatatagacagtcggtaaggtatgcatgtaataaaggattcaccatgattgggagagcactctatttatgcgtactgtgaataatgatgaaggagagtgagtggccaccactgaatgcagaggaaagtctctacacttccaggtcccaccaacagttcagaaacctaccacagtaaatgttccaactacagaagtctcaccaatttctcagaaaagccacaaaagaacaccagacaaatgctcaagcaaacggagtacacctgtttccaggacaaccaagcattttcatgaaaaaacccaaataaaggacgtgcaacccacttcaggtactaccgtctctatcctgggcagaagtgtttcacgttgacaggtttgcttggacgctagtaaccatgggtggtgatttagcaaagaagaattagagaaattcaacagtatacagatggctaattcttagaatgatctggcttggtaaagtaatgcatgggggtatagaggggcaggttaaagtgttggagtacaggagacagggaaaggggcggatcatttggactaccttggaaaaactgggaagaggagttcaagtaaaaaa

SEQ ID NO: 559446 - DNA, 832 bp, Homo sapiens
gatacctccatcagagttagttggagtcaacctgagtgttgatacaagcctacagacctcacatgccaagtcagcagattaggggtcttcagatatccgtatgagtactctactactcagctagaaggtttccagagtaacaacaaggaacagtaataacgtcgaatgtccaaggtaagagtgatagataggcatcctgagtggtggcgccacgcagtcttcccattggacgcgctgtatccatgccagatcgttcgagggcactggtcatccgtcgaggaacgtccaaagggagcttctgtacaaatgtggtccggaagagcatccgcatagtgctgggagtttaggttaccgtgtgaacgaattggaggagaaacctggaagtactggcagcgtgacgagatccaccgaatccttcctcgttagcccatgtgggccaactgggggctgtcaactcggagcagagacgcttgcttcgaagaataaatgcatatcagtgaagcagagaaggagataggcctttgtaggagtgtgtctttcttgtgtgtctcacaaaacagtgggaaaatccagaccagactctaagtgtgaccagctcagcaataatccaggcagtagtttcctttcacgacttaaacgtgcttcaagatgagacgtgcgtaacatgcagagaacgacttgattcagaggaaatcccatgtgttctctctggactcttgcctagctcagaaggcttggagaattgtcttcctaaatcggggcaacctggtacagaacgagaatgtttcgttccctctgggtatgccaggtaaggggctcattgctcccagag

SEQ ID NO: 559447 - DNA, 480 bp, Homo sapiens
  misc_feature (374)..(374): n is a, c, g, or t
  misc_feature (388)..(388): n is a, c, g, or t
  misc_feature (409)..(409): n is a, c, g, or t
  misc_feature (419)..(419): n is a, c, g, or t
gcagaagtgctctgccctcagagagaaacactggtcagactgagaaagctagctcatgggaggcagggtccagagacacacgcctccaacttcaggtggttaacagcttgaaagcaaatgagtggccagagacaggcctgggaggtctctccactcatgttggggcctggggacaaggattccttctttccctgtggttggctcctccccctctgtcccacataccaggacaaagcaggaaccctaggaccctcactcctctccccctgctctacccagggaccccaagcttggtgctcctccttcttttgccttaagagcatccctcaaatgtgcagtctccccatttccagctgtcccctggattattagcnctggatgctagggntttgagagccttgtctccctntctcccatcncccatgcaagcctctctggggaagactggagaagactcaataatagggaggtctgtttgta

SEQ ID NO: 559448 - DNA, 525 bp, Homo sapiens
  misc_feature (9)..(9): n is a, c, g, or t
  misc_feature (74)..(76): n is a, c, g, or t
  misc_feature (86)..(86): n is a, c, g, or t
  misc_feature (94)..(94): n is a, c, g, or t
  misc_feature (99)..(99): n is a, c, g, or t
  misc_feature (101)..(101): n is a, c, g, or t
  misc_feature (106)..(106): n is a, c, g, or t
  misc_feature (116)..(116): n is a, c, g, or t
  misc_feature (125)..(125): n is a, c, g, or t
  misc_feature (139)..(139): n is a, c, g, or t
  misc_feature (154)..(155): n is a, c, g, or t
  misc_feature (157)..(157): n is a, c, g, or t
  misc_feature (159)..(160): n is a, c, g, or t
  misc_feature (235)..(235): n is a, c, g, or t
  misc_feature (237)..(237): n is a, c, g, or t
  misc_feature (240)..(240): n is a, c, g, or t
  misc_feature (258)..(258): n is a, c, g, or t
  misc_feature (261)..(262): n is a, c, g, or t
  misc_feature (269)..(269): n is a, c, g, or t
  misc_feature (272)..(272): n is a, c, g, or t
  misc_feature (275)..(275): n is a, c, g, or t
  misc_feature (278)..(278): n is a, c, g, or t
  misc_feature (281)..(281): n is a, c, g, or t
  misc_feature (285)..(285): n is a, c, g, or t
  misc_feature (307)..(307): n is a, c, g, or t
  misc_feature (313)..(313): n is a, c, g, or t
  misc_feature (320)..(321): n is a, c, g, or t
  misc_feature (332)..(334): n is a, c, g, or t
  misc_feature (349)..(349): n is a, c, g, or t
  misc_feature (352)..(352): n is a, c, g, or t
  misc_feature (360)..(360): n is a, c, g, or t
  misc_feature (364)..(364): n is a, c, g, or t
  misc_feature (371)..(371): n is a, c, g, or t
  misc_feature (385)..(386): n is a, c, g, or t
  misc_feature (408)..(408): n is a, c, g, or t
  misc_feature (413)..(413): n is a, c, g, or t
  misc_feature (434)..(434): n is a, c, g, or t
  misc_feature (438)..(438): n is a, c, g, or t
  misc_feature (441)..(441): n is a, c, g, or t
  misc_feature (443)..(443): n is a, c, g, or t
  misc_feature (522)..(522): n is a, c, g, or t
gagcttgtncattcaatatatgaacatttccagcaatagttacagtctttctagttcctttcacagtatatatnnncgcaaagccngggaaggnaaatntntttcnagctatagantcattttantaagaccttgtggntctttaacattttanngntnnatacaaaaagtatatagatggacagggtccctcctaagtacaggtgtgaacctatataaaaacatggtatatttncngcngtaccttttataattatnatnngacacanatnacnaanacntaanatattccctaaaagtacaaaanattganacacaannccccgcccaannnttcataaagatagangtncttctgtntttnctaaaancttgattacaaaannggacaagagttcatcattttcnaaatnttacagtaggaatcaaatatnatcnaangnggtcctttaagatttttcttgggagaaaaaaaaatcagggcttacacccgcatcttccttttgtagcaatatttaaggnaat

SEQ ID NO: 559449 - DNA, 869 bp, Homo sapiens
aacattaattacaattaacaataattttaggtatggaatgttatagatatacctaaagagatgtctctacgctaatgagctcaagtgatcctcccacctcagcctaccaagtagccaggaccacaggcaagtgcaccaccatgactggctagttttgtaaacaggttttggttttcggttttggtttttttagggtgggtaggttgtatatttacaggcggggtctccctatattgtccaggctagaagaattttctcacgtggctctattacacctcccgtttgggcaagtacacttcagcaatacttacaggtccttcgcgtatctcagtagtttctgcacgcacttacaacagtgtaactttcgcaattagaagatgaagctatacgtcactcaagaatctcaagctgaagggcttgggggagccaaagcagcttctcagagcataggcttgacacttaaatctcagtctcagtcacctgcaggactttaggcaccaagtgatttcaccctttctgagccgtgttcctatatgcgtaaaaagtgattatcatcaattctttccacagcgttcctgaggatcaacgtgaactcgtgctcaactgcctcactaacagtaggtgctccaaatatccactcgcatccctaaactcatgcgccattggcttcacccttgcccttttccaaggcgctggtcttaaagttctacggggacacacgggaacccctggttcatggctccggttacgaacacaccctcgtagctgctactagttcacctgcagcgctactctccctcacctttccctggttacatcaactgcgccacacaccagtagaacccagctttcagcctggacacgcgcaa

SEQ ID NO: 559450 - DNA, 172 bp, Homo sapiens
cctgttaggggcctacgagtatccacagtgcgctccatggcgcgcacctgctccggggaggctgtcagaaataccaggggcctgatgcgctgtccgacaggagtggcagaggtagccccccttgtttaccttcctgttgctataggtgatgggcagcttcttcatggtaagg

SEQ ID NO: 559451 - DNA, 112 bp, Homo sapiens
  misc_feature (8)..(8): n is a, c, g, or t
taattttnttgtttttaaaatgtagttctggcctggtgtggtggctcatgcctgtaatcccagcactctcaaactcctgacctcgggtgatccgcctacctcccaaggtgct

SEQ ID NO: 559452 - DNA, 182 bp, Homo sapiens
tacttggttagctggttaggaccagtaactggattggaaccactatgataatattttgaaccaactgttaatgcttgatgcagaattgtaaagcagcatctggtgcctatatcgccttaaggatcaatttaaatgtatcctcaaggaatttaaatagggattttccgtactatgtagactgc

SEQ ID NO: 559453 - DNA, 299 bp, Homo sapiens
ctatccagcacttccctctgatgttcagactgcctcatgagtagctcactcttgatggagtctgaacatcagagggaagtgctggatagacttcatcaaatgcagaggacaagagacgtttaggagaacggggcatttgtctagcctcttcagcaagtgttgtatttctgatggctctgtaagaggaatgtgatctttgatggctgggatattctcataggttcctctgcctgtccggacaattgtcggggctgagaggttccaggagcaggtagaactgttgctgctccgccgcggcc

SEQ ID NO: 559454 - DNA, 564 bp, Homo sapiens
catcacacgaaagcgtaaagtttagtataaagctcaagaaattttcagatagtgaacacaatagtataagcacgaccagacaaagaaagtaaaaattaattagagtgtatgtgtcgaggaatgtatccatttcttctagattttctagtttatttgcatagaggtgttagtagtattctctgatggtagtttgtatttctgtgggatcggtggtgatatcccctttatcattttttatagtgtctatttgattcttctctctttttttctttattagtcttgctagcggtctatcaattttgttgatcctttcaaaaaaccagctcctggattcattgatttttttgaagggttttttgtgtctctatttccttcagttctgctctgatcttggttctttcttgccttctgctagcttttgaatgtgttggtccttgcttttctagttcttttaatggtgatgtgagggtgtcaattttggatctttcctgctttctcttgtgggcatttagtgctataaatttccctctacacactgctttgaatgcgtccgtccagacggac

SEQ ID NO: 559455 - DNA, 100 bp, Homo sapiens
ggtattctgtgagtgaaattaagaaaaggagttgtaatttgccagatgatacttagctggaaagggacagaggtggacatgcacctgcacaagtacctga

SEQ ID NO: 559456 - DNA, 313 bp, Homo sapiens
  misc_feature (20)..(20): n is a, c, g, or t
  misc_feature (275)..(275): n is a, c, g, or t
tcggccggacttcaggctgnattgcaggcgcatgccatcacactgcggctgtttttgtgtattttggtagaacgggatttcaccatgttggccaggctggtctggaactcctgaccccaagtgatctgcctgcaatcaagcctggaaagggcttgattgcacggcgacatgcgatttctagagatatgtcagtagaagttagaattcgtgaaggatgcataagtgtcagagggaaggttaatgggttgatattgctcagggtggcgcttccaatntaggtgcatgagtaggtggcctgcaatcaagcctggaa

SEQ ID NO: 559457 - DNA, 391 bp, Homo sapiens
  misc_feature (138)..(138): n is a, c, g, or t
  misc_feature (290)..(290): n is a, c, g, or t
gaaggcggtcactctttgcggacctgaaaattctttcctcagcgtggaggttctcatctttgtcctgtggtgggaaaaacatctggttcttggaacactaagaagacctccagatcatgtaggtggttacgtgtaatnaaaaatcctgactattcccaaacgaatatctctatcaacttgacacagagttgtggggaacggcgaagtaaaataaagaaagcattcactaaagaaaaaaaaaaaccacttagatatgcatcgcagaatcgggtttgacataacaaataggngacaaaagacacaagctggtgccccgggattttgggacaccacacaggaaaatggaaatccacgaaacacccctaaaataaaaagggggtgctcggtttca

SEQ ID NO: 559458 - DNA, 266 bp, Homo sapiens
cagcccctttgtgtcccgagtggcacttggctccctggacaggcacgagacagagcctcccccgctcctccgggtctgtcctcgggcccactgcatggtgggatcagacctgtggtttggacaccagccttcactgagggcagccttcgggctgagccctgcccaggcctcaggggtacagaaaccaggccagaggcgtaggtcatagcttgttcctttcttctcaaactcgaagctcctacaaatctcctggcaggaagccacgg

SEQ ID NO: 559459 - DNA, 271 bp, Homo sapiens
atggtggatccaccagcagcttgcacactggacctgaaaaagccacaggcattcaactctgatgtgggttgactttgggtcccaccccctgaagctttaccggggcagtcattcttataatcgcccacggacttacatcctcattactattctggctagcaaacttaaactacgaacgcccttccaggcgcattataatccttttttaaggacttcaaactctacttccactaatagctttttgatgaattctaacaaggcttggttaact

SEQ ID NO: 559460 - DNA, 634 bp, Homo sapiens
cgaaaaatttaaaaaagaaaaaaaaaaaaaaaaaaaaaaaaaataaaaacaaaaaaaaaataaaaaaaaaaatatatatacaaaaataaaaaataaaaaataaaaaaaaaaaaaataaagaaaaaaaaaaataattcaaaaaaaaaaaaaaaaaaaaaaaaaaaaattgttgccctctttctcccatttgtttttaacctggaataagtttacttcctggggacttaatagaggcttttggggctttaccccttttagggggactttataaatgtcctggaccctgatttacaagactagagttcggaaaaaccccgggtttaccatccttaatcctgtcggggtaaatccccttttctccaaattgccaaactttataaacgcccccaacatgctgcctttacaaagcttgttggcgcctcttaagggcacaattgaattggatgggtcttaatttctcataaaattcctgtgtaattattgtggtaaatacacactttttttaccacaaacggccagttccgagaaaatcctgtaacagatgcgatcccctccataactgtactgtgataccaccttctgtttattgggggaaagcaccaatttggctcctctcccgcgtttttggggggcg

SEQ ID NO: 559461 - DNA, 181 bp, Homo sapiens
gcccctcttactgttaattattgtcatataaccacccataatgtccgcttctcactttctgaattattgctctccccatgttgtagcctatgaacccggcgaaccttatttctacaattatgtgtaaagtaaaatcagcgaagttcttaatgagaatctcccacctggttaaaatgtaaaa

SEQ ID NO: 559462 - DNA, 1143 bp, Homo sapiens
ttactaccagacaaccttagccaaaccatttacccaaataaagtataggcgcatcagaacattgaaacctggcgcaacagcatcatagtaccgccaagggaaagcatgcaacaacattatagccaagcaataatatcagcaaggactaaccccatataccttctgcataatgcaattaactagcaaataactttgcaaggcagagccaaagctaagacccccgaaaccagacagagctacctaagaacagctaacaagagcacacccgatctcatgtagcaacaatagtgggaagcatttatcaggtagaggcgaccaaacctaccgcagcctggtgcacagctggcttgtccaagatagcaatcttcagtatcaactttcaacattagcccaacagcaaccctcataaatcacccattgtcacactttacacatgttagatcacaaagagggaacagcatcgtataggacaactaggagacaccacacctttgtacgcagcagcagtaataaacatttacacacccatagataggacctaaaagacagccaccaatacagaaaagcgtacaaggctcaagcacccacatacataaagacaaatcaccaaacatataacatgacacctcatcaccacccagataggaccaatctcatcaccctatagacaagaacgtacacatgcacagcacacacgtacaccaatgcaagagacaacaaacatgccacccgcaaatacaagccacgcacgatacaagaaccaaaccacaggcaaaccagcacaacacagacagccaagaacaacacaagcgagccaacaaaagcacacacccccacggcaagccccaagaccagccactgacactaacgaaagagtacaacaaaacaccagcgacacacagaacaccccacccagacagaagaaacaaaccaactaaccataaaacataaacagcacaatccagagcccgaaggccacagaaacaaaataacaggacaagactcacatacagccagcgagaaaaaaaagaaacaaaaaggcaccatagagaccaacgaagacaggacaacagaaacagacaacccacgcaaagaggacacaaccaagacacaagagcaaagcaccaccacaggatacaacca

SEQ ID NO: 559463 - DNA, 1131 bp, Homo sapiens
  misc_feature (1131)..(1131): n is a, c, g, or t
ggcgccgcccggagccctgagcctgcgcgggccccagctgacccgcccgccatggtgtggactgaggactgacgatgagatgctgctgcctgtgtgagctgctgtgatcacagaagccaacctgacctgggcactgaggagaaggtgagcgtggagaacttctgagctgctcaaggtgcttgggcacggtgagcctacgtgcaaggtgttccttggtgctggaatgtgctggtgctgtgtgcactgactgctggtggaacgcttgtactgccatgaatggtgctgcgcaaggcggcgctggtgcatgtgcgccaagacgcaagagcacacgcgcaccgagcgctcggtgctggagctggtgcgccaggcgcccttcctggtcacgctgcactacgctttccagacggatgccaagctgcacctcatcctggactatgtgagcggcggggagatgttcacccacctctaccagcgccagtacttcaaggaggctgaggtgcgcgtgtatgggggtgagatcgtgctggcccttggaacacctgcacaagctcggcatcatttaccgagacctgaaactggagaatgtgctgctggactccgagggccacattgtcctcacggacttcgggctgagcaaggagttcctgacggagggggaaagagcgggacttctccttctgtggcacaatcgcgtccttggccccgaaatcatccgtaggcagacggggcatggcaggcttgtggactggtgggcctgggcatctggcactcgagctgtgacggggcctcgcccttcaccctgaaggggagacggaaccgcacggcgagggtgaccgagagtctggaagtgtggccccttccctgtttccgcctctgggactggggccgggtcgccgcatgaacttggtgcaccgggaggcgatgtgaaggggccaaaacaaccagtcaggctgcagtgcgcccatggcgcacgagcagtgacgagcacaccactttcacaagggacaacaatgcgggtgcgtccgtacgtacgacgagacataacgacgcagcgacggagccagtacaagcaatcatgacgacgcatataacgaaaaaataatgatgggccggcgtacacctcgtagcagn

SEQ ID NO: 559464 - DNA, 450 bp, Homo sapiens
cacgaggcaggaattccgtcccttccgcgacatcgtgatcgactggcgacagcaggacggcggcgtgcgcatcatggcgctgtccggccgcccgtggcgcgatgcctccggccagatcgccggctaccgcggcagtgcgcgcgatgtcagtcgccaggtcaaggcggaagaggatctgcgcgcactcaatcacgaactggacgagcgcgtgcgcagccgcacctccagcctgcgggccgcattcgaggaactggaaagcttcagctactcggtgtcgcatgacctgcgcggcccgctgcgcgccattcacggcttcgccagcgtgctcgaatcggaaatgacacggcccgacgtgagcggcctcggcaaggcgagtttcgatgcgctgtcgcgcatcctgcgcgccgcgctgcccatggagcatctggtcgacgacctgctcgaactgtc

SEQ ID NO: 559465 - DNA, 104 bp, Homo sapiens
tctagaggatcccgatagtttagccaggctgtggcacgtgcatgtatgtcccagtctacttgtggaggctgagatgggagatgttacttgaacccaggaaatgg

SEQ ID NO: 559466 - DNA, 359 bp, Homo sapiens
cactgtgaggtatatctggggaaaagagcactcttgtttggaagtactaacacccccgctgtgtagaatatatgcgggggacaaacccccaagcgtgccgcggcgtgcaggacaagtgggcccctctctatgtcgactctctcttcggtgacacatacctcccacgccaatattgtgagtgtatgttaaacagggacgttctgtctgtcgaacaccttgggagcaaatggaagaggttcttcgtgggtgggctattattaagagagtagtggcgtttttttcttatcaagtcacttgttggtatcaccaagtggcgatccccaataatcctcccctgcggccccacaatgaacaggcaa

SEQ ID NO: 559467 - DNA, 183 bp, Homo sapiens
ccccgtttcgtgagactcctttgaaattggttagtataagatagcactccaaggcaacctatatatctttgattgataatgagagttttcctttccatttgcttattaactagtaggatttcttctctgtgagtagtcttacatgtttttctcactttaaaattggtataccatactttcatc

SEQ ID NO: 559468 - DNA, 340 bp, Homo sapiens
acctatcaaaacctctgggatacagcaaaggcagtgctaacaggaaagttcatagccttaaatgcctatatcaaaaagtctgaaagagctcaagtggacaatctaaggtcacacctcaaggaactagagaaatgagaacaaaccaaacccaagcccagcagaagaaaagaaataatgaagatcagagcagaactaaatgaaattaaaacaaaaaaatacaaaagataaataaatcacaaagctggttctgtgaaaagataaacaaaattggtagaccattagcaagattaagcaagaaaggaagagagaagatccaaataagctcgattagaaaaaaaaa

SEQ ID NO: 559469 - DNA, 231 bp, Homo sapiens
gaccggcgattatatctgaatatggaacatggttataatcgccggtccgagatctcgtgaccgggcattattcccctagccaaccccttaaacacccttccccatatcaagcccgaatgatatatcctatacggcctacacaatcctccgatccgtccctaacaaactaggaggcgtccttgccgtattactatccatcttcatcctagcaataatcgccggtcacgagat

SEQ ID NO: 559470 - DNA, 509 bp, Homo sapiens
aagatgccctacaagttcccttttagtttgatagtgtttcctgtattcacctagggcaggattctaaaccaattttagatattaggggcctcttgagaatgttgcccttttcttagaaacatgcttggccgggcacagtggctcacacctgtaatcccagcacttgggagggggaggcaggcagatcacttgaggccaggagttcgagaccagcctggccaacatggtgaaagcctgtctctactaaaaatacaaaaagtagctgggtgtggtggcatgtgccaataatcccagctattcagaaggctgaggcaggagagtcacttgaacccgagaggtggaggttgcaatgagccgagatctcaccagtgcactccagcctaggcaacagagcaagactctgaaaaaaaaaagaaagaaagagagagagagaggaagagagagaaagcaagcaagcaagcaagctagctagctcaagcctgggcaacaaagtgagaccccatctgtac

SEQ ID NO: 559471 - DNA, 1170 bp, Homo sapiens
ccacgcgtctgacccactgcgtctggtggctactgctaggaacagagggagagtggggggcatgtgtggggtgaggggagatttttttattttttgttcttgaattgtgcatctcgtcaatgccagcgtctatcttccaatgcgcaatggctagaccaggttggtgaggacgcatgatgtggacttgactagctagtgcaagcgcactattgaaagaaatgacactgggcgggttcccctcacatcaccctctacacctcataagcacgaaatactagcatgacagtcagggtcagcccccgtccctgggccactcgaccatttatcacagagtacagtaccgcgtgcgaaacgttatagagtcatatgacctatacaaactagcgtggtagactcatgctccgagtataaccgtattttacatttctcgtgtattcgtaatctacttagcccagagaaaacagagtctaaaggtatacatttaacaattcactaacacaccctatattatactttaaagactccgcaatcgccatcttgtgggatcgggggaacccctgtggccacaggggttgcgggccaaaccctttttaaatttcctaagagaaaccctgtggggtcatatctacaaaatttacactccacggaaacgttgtatttagggttctccaaagaaccaggggcatttcccccggtacccccgaggtgcagctgccacgcgagggggcccaattgtaagttgtcgggttgaagatgcgtgggcccgaagaggcgtcttgatagcaagcaacaaagaagagttctcccccagtaaagcctcttccccctttcggcaatagggtttctcctctgtaacatatacgtggtgataccttccgtgggttaccatataagttgtatacccccagtcccccaagtttgttgagccaacctcttggatgaagtgttgcttccccgtccattaacaggttacagcgcggttgtgggcaataaggcctaaaattctatggcccgggttcccattggtgagggttattttcgggtagcaattcttcgcgagaaatctcgccactatttgttacctataggggattggcaaaggcgttctagaccgcgtttctccccattctgtggcgcgcctcttagagttggttatctcttacagcatta

SEQ ID NO: 559472 - DNA, 385 bp, Homo sapiens
cctggtcctgagtaatgatggtcacaatttgagtgatatcacttctatgtaattttatcaccatgcaagatgcatccagcacaagaaggtcacacggaatggaacagagaacacggtacacaggcttcctgggatataaaagagaatgactcttccacagtcttagcagtcagttctatgacaccccatctgcaaccttagcaatagaaactcctttataactgtaagttgtccaaccagagcgcatcctccatgggtaatgtctggatttcctggtacttttaaaaaagattcagccacaactttcaaatataattgtgtatcacaaatctgtgttgggacttggacatctgtgtttcaggtcttttttgctgttgtgtctgta

SEQ ID NO: 559473 - DNA, 293 bp, Homo sapiens
  misc_feature (76)..(76): n is a, c, g, or t
  misc_feature (126)..(126): n is a, c, g, or t
ttggggacggatgcgtttcgacgcgtgccccggcaaagaaagaaagaacttcaggatctccatttctgtgtctggnatttgatgacgtcaaagtcaaccaaattctgaagacgctgtcataggtanaagggggtgtggggggcactgatcagccaccctaactgaagatgatgtatgaaggagttggagttgttgaaaccaaggtgtccatgatccctccccactgaccttttctaagaaaattcttgtgcccgcattggtattaaatcctcgcattcagtcttcctggggag

SEQ ID NO: 559474 - DNA, 456 bp, Homo sapiens
gagctgtttcgaacacccagtgagagccaggcccgcgtcgctgtgcagcactctgaggaagtcacctctgaccctcgaagattacaagttcttggcggtgctgtgccgggttcattttgggacgggtgctcctccccgaattccggcccagtggttgcagctgttcgccatcaaggctctgaagtacaggggacattgtggtcccacacgagttggagagcctgatgtgtgatacgcggatattggcggctgtgaccagtgcgggacacccctttctggtgaatctcttcggttgtttccaaacaccggacgcacggtgtgcttcgtgatggagtactcggccggtggggacctgatgctgcacatccacagcgacgtgttctctgagccccgtgccatcttttattccgactgcgtggtgctgggcctacagtttcttcacgaacatcagatcgt

SEQ ID NO: 559475 - DNA, 411 bp, Homo sapiens
  misc_feature (1)..(1): n is a, c, g, or t
  misc_feature (337)..(337): n is a, c, g, or t
  misc_feature (387)..(387): n is a, c, g, or t
  misc_feature (402)..(402): n is a, c, g, or t
nataacagtgctttctgtatatttggcctggcttgatcttccaagtcagtccctaaagtctctctgaagtactgtatgaacagcactttggccccgtgtcggaaagggaaagaaagtagatgagcagtgctaacctgaaaaatcatgagaacaagcaaaggaaactgagaggatcaaaacttggaaagtttctcaataacaatcatttgcctgtgtgatacagctcaccagtggtatgatggtttttccagtgggaaaaaatattttccgaatgtgggcatgtgtccatttgggggacagtgtgggacaagccaaaagctttttaaagatcaggatntttctgtttgtaggtatactgcctaacatacaaagcttagtttctttccngttgggggttgggcnggtaggcct

SEQ ID NO: 559476 - DNA, 139 bp, Homo sapiens
gcaggaatagactgtcactagcattacaagggggtctaaagcatcaagtgcttcaaagccataaaaaatgactacttaattacctgccttatagtgtcaactttataagttaatacaggtttcaatatagtggcattag

SEQ ID NO: 559477 - DNA, 443 bp, Homo sapiens
  misc_feature (8)..(8): n is a, c, g, or t
  misc_feature (109)..(109): n is a, c, g, or t
  misc_feature (130)..(130): n is a, c, g, or t
  misc_feature (145)..(145): n is a, c, g, or t
  misc_feature (167)..(167): n is a, c, g, or t
  misc_feature (202)..(202): n is a, c, g, or t
  misc_feature (233)..(233): n is a, c, g, or t
  misc_feature (276)..(276): n is a, c, g, or t
  misc_feature (324)..(324): n is a, c, g, or t
  misc_feature (386)..(386): n is a, c, g, or t
  misc_feature (400)..(400): n is a, c, g, or t
  misc_feature (408)..(408): n is a, c, g, or t
  misc_feature (426)..(426): n is a, c, g, or t
actttatncttatttcttatcctatattctgtgttacagaaaaaactactaccataaacaaagcaccaaccagccacagcagttgtgtcaagcatgacaattggtctantcttcacattttattagtaantctatcaagtaaganatgaagggtctagaaaaactanacacaaagcaaccagggtccaaatcaccaaggtanatctgtgcttagctaaagggaaacaccgaanatcatattggatacagactatgggaacatcttattgaaagaanctttgatttgcctgttctcaatggctgaactgggcgccaattgttcancatcattcttccggttcacccccccattgaaattaaatttacggaatttcaacacctgctcnctgctggcgctgantggttccntgaacacaatccaagtcncaccttccaaaaaaaga

SEQ ID NO: 559478 - DNA, 273 bp, Homo sapiens
gtccgacgtagctctaggtgtccacctccacactaatgcacaggagaccctacggtatcgttgttacatctgacgaatatgatctcacacgtacgagaatgccacttatgttaaccgttatcttgatatatgacagatgcttgttatcgggctatcactccgctcctgctggcatgtgaaacagtataaattagaaagaggataggctcttagtgacagagctgtccatatgtcattaggattcagatggtcaagcgaactgttctcagtgac

SEQ ID NO: 559479 - DNA, 1069 bp, Homo sapiens
ccacgcgtcgccacgcgtcgcccacgcgtctgagaatttcaaaacaacaaaagttgtttggcttaacacaaatttcatgtgagggaaaacaaaaaaacctattccaaaataagttggtgtaggtttgtagaagcattcgactgtcacttatctctaacaattcgtaggacctatatacaactgtgtgtggtgtccaggcaaaatgtcgatcctggttatttccctctcaacacacaaacacacacgtcgaaaccctatatacgtgccaaataccaaacggtccttcctatcctaaaaaagcttccacacggcgctacactctggtcgcaaaaagtaacatttctgactcacccatgggcgtcatactcaacttaatcgtcgtctcaggtccataaaatccccaaaataattaacacaacaacaaaaaaccaacaacacacaacaacacaggtcacacaactatctgtgatcaaaaccatgtcgactaatacccatggagcgcccccaaggagtaagcccgtataaatatcgcggtaccatgcgctattagtacaaacttcacaaacccgcgtgcaacatgtttacacactgggctaaaccaaacaactgggatatctacagtgttcccccaatgtgatacaccacaacttatatataaaccacacctctcccgacaccacctacagctttgcccctgataaaaaagcagcaaacacactatcaaacaccacgggtaactttcctcacccttccacaaaacgctcactaattgcgagcaaacacgctcatataacgcggactaccgaacacacgtttcatctgacaaccctactgaaccccacccatgatacacaacacccacaagaaaaaaccacacacaacagcggagaaaaattgtctgagaacaagacaacattagtagaaaaaacacgcggtcccgcatggcacattatcgtgacagtaatagcggcacacgaagagacggatcgactcaaacccacaacaaccgggcacaatctcagccactcaccacccaggcacaacaatcacaactcacacaccacacaaa

SEQ ID NO: 559480 - DNA, 137 bp, Homo sapiens
catgaatacaactttgttctgagagccccttcaagtgtgatcctgatgctgccagagccattcgcggatgttttaccaccacctctgtgaattctgcctgcacagcaccaaacagaccgtgttatttgcggtcccct

SEQ ID NO: 559481 - DNA, 770 bp, Homo sapiens
gtaatccagatgacacccagacggacagtgtatggttcttgcctcagaagagctgaaaacttggaagacagaaccaaattatctccatcttttggtggaatggtgcccagcaaaagcagggagtctgtggcatctgaaggctcaaaccagacaagcggctaccagtccggatatcactccgatgacacagacaccaccgtgtactccagtgaggaagcagaacttttaaagctgatagagattggagtgcaaaccggtagcacagcccagattctccagcctgactcggggaccacactgagctccccaacccactctcaccccgcaacccatcagtattttagttatttggcctctactccagtaaacctgattgggtttgttcactctctgaatgattattagccagacttcaaaattattttatagcccaaattataacatctattgtattatttagacttttaacatatagagctatttctactgatttttgcccttgttctgtcctttttttcaaaaaagaaaatgtgttttttgtttggtaccatagtgtgaaatgctgggaacaatgactataagacatgctatggcacatatatttatagtctgtttatgtagaaacaaatgtaatatattaaagccttatatataatgaactttgtactattcacattttgtatcagtattatgtagcataacaaaggtcataatgctttcagcaattgatgtcattttattaaagaacattgaaaaacttgaaggaaaaa

SEQ ID NO: 559482 - DNA, 1785 bp, Homo sapiens
gtaatccagatgacacccagacggacagtgtatggttcttgcctcagaagagctgaaaacttggaagacagaaccaaattatctccatcttttggtggaatggtgcccagcaaaagcagggagtctgtggcatctgaaggctcaaaccagacaagcggctaccagtccggatatcactccgatgacacagacaccaccgtgtactccagtgaggaagcagaacttttaaagctgatagagattggagtgcaaaccggtagcacagcccagattctccagcctgactcggggaccacactgagctctcctcctgtttaaaaggaagcatccacacccccaactcccggacatcacatgagaggtgctgctcagattttcaagtgttgttctttccaccagcaggaagtagccgcatttgattttcatttcgacaacagaaaaaggacctcggactgcagggagccagtcttctaggcatatcctggaagaggcttgtgacccaagaatgtgtctgtgtcttctcccagtgttgacctgatcctctttttcattcatttaaaaagcatttatcatgccccctgctgcgggtctcaccatgggtttagaacaaagacgttcaagaaatggccccatcctcaaagaagtagcagtacctggggagctgacacttctgtaaaactagaagataaaccaggcaatgtaagtgttcgaggtgttgaagatgggaaggatttgcagggctgagtctatccaagaggctttgtttaggacgtgggtcccaagccaagccttaagtgtggaattcggattgatagaaaggaagactaacgttaccttgctttggagagtactggagcctgcaaatgcattgtgtttgctctggtggaggtgggcatggggtctgttctgaaatgtaaagggttcagacggggtttctggttttagaaggttgcgtgttcttcgagttgggctaaagtagagttcgttgtgctgtttctgactcctaatgagagttccttccagaccgttacgtgtctcctggccaagccccaggaaggaaatgatgcagctctggctccttgtctcccaggctgatcctttattcagaataccacaaagaaaggacattcagctcaaggctccctgccgtgttgaagagttctgactgcacaaaccagcttctggtttcttctggaatgaataccctcatatctgtcctgatgtgatatgtctgagactgaatgcgggaggttcaatgtgaagctgtgtgtggtgtcaaagtttcaggaaggattttacccttttgttcttccccctgtccccaacccactctcaccccgcaacccatcagtattttagttatttggcctctactccagtaaacctgattgggtttgttcactctctgaatgattattagccagacttcaaaattattttatagcccaaattataacatctattgtattatttagacttttaacatatagagctatttctactgatttttgcccttgttctgtcctttttttcaaaaaagaaaatgtgttttttgtttggtaccatagtgtgaaatgctgggaacaatgactataagacatgctatggcacatatatttatagtctgtttatgtagaaacaaatgtaatatattaaagccttatatataatgaactttgtactattcacattttgtatcagtattatgtagcataacaaaggtcataatgctttcagcaattgatgtcattttattaaagaacattgaaaaacttgaaggaaaaa

SEQ ID NO: 559483 - DNA, 200 bp, Homo sapiens
tcgatgccatgtgagcttctcgttcagctcatggctccctttaccgcggctcttggcagctgctggtagaggcaggcctgatgttctggagagccccgcgggcatcatgccacagtttcccggaggcgccatccacagtcttctggtataccgtgattcgcatggacttgtgtctcttagttcttccacgataccaatag

SEQ ID NO: 559484 - DNA, 213 bp, Homo sapiens
aggtctcaaatcaccaaactgtcttcacaacatttcaggttggggcgcactcggagccacaacccaacctccgcagcagtcacatgctcaagcattacacccagtccaacagcgcaactcactcatcactccacattgcatcccaatcacacttgcacccacacggcaaccaagttcacccctcagggcatcaaccagacgccaatacctcat

SEQ ID NO: 559485 - DNA, 231 bp, Homo sapiens
gatttctctttacagaccagatcagacttggacattagtatagtcctagatccttaagttgacctaggagtatagccagaagtttataacatctctataggagatagcccatttatagtgcacgttctaacacaacctatattaaaagtagacattgccttctatttattcagttaaaaatggagaaactcttttttgccaccttatgttatatgaatgttagtaaggtgt

SEQ ID NO: 559486 - DNA, 931 bp, Homo sapiens
gtaatccagatgacacccagacggacagtgtatggttcttgcctcagaagagctgaaaacttggaagacagaaccaaattatctccatcttttggtggaatggtgcccagcaaaagcagggagtctgtggcatctgaaggctcaaaccagacaagcggctaccagtccggatatcactccgatgacacagacaccaccgtgtactccagtgaggaagcagaacttttaaagctgatgctgatcctttattcagaataccacaaagaaaggacattcagctcaaggctccctgccgtgttgaagagttctgactgcacaaaccagcttctggtttcttctggaatgaataccctcatatctgtcctgatgtgatatgtctgagactgaatgcgggaggttcaatgtgaagctgtgtgtggtgtcaaagtttcaggaaggattttacccttttgttcttccccctgtccccaacccactctcaccccgcaacccatcagtattttagttatttggcctctactccagtaaacctgattgggtttgttcactctctgaatgattattagccagacttcaaaattattttatagcccaaattataacatctattgtattatttagacttttaacatatagagctatttctactgatttttgcccttgttctgtcctttttttcaaaaaagaaaatgtgttttttgtttggtaccatagtgtgaaatgctgggaacaatgactataagacatgctatggcacatatatttatagtctgtttatgtagaaacaaatgtaatatattaaagccttatatataatgaactttgtactattcacattttgtatcagtattatgtagcataacaaaggtcataatgctttcagcaattgatgtcattttattaaagaacattgaaaaacttgaaggaaaaa

SEQ ID NO: 559487 - DNA, 883 bp, Homo sapiens
  misc_feature (881)..(881): n is a, c, g, or t
gcgcgtcatgcactaaatatatatagcatataccatctcattctgggaatactagtatatgctcacacctcatatcctccctatatgcctagaaggaataatactatcgctgtcatatagctactctcataaccctcaaacccactccctcttagccaatattgtgcctattgccatactagtctttgccgcctgcgaagacagggtgggcctacgccctagtagtctcaatctccaacacatatggcctagactacgtacataacctaaacctactccaatgctaaaaactaatcgtcccaacaattatatactaccactgacatgacttcccacaacacacacatattggagctcaaacaaccacccacagccttatttatagcttcatccctctattattttgaacccaaatcaacaaaacctattaggatgttcccctaacttttcttcggacccctaaatcccccttcatatactaactactgattcttacccctaacaacatggcagcaacgcacttagtccaagtgaaccactatcagaaaaaactctaccttctctatataatctcctaaaaatctccttaattattccaattcacaggcaccagactagtcgtattatctctcatcgacacaagtattaccactgctataatccacgataggaaccgcaaaatgctgaacaggcaatattctaatttacctgtggccctcctctcttgacaatttcccaaactagcacaaattaatctcccttgcaaaatactccgccacttattgtacactttaaacaacttggccactatcctacacgagccgctatctcgaacagtgatacatccacaacactaatataccgcaaaactcaccccatanct

SEQ ID NO: 559488 - DNA, 376 bp, Homo sapiens
  misc_feature (2)..(2): n is a, c, g, or t
anctgcagctctctctgatgcctggcgcttcatctcgcttctgcctcttagcttcatacagggcgcgagtggaggctcgttgaagaagccggacttccacagcaggaggatgatcagccccagcagcagcagacctgaagccacgggcagcagcaccagccacagatcgatttcggccggtagctcctccagcagctccgagtcaatgtccacagagaaccacgtggtcttgttctccatgttgatggtggggatgctggttcggaggaatagggtagcccagccatttacccggactcggtcaaaagtctctgtaatcctcgatgaaggtgctgttccacactcgtgccttcacagtcacgttggtgacaagggg

SEQ ID NO: 559489 - DNA, 1347 bp, Homo sapiens
  misc_feature (167)..(167): n is a, c, g, or t
ggccgggagtcgcgtgtgcgcgcaggccgtgagatgtgcgcgttactgagagtcgtcggtcggaatggagcccggccgccgaccggcggccatgagctacgaccgcgccatcaccgctcttctcgtcccgatcgggagcaacctctttccgaaacgttggatgtacngctgctaggtaggcacgtctatagtaagtgggctcgtacccgcgcgtttggttggttccgaggcacacgatgacacttgtgtgttcgtatgtggtgttgggagaaaggaatctcacgttgtgtcaaatctgtcaggatgcaacatgatagcagtagcggtaatcatcttgtgcgtttgggattgatcgaaccgtcatgccattggtcctttgacgacgagccgtcatccgctcggatgctagagggataagctcgattcatactagagggcccgcgggtgcgatgttgccaagtatggcccgacccgggattagacacgctggggagggtaccccgagatcatctggtgcgcaaggttacaatccactcgcgtcctaacaagttccgtcccatgtacttgcatacgccaagccgtttggagtcaccgaactacggaaggccatattcgcggccgtcagggcccgctttttcgtgccaatcgtcgtcgaccccttcctatacggttggcgacgttgtcgggaccttttgagttgtgccacccttcgcttagaggcgttctatctatggccgttgaacccccgtcgtgaggccaactagtaacccagtgaccctggaaagggtgcccaaatgtgcccagtacgtggccggtgggcgtagccataatgtcagggtgcgggtgatagttcgcttggacagagagagaatacttattatctcgatcgaaaagcccagttggaaagaccccgagtagacttcttgacgccatttataagcgtcggtcgaatccaccggtcacttcctgtgggaacggttggagttcccacgtcaggggttggcaaaaacaaccaatttggtaaactttagcttggtcaatttgaaggggggccggaaggaattccaaattggcccgccttccgaaaggaattttttaaagcatttccgttggacagaagaaaaagtttggaagaaacaggtcaattggatgcggtctgtagagagtttggctaccccacgatacaccggtcatttacacatacttttctgcgcacgcgcaaaataatacatataatggggagggagtgccgcgtcaaataaaagatcgatgtcgtctcaggagacaccacgtgtgagagagatcgggctataatcatatggcggtggtgcgagagtggctccacgc

SEQ ID NO: 559490 - DNA, 503 bp, Homo sapiens
gctgcccctctgtaggccaatgacatgctttccctcctgcagcttgttctctgtgacttccctcttatgctcctgtcgctttcttcataaaccagttgggatctccacggtagtgcccttcattcttggtcactgccaaacagcccaaagccatcagggtcctctgcactgctgccatgtctttgccttcaaagaggtcaacagtctggaacatgtcagtcttgatgaccccatagtccccagccgccttcaggacctgaaccacctactccatctgcttaaataccatagagggtgggttctcgggcaccttcaccggcttggagccaatcagggtacaggctgttcaccagcttgctcagaatcacgccattcttcagccagacctggaagcccaagcgcccagtgtctggagcggaccacatcaggtccacagtgcactataatccattccaccagccgctcctccagctcctcgtcatacttcttctcgatattggact

SEQ ID NO: 559491 - DNA, 183 bp, Homo sapiens
cccacggtcaataccttcttatccttattccgaagttttgatttctacagacgcatcacaatggtcctcgagagtcacatgaattatatatctagaacccttccaatactactgtttccgatctggatgtctgagtgttggcgccacttgacattgtcagtgcatgatcattcttttttgcac

SEQ ID NO: 559492 - DNA, 106 bp, Homo sapiens
gagatctaaagcagcgggcatgaggaggcacaggcacctgcgtggatgtgggttgggaacagcactgtgagtcagcaccctggtgtggaagggggcacatgggcac

SEQ ID NO: 559493 - DNA, 105 bp, Homo sapiens
tctgctgaacgtgttacgacaagaacggtgatgggtttgtggatcaggatgagtatattgcggatatgttttcccatgaggagaatgggataacacgttcgcgag

SEQ ID NO: 559494 - DNA, 656 bp, Homo sapiens
agcggccgctcgcgatctagaactaatctggacctctaaatatacttttagttgtgtttaacttgtttaataaataactttttaagttgaaaaaaaaaaaaaaaaaaaaaaaaaaaaaaaaaaaaaaaaaaaaaaaaaaaaaaaaaaaaaaaaaaaaaaaaaaaaaaaaaaaaaaaaaaaacacactacacaaaaaaaataaacacaaatgatgaaaccaacaaagaagaaacaacaacaaaaaaacatcatcgataaagaagaagagccgcagcagacgaccagggacaacatacgacagcagcgccacaccgtgcgacaacaaaccgaccagacacacacacacacccgaggccaccgaccgctggagaaaacgaggcccaccacaccactcccacgggaagagacatatagatgcagcaccgacacgacagcaaacaaagactagctactcagacaacatccatgtagtttggttgctatcaataacaagacacaccctgtcgctgaacagcagtggtgtcaacacccgctgcacacaaaccactcgagccctgctgtccggaactgccatacgcagagtccttagatactaacaaacaaatacaacaaagcagcatacccgtcaaacaggaaccatacacaccacggccccg

SEQ ID NO: 559495 - DNA, 748 bp, Homo sapiens
agcggagtccgtttgtgctagctctgtgccgtgagccggccgaccgctgccggcggccggcccgcagctgcctgcgccgccagcgcgcgcctcgcggtcagcccggctagctcaggtccgcttcccggagccctgcgcctcctccacgctgccccgctgcgctgtccgccggcccatgctggtcccttcgagtacacccgagcgtgtaccggtgacggagaccggcgtacaggattatcatggtcataacaatttgatgactccttacgcctggcttgaagaccccgacagctgaacagactaacggcctctgtggaggcccagaactatgattactgatgccactttcttgagcagtgtcccatccagaggttcactactacacatgacgagaatgactgacactatatgattgatcccaagtatagcttagccatgttcaagaataggaaggatcggtacttgataatttatttacatctagcaggtcagcagaacgcagcgaggtattatatgtacaggattccttagagggtgacggccacacgtgtcctggaccccaacaatactgttctgacgcctggcccccacgtgtgacactcccgagcgtctactggcgtcaagccgaagcctgggtgacctactcctgcctaatgcatcctgcagtgcccagtgcgctcacacactggctgacaatctcccgttccacgaccagttcgcatctcgaccaacgacctcccgcactgtg

SEQ ID NO: 559496 - DNA, 119 bp, Homo sapiens
aacccataaaaccccaaaaagggccagtaaataatcctagggtgggttttaaaaaagggcccaaagggtttggtcaaaaccctggttcccattttcaaaaataaaattctttgtttcca

SEQ ID NO: 559497 - DNA, 946 bp, Homo sapiens
ggagagacctcatagataactccttcaaccggtacacatttaatgaggatgagggggagcttccggagtggttctgtgcaagaggtaaaacgcagacaccggatacgacagttgcctgtcggtaagaaggaggtggagcattaccgtgaaacgctggcgggatacattcaatgcacgtcccatcaaagaacgcgtggctgaggctaaggctagaaagaaaaggaggatgctgaagaggctggatgcagtaccacggtaccgaaggcatgaacgccgtgagtgaacacaagtgcgacactctcagaacgagatgaaagtggcacagctgcgaagtctctacaacgaaggctgggcttgagcaaggagaaactggccatgtcacctacgttgtagccaaataaggtgtgggccgcaagagtgcgccggccacgcttggaacgtcagaggtcatttcaaggtgcgtggactcaaggactgaagacggaccaatagagcacagccacgtacaggaacaaacagcaatagaaactgcaaacgggaagtaagctagagctgccagagcgtcccaggagagcatggtggactaggaccgacagggctgtggcatggctcacgtctgggtcccctttgatttcccggccctagacacttggtcacagtcaccgctgtcttgcataacagtcgaggtggagtgtctattactcccgagtctggtcctgatcggacaggatggtgtcctttctgcctgccttataggtctccctatgaacacactgctgaactgggtttgacactcatgaccctttttgtaaaccgtaaaagcgaacgtccgggttaggagcgatactcaatgtagtaagtcctacactggacgctgtgggccactttacggcctccacacccccatctattctgaataaaccaggatatggacaccaacaaaaag

SEQ ID NO: 559498 - DNA, 361 bp, Homo sapiens
catataaatcctgtatgtaaggatcaattaatacagatgcaaaaaaactttatagagatgtcaaaacaaaactataatggatctcctatttttctttaaatacaaaaaaaacaaaggtaaatgaactattctccttgtaaaagctaaaaattccccattctgtctcatacaggaagactgacacacaacggttttacaacgaacataaatggaaagatacaattgctttagaaggacataaacgacaatggctcaaaccagggtccatccatttaaagaaaaagtgggacaaaataatcagaattgctccctctttaataaaaaattggggtcctgataatatccacatggaagtagaagg

SEQ ID NO: 559499 - DNA, 605 bp, Homo sapiens
ggcttctaaattatagtcaaaagagttctggaaaagaactgtttacatgctggaggaggaagtcatcttttgaggcttctgttcctctctttatcctgtgtgtattgactagttttcgttcattacttgattaagatatctacaaaagcaggagcacttccaaaagttctctattttgtcctaagcaagaagatgaacagcagggaatggctatctaaatgatgagtattagtttccctgtctcttgtaaaaatgcccatttgcctttataaaaaaaagtgacgagacatactatatacatagtgtactataaagttgcattagaagctataagtactacagttcaataagacttaactttagctgacacatgtggccctgtagccagtgcctgtagagatgcacgagcacgctaccaggcgctctgtagaagcgcctccgttgtcagctttataactcgctcgatgaagcaacgaacgtagtccgtgagcttctatagtatcgagttcactatgctttgccgtggtgtggtcttatcaatgcaggactggatttcatatcagcaatgtagttgctattaagtgccttgggttcttctctggtca

SEQ ID NO: 559500 - DNA, 1015 bp, Homo sapiens
  misc_feature (180)..(180): n is a, c, g, or t
  misc_feature (182)..(182): n is a, c, g, or t
  misc_feature (310)..(310): n is a, c, g, or t
  misc_feature (369)..(369): n is a, c, g, or t
tctgatatcctgataataactctgttttctgctatgacagagggtggtgaaggcagatattgtaaactacaaccaggaacctatgtcaaggactgttaaccctcctagaagctctatgtgtgcagttcactgaactgcacacatagagcttcaaggactgttaaccctcctagaagctcnangtgtgcagttcagtgagcgcatttttcttttgtgttgatagttctggctgcccttcacctctgggtgggcccgaggacttctaggaacttgtttatcagtgaccatctctgtagttcagttaacactntactcccaacttgcttcatcattgctattgcctcacagtggcaggcagctccttggatntgaaagaattcaactttgggaccacacactttgaattcaaaatggaaaacccattccctggaattagactgcttcattgcaaaagaatgatgttgtttctttgtatgtccttgcttcttttttcattgatgtaaatttttttaacttaatatgaaaactctccaagtcttgatcatcagccaggattttgccacagcaatttcattctcttatcggaacttgtatgtgtcaaagtatacttcagagtgcaaacattaagcaagtaatatattttacctacagatacttatgaagacattctttcgctatcgtgagtaaaagtatataaagctgtttctgaagtcgaagaatgcttagaaataagcctgtaggagtatgaaatattatttgtgcatgtgtctggtaaataagagggcctaaattgttctatatatgtagtttgtaacatcacgaaagtgaatatttcgagtacttgtattcctttattactgtatcgtagtcgttatgtattgtgtaatactcaggttgtgcaggctttctgaattctgataaatgttcagctgatgctccacgtggaatttcatcttgcaaactgcataagagtactttcccgagaatgatacaccacagtgtggatcaggatcct

SEQ ID NO: 559501 - DNA, 1170 bp, Homo sapiens
  misc_feature (715)..(715): n is a, c, g, or t
  misc_feature (720)..(720): n is a, c, g, or t
agcgggcgagaactctgtctttgggccgtaggttagagtggggaccgatgtgtcagtccacccaagggtctccatcgcgatcgcctggagagtgcacttcgggatacttgtgtagctagttgacggagatatgaaatagccactgtaaccagagaccaagaaggtggcacgacgtccaggttaatataagaaaccactatttcgagggtgtagttgaatgcaccggatgggacttggagtctatgctattggatggaggtgctccgggtctgaagagaataagttagtaggagataatcgttagcagaagacgagtctaaaggcatcaagagttctccaatgttgcgatataggtgcaagatcatctctgaaaagtagtccttagaaaaagctcagttgacgggtaataggctagtattggaatcgatgagattggatcctctcattgtatctagctgctaagaaagaaggatgagcgactttgcagagccacgcatagtgcttcagacgagacgtcatgacatcggtgtgatatgggggcctaagttgcaaaatatcgtgcatgtaacatactatcctattctgggggtgttgtaagccacaagagaaacgaagaagaatcatagtctctacattcaactgctcatctgtagttgcgctgggggacgaataggactgtggggcggcccaagaattttgagacctccgtgtaaangctcntcgacaaagaagattccatccctttggtgtcccgctgcacatcggtctaaagagaccgctgggaactaaccaaaagatgatcctctctagacagcgccagtaacccaaattctaacttcattccaagatttttaagcgggggtcctcgaatcgatagacactcaatttctctagaaaacctcttcccctttgacagtccaaaccattttgtcattggggcacttcccatttggacgttaaagctctcaaatgtcaagaaacatatcttgtgcgagggcacctccattttccccatcggggataggaaaacgcgaaagaagtggcctagggtgaattcctatccgcaatttgtcacccaaggaagtgccaagaaaggaatgcgaagctatttaccgagataaattcggtttaaggacatggtttccccattttggagaaagccgaaacttg

SEQ ID NO: 559502 - DNA, 342 bp, Homo sapiens
tgacaaatggtgttctcactttcattcagcccaaaaggtttcttaatttcccgtgtgactttttcttgagcgggggttatatagaagtatgctgtttaatttctaaatatttgggaatttctcaaatatttttttgttactgatgtctacattaatttcattgtggtcagaggacatattctgtatgatttcagttatttgacatttattgagactggttttttgtcccatcatatagtgaatctgggtgtatgttccatgtacacttgaaaagaatgtatattctgctgtggttgtttggaatgtcctctaaatgcccccaatattttggatggcacttta

SEQ ID NO: 559503 - DNA, 1306 bp, Homo sapiens
  misc_feature (12)..(12): n is a, c, g, or t
  misc_feature (26)..(27): n is a, c, g, or t
  misc_feature (29)..(29): n is a, c, g, or t
  misc_feature (31)..(31): n is a, c, g, or t
  misc_feature (66)..(66): n is a, c, g, or t
  misc_feature (69)..(69): n is a, c, g, or t
aggaaactctangagccccccccaannantnactgtagtgtcccccctaaccggagctacttcaanggnaaactagctcatctgtagagactgatttgccaaccttccgggaagcccatagctctgcatggtccttagtggtgcaatggctagtataagcgtgcgttcgagtacccccaggctctccctacacatgtaagcagtggatcgaatgctagtcgaaggagaaatggactccatgatgtcgatttgaacactttcatatcagaagaaatggcactccacttggacaatggtggaactagaaagcgtacctcagcccagtgtggcgatgtcattacagactcaccaacccataaacgcaacagaatgatctaaactgcaaacattttcacacccaccatgctgcttgaaagccacttgatcctcaacatatactataattgcaaaggaaacatgaggccatcttcccttgttcactgtttaagacaagtgaattctatagtggttgccataaaaggaagttctaggtatttatagtagatgcctcttgtaattatggctttcttaaaactataatcctagcagaggacatcagatattgtgtagtcgttagcaagatcatcataggcaaacatatatccgttccaaggctaaaagtgaccttaactgtatttattctcaaagggaaaggaaatatcagatgtttatttggttatagaatgctttttttttttggggtccatttcctgctgtgttgagtattttgcttcaacagtattgccaggttcctaaaattgtctaaaaacatgatttggcttccatttttgcagctgcactgtaccatgcacctggtttctatatagtaacagtgtgcaattctaattattggactgtgccctgtttttagttttcaaatcaatttctaattctggtgattgtgtgatgtaaagaggtgctatgatggtcatgcaattaatactaaatattgaatcaatgcccagagctttattggattcactttgtgtgtgttagtgctctaaagtagcagtattattattaaactgtccccagagtaaccctgtaggcctaaagtactcagttttaagacaaacactacttcccatgcggggtactttccttatggtaaatgtaaccatgtagactgcattcgaggtgacctaaagtaaagaggtcctgaactttgagaatgggctcctttttggttcagtattagtgagagggagagggagatggatggtggggtaggttttctagtctatcattttacatttttcatggagtc

SEQ ID NO: 559504 - DNA, 390 bp, Homo sapiens
agttctgcctgtagacagggtgctactgtagattgtagcgtgaatgtttaccggtgctaatagattgaaaattctcagcctatgacatgacattcttagctgtaacttatctattaaggccttttccacatgcattacatagtcccaattttctcttgctatcagtagacttagcccatagtcttattggaacatgggtggacacggatctgctggctctgccttaacacacacatcgcagcttcaacttttctctttgatgtcctgtttgaaagtaatacttaccgagtcagactctgtgttcatttcatttcagggtcttggctgcctatgggcttaccccaggtggtcaagaccctcaaatgaaatgggttcggccctaagctgtgc

SEQ ID NO: 559505 - DNA, 1432 bp, Homo sapiens
caccggggttgacacgtagtaacttttagtaattggtagttaccaatattgtagatattggtagtattaccagtaaaatatatgtcaaggccagatgatatgtttttccagaataaaacttaattgcttactagtaatcccttataaaggaaataggcagacatgctttgacattgtgacaacatggaaagtaagtgggttgctttcaaaagggttacataattgagcaactctaaaaccttttttcttcttcctaggtcttagtggtgcaatggctagtataagcgtgcgttcgagtacccccaggctctccctacacatgtaagcagtggatcgaatgctagtcgaaggagaaatggactccatgatgtcgatttgaacactttcatatcagaagaaatggcactccacttggacaatggtggaactagaaagcgtacctcagcccagtgtggcgatgtcattacagactcaccaacccataaacgcaacagaatgatctaaactgcaaacattttcacacccaccatgctgcttgaaagccacttgatcctcaacatatactataattgcaaaggaaacatgaggccatcttcccttgttcactgtttaagacaagtgaattctatagtggttgccataaaaggaagttctaggtatttatagtagatgcctcttgtaattatggctttcttaaaactataatcctagcagaggacatcagatattgtgtagtcgttagcaagatcatcataggcaaacatatatccgttccaaggctaaaagtgaccttaactgtatttattctcaaagggaaaggaaatatcagatgtttatttggttatagaatgctttttttttttggggtccatttcctgctgtgttgagtattttgcttcaacagtattgccaggttcctaaaattgtctaaaaacatgatttggcttccatttttgcagctgcactgtaccatgcacctggtttctatatagtaacagtgtgcaattctaattattggactgtgccctgtttttagttttcaaatcaatttctaattctggtgattgtgtgatgtaaagaggtgctatgatggtcatgcaattaatactaaatattgaatcaatgcccagagctttattggattcactttgtgtgtgttagtgctctaaagtagcagtattattattaaactgtccccagagtaaccctgtaggcctaaagtactcagttttaagacaaacactacttcccatgcggggtactttccttatggtaaatgtaaccatgtagactgcattcgaggtgacctaaagtaaagaggtcctgaactttgagaatgggctcctttttggttcagtattagtgagagggagagggagatggatggtggggtaggttttctagtctatcattttacatttttcatggagtc

SEQ ID NO: 559506 - DNA, 370 bp, Homo sapiens
  misc_feature (12)..(12): n is a, c, g, or t
  misc_feature (26)..(27): n is a, c, g, or t
  misc_feature (29)..(29): n is a, c, g, or t
  misc_feature (31)..(31): n is a, c, g, or t
  misc_feature (66)..(66): n is a, c, g, or t
  misc_feature (69)..(69): n is a, c, g, or t
aggaaactctangagccccccccaannantnactgtagtgtcccccctaaccggagctacttcaanggnaaactagctcatctgtagagactgatttgccaaccttccgggaagcccatagctctgcatggtccttagtggtgcaatggctagtataagcgtgcgttcgagtacccccaggctctccctacacatgtaagcagtggatcgaatgctagtcgaaggagaaatggactccatgatgtcgatttgaacactttcatatcagaagaaatggcactccacttggacaatggtggccttccgggaagccatagctctgcatggtcttagtggtgcaatggctagtataagcgtgcgttcgagtacc

SEQ ID NO: 559507 - DNA, 289 bp, Homo sapiens
gcacgagcctggctgcagatgggggtcaccactggacatatgaaggcccacacggtcaggaccattggccaacctcttatcctgagtgtggagcgatgccagtcccccatcaatatccagacagacagtgtgatatttgaccccgatctgcctgctgtacagccccatggatatgaccagcttgggactgagcctttggatctacacaataatggccatacagtgcagctttccctgcccccaaccctgcacctgggtggactgccccgaaaatacacagcagcccaac

SEQ ID NO: 559508 - DNA, 286 bp, Homo sapiens
  misc_feature (20)..(20): n is a, c, g, or t
  misc_feature (127)..(127): n is a, c, g, or t
  misc_feature (151)..(151): n is a, c, g, or t
  misc_feature (179)..(179): n is a, c, g, or t
  misc_feature (190)..(190): n is a, c, g, or t
  misc_feature (196)..(196): n is a, c, g, or t
aactactgctcgtgcgggantggcaatactggcagccgtcgccgccatcgcagcgtgaggttccccccactcatccccgtgcttcacgctggggcagggcgtggacctgtactggaaccgccggggnttgcgccgcctgtcccggctattntggtagtgtgggcacgcatagcctggcngcacaggcgtngcggcntcgggcactgctccgtcttgtagctgcccagcacgaagttgcatcttgccaccgggggtcctcgctcaggatcttctcaattcatgcctg

SEQ ID NO: 559509 - DNA, 207 bp, Homo sapiens
  misc_feature (144)..(144): n is a, c, g, or t
cgccgttcagcgggtaacagagtaacctgtctctaagagagagagagagaaaaaaaggcttgtggtagatgatttgccaaactgcaggctaaagtgaggtcctcttagcacatttcaggtaggcaaggctaagctatgacgttnggtacattaggaatattaaatgcattttctttttttctttttttttttggagacagcatatca

SEQ ID NO: 559510 - DNA, 384 bp, Homo sapiens
acgagatccagaggacggagaacagcctggccaactgagaaccagcagcccatcaatgtcggagcctgagagcggatgggcgatggagcccaatgcggcccccgtggcatctgcgagctgtccccacctgcttcagcaaggtggctcaactgtgcacccccccggggatgcttgccggcaccaagcttggggtgcccagcactgcgcaggccctgccccgctgtcaatcatcgccgtgcggcgacatagagacgaacagataggtacacagaactacgaaacgtgaaataaccgcaagtgagaagacagacagactgagaggaacaagggagaaaggaagacaaaatagaatgagagaaaaagaaatagaacaaagaaaaccga

SEQ ID NO: 559511 - DNA, 300 bp, Homo sapiens
  misc_feature (2)..(2): n is a, c, g, or t
anctgggacggcagaggttgtagtgcgccgagattgaccactgcactccagcctgggcaccgaaagagattccatctcaaaacaaaacaaaacaaaacaaaaaaaaaaaaacaaaatcacataagtactaaaagaaaatatggatgaaattctccattaccttggagtggggcaaacacttttaacagtgcactcaaatctagcagtcagtaaggcagagcagagtgcatcacattgattacataggaaataaaaagaaaaacttgttaacaaaaaagcatcataaacaaagtcacaccg

SEQ ID NO: 559512 - DNA, 311 bp, Homo sapiens
tcacttgatgccgatagttcacaagtgaagagtccaaacatcgaggaaaacatgctgagccaaaacgccttggaaggcgtggctcgtaggggcgatgaacaccaggagacagaatgtccgttgaggccatgcaatccatcgagatggacgaggaaaacagcgccagccagacagtttgcgcttgttacagcttcttctcgtggtcaggatgctgcgtagtctcccaagcggtggaagcagcttggggtgtgagacgccgtcgactaccctgtcccccgtggtacgcacacgccccgtcctggacagtcccg

SEQ ID NO: 559513 - DNA, 276 bp, Homo sapiens
  misc_feature (1)..(1): n is a, c, g, or t
  misc_feature (113)..(113): n is a, c, g, or t
  misc_feature (276)..(276): n is a, c, g, or t
naatggacaaatgatggatggatggcttgctagctggatggataggtggatggatggacagatggcctaatgagtaggtggatggatagatgggtgggtgaatgtgtgtgtgnggtgagtgggtggagtggacagtatggagagaaagaagagaaagaaaagctgagagcaagtggtctacatgtggaacatgttagaactccacagaaagccaaatctagtgtgcacacgccagtgcattctagagccactggtcaaccctgtggttaccgagtn

SEQ ID NO: 559514 - DNA, 204 bp, Homo sapiens
ctcgtaactgtgttaaaagtgtgtggcacctcccttgctctcttgctccctgtctggccctgtgacctgcgctcctctcccttcaccttcaaccatgaataaaatgtttccgtgaggccaccccagacagccaaggcagatgtctggcatccgtgctgccttgtacatgcctacatgaacttgttgagccatgttaaacctatt

SEQ ID NO: 559515 - DNA, 420 bp, Homo sapiens
  misc_feature (72)..(72): n is a, c, g, or t
  misc_feature (80)..(80): n is a, c, g, or t
  misc_feature (127)..(127): n is a, c, g, or t
  misc_feature (150)..(150): n is a, c, g, or t
  misc_feature (185)..(185): n is a, c, g, or t
  misc_feature (249)..(249): n is a, c, g, or t
  misc_feature (262)..(262): n is a, c, g, or t
  misc_feature (271)..(271): n is a, c, g, or t
  misc_feature (282)..(282): n is a, c, g, or t
  misc_feature (371)..(371): n is a, c, g, or t
  misc_feature (417)..(417): n is a, c, g, or t
tggagctgagcggcagatacttgagctcagagtttgagactacctgggaacatggtgaacctcgtctctacnaaaaatanaaaaatatagcggcgtggtgatgcgctgtggtccagctcttcagagntgaggtgggaggatcacgtgagnagtagggagaggttgcagtgagccgagatcgcacnactgcactccgcctgagtgacaaagtagccctgtctcaaaaaaataaaataaaatagtaaatantgaggactttctncctcacctnaggactttctncctatctagtcaaactccctccaactttccttccctgaggcagtcctacagctgccagaagaggagagaagagcaaccaagtctgaganctctcctgacttgcttagccagcagcagaggcccagaaagtcccancgc

SEQ ID NO: 559516 - DNA, 4382 bp, Homo sapiens
  misc_feature (22)..(22): n is a, c, g, or t
  misc_feature (29)..(32): n is a, c, g, or t
  misc_feature (34)..(34): n is a, c, g, or t
  misc_feature (36)..(37): n is a, c, g, or t
  misc_feature (1383)..(1383): n is a, c, g, or t
caaataaggctaggtacgaggnctgggtnnnnantnnggcacgaggcttctggaggaagcagcgcgggcttgaccggcgtcggcccgccgcctccgctgccgcttcgccccaatccggtccctctggcccggcctgacccggtctggcttgttcgggctcagcggccgcgaggccgcagctcccgatggaaatcatattatgtagaatacttgggtgacatctgcctgagagatctccaagaattacagaagacaaaaatactaatgcatttgagaaagcggtagttttggggggagggggaaaaagcaactgctttcctgatctgcaacttggctggatgctaagatgtcagtggacatgaatagccaggggtctgacagcaatgaagaggactatgacccaaattgtgaggaagaggaagaagaagaagaagacgaccctggggacatagaggactattacgtgggagtagccagcgatgtggagcagcagggggctgatgcctttgatcccgaggagtaccagttcacttgcttgacctacaaggaatctgagggtgccctcaatgagcacatgaccagcttagcttctgtcctaaaggtatctcattcagttgctaaacttatattagttaatttccactggcaagtttcagagatattggacagatacaagtccaattctgctcaactgcttgttgaggctcgagttcagcctaatccatcaaaacatgttcccacatcccatccccctcaccactgtgcagtgtgtatgcagtttgtgcgaaaggaaaacctactctctctggcctgtcagcaccagttttgccgcagctgctgggagcagcactgctcagttctcgtcaaggacggcgtgggcgtgggagtctcttgcatggctcaggactgtccactccgtacaccagaggactttgtgtttccattgcttcccaatgaagaattgagagagaaatacaggcgctacctcttcagggactatgtggagagtcattaccagctccagctgtgccctggtgcagactgccccatggttattcgggtacaggagcctagagctcgccgagtacagtgcaatcggtgcaacgaggtcttctggtaagagtgagtgtgagtgctgagcagccctgggctcatgccccatcctccaaagcaccactgctgttgctccatgtgagggcggcactggaagaggcagggtctctgagccaacagaacagctgtgctccaagtggtttcaagtgtcgtcagatgtatcacgcacccacagactgtgccacaatccggaaatggctcacgaagtgtgcagacgactctgaaacagccaactacattagtgctcacactaaagaccctcagcgaccngccacatttaaggaggtgctcctccccagaagtgctcacaccatgagcaactgggcacaggtgccaggagctttgtgtaatttgtcttaaaaccaacctggtggtgtgtgagcctaatggcacccttctgtctcctcatgtcccaagtgcaacatctgcattgagaagaatggaggctgcaatcacatgcaatgctccaaatgtaaacacgacttctgctggatgtgtctaggagattggaagactcatggcagtgaatactatgagtgcagtcgttacaaggagaatcctgacatcgtgaaccagagccaacaagcccaggcgagggaagccctcaagaagtacttattctactttgagaggtgggaaaaccacaataaaagcttgcagctagaggcacagacataccagcggattcacgagaagattcaggagagggtcatgaacaatctggggacatggatcgactggcagtacctacagaatgctgccaagctcttggccaagtgtcgatacaccctgcaatacacctacccatatgcatattacatggagtccggacccaggaagaagctgtttgaataccagcaggctcagctggaggctgagatcgaaaacctctcatggaaagtggagcgtgcagacagctatgacagaggggacttggagaaccagatgcatatagcggagcagcggaggagaaccctgctgaaagatttccatgacacctaagttgggatgtggatgtgccggggtgaggaagatgtggctgcaaggtctcccggctgccatactgcatgctgcaggctctgcctttcatgaccccaggcaacagccagggccccactcctgagagacactggcaacacctcttagttgatttctgttttcttctcttttcactttttgtttctaccagggtagaggccatgttgaactggcctcttttcaggacttttatttccccctggatggttgttgggagggagggaaagtgttttctgaatggctattaatagtattagatcattacaacttatgtaactttcaaaggttgtacaattatacaaaaaaaaaaaaaaaggcaaactataggataacacagagccctttttgaaaataaattggcattggagtgttttaccctctagctgttttacttagaatgtaacatatgctgcctacccacctcaaaatgtctgtactgcaagagggccctgggcctctgctttccatattcacgtttggccagagttgtagtcccaaagaagagcatgggtggcagatggtagggaattgaactggcctgtgcaatgggcatggagcacaaggggtcacagcatgcctcctgccttaccgtggcagtacggagacagtccagaacatggtcttcttgccacggggtgttgttgtctctggtggtgctgcatgtctgtggctcacctttattcttgaaactgaggtttacctggatctggctactgaggctagagcccacagcagaatggggttgggcctgtggccccccaaactagggggtgtgggttcatcacagtgttgccttttgtctcctaaagatagggatctacttttgaagggaattgttcctcccaaataaatttgctttaccttggtcctttcttttgtgccagtattcaagtggtatagctctgagcagggtcacatttggccaaacctgacactgtcttgctgcattctcctttggcaaacatcagggtcagaattcaggatagcccttcctagggcactggactttctggcatgggggctgtgtttgcacaagttattttcatgttacctggagagtgtccagaggctgctctgaggctgaggtgtgttcccccttgcctggttccagctgtcagagggataccatcctagggtctgggaatccaaggccacgagactccttggtttgtggtccgagatcctgtactaaggagggtctggccagaggaacagaccagcttttgcacaatgaagcgcaagggaacaagtggtttgcctggtgtcctacctgtcctgaacctggtcctgtgggccattgaaaagttagatctgtgatctctggggtttttgtggctttgttcaatgcttccactctagggcaggcagagcagtctatactctcccaagcctgcttgacctccaagtagagctgatacagagatctgtgaatattgtgatagaaattctttggtattcatacatttcagctgcaagtcagcaatttcccaggtaccatgtaagctataaaacagtcattcttaaagacagaggatagctgtgactcatgggatcatgaggtccatggctggttgcaggttccctttttccttcctcaggttttgtctcttcctgtgttgtccccagcaagggagagactgtggggtggattgggagaacagattaggagtatagcaaatgaacccagaatggaacagtggggagctaactgtgaatgaggagagtacctgctgcaggacctggaggtcaggtgtgaatgctgtattggcacagggaataaatatcctggcgtctggagccttcacctctccgtcaagtccttcctgtgatactgccatggcacaggatctgagttgcagctctgcaccctaaatcacaccctgggcattgtctgggctgcagggctgccaggttctgtacttgtgtccagctgtggccctggatgctggagctggagggttttctgtgctcagactgtagcctgtagctcttggcctgtgtagagccccctcctgtgccctcagtggctgtcgtttgttaacatcatcaggaagatgggaaaggtcaggcagaatttttctgccctacaaagggtggaagagaaaggacacagtattttcatgaatttaccatatatctttgtttttcttcaacgaaaaagttaattgaggcaatgtcatctgctcaaagttgagtggtttattcacaataaactgtaagtttctgattat

SEQ ID NO: 559517 - DNA, 4217 bp, Homo sapiens
  misc_feature (22)..(22): n is a, c, g, or t
  misc_feature (29)..(32): n is a, c, g, or t
  misc_feature (34)..(34): n is a, c, g, or t
  misc_feature (36)..(37): n is a, c, g, or t
caaataaggctaggtacgaggnctgggtnnnnantnnggcacgaggcttctggaggaagcagcgcgggcttgaccggcgtcggcccgccgcctccgctgccgcttcgccccaatccggtccctctggcccggcctgacccggtctggcttgttcgggctcagcggccgcgaggccgcagctcccgatggaaatcatattatgtagaatacttgggtgacatctgcctgagagatctccaagaattacagattgagtctcgctctgttgcccaggctggagtgcagtggtgcaatctctgctcactgcaacctccgtctcccgagttcaagcagttctcctgcctcagcctcctgagtagctgggattacagaagacaaaaatactaatgcatttgagaaagcggtagttttggggggagggggaaaaagcaactgctttcctgatctgcaacttggctggatgctaagatgtcagtggacatgaatagccaggggtctgacagcaatgaagaggactatgacccaaattgtgaggaagaggaagaagaagaagaagacgaccctggggacatagaggactattacgtgggagtagccagcgatgtggagcagcagggggctgatgcctttgatcccgaggagtaccagttcacttgcttgacctacaaggaatctgagggtgccctcaatgagcacatgaccagcttagcttctgtcctaaaggtatctcattcagttgctaaacttatattagttaatttccactggcaagtttcagagatattggacagatacaagtccaattctgctcaactgcttgttgaggctcgagttcagcctaatccatcaaaacatgttcccacatcccatccccctcaccactgtgcagtgtgtatgcagtttgtgcgaaaggaaaacctactctctctggcctgtcagcaccagttttgccgcagctgctgggagcagcactgctcagttctcgtcaaggacggcgtgggcgtgggagtctcttgcatggctcaggactgtccactccgtacaccagaggactttgtgtttccattgcttcccaatgaagaattgagagagaaatacaggcgctacctcttcagggactatgtggagagtcattaccagctccagctgtgccctggtgcagactgccccatggttattcgggtacaggagcctagagctcgccgagtacagtgcaatcggtgcaacgaggtcttctgtttcaagtgtcgtcagatgtatcacgcacccacagactgtgccacaatccggaaatggctcacgaagtgtgcagacgactctgaaacagccaactacattagtgctcacactaaagactgtcccaagtgcaacatctgcattgagaagaatggaggctgcaatcacatgcaatgctccaaatgtaaacacgacttctgctggatgtgtctaggagattggaagactcatggcagtgaatactatgagtgcagtcgttacaaggagaatcctgacatcgtgaaccagagccaacaagcccaggcgagggaagccctcaagaagtacttattctactttgagaggtgggaaaaccacaataaaagcttgcagctagaggcacagacataccagcggattcacgagaagattcaggagagggtcatgaacaatctggggacatggatcgactggcagtacctacagaatgctgccaagctcttggccaagtgtcgatacaccctgcaatacacctacccatatgcatattacatggagtccggacccaggaagaagctgtttgaataccagcaggctcagctggaggctgagatcgaaaacctctcatggaaagtggagcgtgcagacagctatgacagaggggacttggagaaccagatgcatatagcggagcagcggaggagaaccctgctgaaagatttccatgacacctaagttgggatgtggatgtgccggggtgaggaagatgtggctgcaaggtctcccggctgccatactgcatgctgcaggctctgcctttcatgaccccaggcaacagccagggccccactcctgagagacactggcaacacctcttagttgatttctgttttcttctcttttcactttttgtttctaccagggtagaggccatgttgaactggcctcttttcaggacttttatttccccctggatggttgttgggagggagggaaagtgttttctgaatggctattaatagtattagatcattacaacttatgtaactttcaaaggttgtacaattatacaaaaaaaaaaaaaaaggcaaactataggataacacagagccctttttgaaaataaattggcattggagtgttttaccctctagctgttttacttagaatgtaacatatgctgcctacccacctcaaaatgtctgtactgcaagagggccctgggcctctgctttccatattcacgtttggccagagttgtagtcccaaagaagagcatgggtggcagatggtagggaattgaactggcctgtgcaatgggcatggagcacaaggggtcacagcatgcctcctgccttaccgtggcagtacggagacagtccagaacatggtcttcttgccacggggtgttgttgtctctggtggtgctgcatgtctgtggctcacctttattcttgaaactgaggtttacctggatctggctactgaggctagagcccacagcagaatggggttgggcctgtggccccccaaactagggggtgtgggttcatcacagtgttgccttttgtctcctaaagatagggatctacttttgaagggaattgttcctcccaaataaatttgctttaccttggtcctttcttttgtgccagtattcaagtggtatagctctgagcagggtcacatttggccaaacctgacactgtcttgctgcattctcctttggcaaacatcagggtcagaattcaggatagcccttcctagggcactggactttctggcatgggggctgtgtttgcacaagttattttcatgttacctggagagtgtccagaggctgctctgaggctgaggtgtgttcccccttgcctggttccagctgtcagagggataccatcctagggtctgggaatccaaggccacgagactccttggtttgtggtccgagatcctgtactaaggagggtctggccagaggaacagaccagcttttgcacaatgaagcgcaagggaacaagtggtttgcctggtgtcctacctgtcctgaacctggtcctgtgggccattgaaaagttagatctgtgatctctggggtttttgtggctttgttcaatgcttccactctagggcaggcagagcagtctatactctcccaagcctgcttgacctccaagtagagctgatacagagatctgtgaatattgtgatagaaattctttggtattcatacatttcagctgcaagtcagcaatttcccaggtaccatgtaagctataaaacagtcattcttaaagacagaggatagctgtgactcatgggatcatgaggtccatggctggttgcaggttccctttttccttcctcaggttttgtctcttcctgtgttgtccccagcaagggagagactgtggggtggattgggagaacagattaggagtatagcaaatgaacccagaatggaacagtggggagctaactgtgaatgaggagagtacctgctgcaggacctggaggtcaggtgtgaatgctgtattggcacagggaataaatatcctggcgtctggagccttcacctctccgtcaagtccttcctgtgatactgccatggcacaggatctgagttgcagctctgcaccctaaatcacaccctgggcattgtctgggctgcagggctgccaggttctgtacttgtgtccagctgtggccctggatgctggagctggagggttttctgtgctcagactgtagcctgtagctcttggcctgtgtagagccccctcctgtgccctcagtggctgtcgtttgttaacatcatcaggaagatgggaaaggtcaggcagaatttttctgccctacaaagggtggaagagaaaggacacagtattttcatgaatttaccatatatctttgtttttcttcaacgaaaaagttaattgaggcaatgtcatctgctcaaagttgagtggtttattcacaataaactgtaagtttctgattat

SEQ ID NO: 559518 - DNA, 151 bp, Homo sapiens
tgtcctcgacggacagaacgacgcgaaggcgcagcccgatcccgaccgccgcgaggacctcgccatggcgtggcagatcggcggcctgttcgccggcgtcgtcagcggcgtcgtctcgtggctcatcgggcagatctacgacaacatctgc

SEQ ID NO: 559519 - DNA, 4144 bp, Homo sapiens
  misc_feature (22)..(22): n is a, c, g, or t
  misc_feature (29)..(32): n is a, c, g, or t
  misc_feature (34)..(34): n is a, c, g, or t
  misc_feature (36)..(37): n is a, c, g, or t
caaataaggctaggtacgaggnctgggtnnnnantnnggcacgaggcttctggaggaagcagcgcgggcttgaccggcgtcggcccgccgcctccgctgccgcttcgccccaatccggtccctctggcccggcctgacccggtctggcttgttcgggctcagcggccgcgaggccgcagctcccgatggaaatcatattatgtagaatacttgggtgacatctgcctgagagatctccaagaattacagaagacaaaaatactaatgcatttgagaaagcggtagttttggggggagggggaaaaagcaactgctttcctgatctgcaacttggctggatgctaagatgtcagtggacatgaatagccaggggtctgacagcaatgaagaggactatgacccaaattgtgaggaagaggaagaagaagaagaagacgaccctggggacatagaggactattacgtgggagtagccagcgatgtggagcagcagggggctgatgcctttgatcccgaggagtaccagttcacttgcttgacctacaaggaatctgagggtgccctcaatgagcacatgaccagcttagcttctgtcctaaaggtggccgttgatgctcactgccatcagctgcatcctccctatggcactggtatctcattcagttgctaaacttatattagttaatttccactggcaagtttcagagatattggacagatacaagtccaattctgctcaactgcttgttgaggctcgagttcagcctaatccatcaaaacatgttcccacatcccatccccctcaccactgtgcagtgtgtatgcagtttgtgcgaaaggaaaacctactctctctggcctgtcagcaccagttttgccgcagctgctgggagcagcactgctcagttctcgtcaaggacggcgtgggcgtgggagtctcttgcatggctcaggactgtccactccgtacaccagaggactttgtgtttccattgcttcccaatgaagaattgagagagaaatacaggcgctacctcttcagggactatgtggagagtcattaccagctccagctgtgccctggtgcagactgccccatggttattcgggtacaggagcctagagctcgccgagtacagtgcaatcggtgcaacgaggtcttctgtttcaagtgtcgtcagatgtatcacgcacccacagactgtgccacaatccggaaatggctcacgaagtgtgcagacgactctgaaacagccaactacattagtgctcacactaaagactgtcccaagtgcaacatctgcattgagaagaatggaggctgcaatcacatgcaatgctccaaatgtaaacacgacttctgctggatgtgtctaggagattggaagactcatggcagtgaatactatgagtgcagtcgttacaaggagaatcctgacatcgtgaaccagagccaacaagcccaggcgagggaagccctcaagaagtacttattctactttgagaggtgggaaaaccacaataaaagcttgcagctagaggcacagacataccagcggattcacgagaagattcaggagagggtcatgaacaatctggggacatggatcgactggcagtacctacagaatgctgccaagctcttggccaagtgtcgatacaccctgcaatacacctacccatatgcatattacatggagtccggacccaggaagaagctgtttgaataccagcaggctcagctggaggctgagatcgaaaacctctcatggaaagtggagcgtgcagacagctatgacagaggggacttggagaaccagatgcatatagcggagcagcggaggagaaccctgctgaaagatttccatgacacctaagttgggatgtggatgtgccggggtgaggaagatgtggctgcaaggtctcccggctgccatactgcatgctgcaggctctgcctttcatgaccccaggcaacagccagggccccactcctgagagacactggcaacacctcttagttgatttctgttttcttctcttttcactttttgtttctaccagggtagaggccatgttgaactggcctcttttcaggacttttatttccccctggatggttgttgggagggagggaaagtgttttctgaatggctattaatagtattagatcattacaacttatgtaactttcaaaggttgtacaattatacaaaaaaaaaaaaaaaggcaaactataggataacacagagccctttttgaaaataaattggcattggagtgttttaccctctagctgttttacttagaatgtaacatatgctgcctacccacctcaaaatgtctgtactgcaagagggccctgggcctctgctttccatattcacgtttggccagagttgtagtcccaaagaagagcatgggtggcagatggtagggaattgaactggcctgtgcaatgggcatggagcacaaggggtcacagcatgcctcctgccttaccgtggcagtacggagacagtccagaacatggtcttcttgccacggggtgttgttgtctctggtggtgctgcatgtctgtggctcacctttattcttgaaactgaggtttacctggatctggctactgaggctagagcccacagcagaatggggttgggcctgtggccccccaaactagggggtgtgggttcatcacagtgttgccttttgtctcctaaagatagggatctacttttgaagggaattgttcctcccaaataaatttgctttaccttggtcctttcttttgtgccagtattcaagtggtatagctctgagcagggtcacatttggccaaacctgacactgtcttgctgcattctcctttggcaaacatcagggtcagaattcaggatagcccttcctagggcactggactttctggcatgggggctgtgtttgcacaagttattttcatgttacctggagagtgtccagaggctgctctgaggctgaggtgtgttcccccttgcctggttccagctgtcagagggataccatcctagggtctgggaatccaaggccacgagactccttggtttgtggtccgagatcctgtactaaggagggtctggccagaggaacagaccagcttttgcacaatgaagcgcaagggaacaagtggtttgcctggtgtcctacctgtcctgaacctggtcctgtgggccattgaaaagttagatctgtgatctctggggtttttgtggctttgttcaatgcttccactctagggcaggcagagcagtctatactctcccaagcctgcttgacctccaagtagagctgatacagagatctgtgaatattgtgatagaaattctttggtattcatacatttcagctgcaagtcagcaatttcccaggtaccatgtaagctataaaacagtcattcttaaagacagaggatagctgtgactcatgggatcatgaggtccatggctggttgcaggttccctttttccttcctcaggttttgtctcttcctgtgttgtccccagcaagggagagactgtggggtggattgggagaacagattaggagtatagcaaatgaacccagaatggaacagtggggagctaactgtgaatgaggagagtacctgctgcaggacctggaggtcaggtgtgaatgctgtattggcacagggaataaatatcctggcgtctggagccttcacctctccgtcaagtccttcctgtgatactgccatggcacaggatctgagttgcagctctgcaccctaaatcacaccctgggcattgtctgggctgcagggctgccaggttctgtacttgtgtccagctgtggccctggatgctggagctggagggttttctgtgctcagactgtagcctgtagctcttggcctgtgtagagccccctcctgtgccctcagtggctgtcgtttgttaacatcatcaggaagatgggaaaggtcaggcagaatttttctgccctacaaagggtggaagagaaaggacacagtattttcatgaatttaccatatatctttgtttttcttcaacgaaaaagttaattgaggcaatgtcatctgctcaaagttgagtggtttattcacaataaactgtaagtttctgattat

SEQ ID NO: 559520 - DNA, 4158 bp, Homo sapiens
  misc_feature (22)..(22): n is a, c, g, or t
  misc_feature (29)..(32): n is a, c, g, or t
  misc_feature (34)..(34): n is a, c, g, or t
  misc_feature (36)..(37): n is a, c, g, or t
caaataaggctaggtacgaggnctgggtnnnnantnnggcacgaggcttctggaggaagcagcgcgggcttgaccggcgtcggcccgccgcctccgctgccgcttcgccccaatccggtccctctggcccggcctgacccggtctggcttgttcgggctcagcggccgcgaggccgcagctcccttacagattgagtctcgctctgttgcccaggctggagtgcagtggtgcaatctctgctcactgcaacctccgtctcccgagttcaagcagttctcctgcctcagcctcctgagtagctgggattacagaagacaaaaatactaatgcatttgagaaagcggtagttttggggggagggggaaaaagcaactgctttcctgatctgcaacttggctggatgctaagatgtcagtggacatgaatagccaggggtctgacagcaatgaagaggactatgacccaaattgtgaggaagaggaagaagaagaagaagacgaccctggggacatagaggactattacgtgggagtagccagcgatgtggagcagcagggggctgatgcctttgatcccgaggagtaccagttcacttgcttgacctacaaggaatctgagggtgccctcaatgagcacatgaccagcttagcttctgtcctaaaggtatctcattcagttgctaaacttatattagttaatttccactggcaagtttcagagatattggacagatacaagtccaattctgctcaactgcttgttgaggctcgagttcagcctaatccatcaaaacatgttcccacatcccatccccctcaccactgtgcagtgtgtatgcagtttgtgcgaaaggaaaacctactctctctggcctgtcagcaccagttttgccgcagctgctgggagcagcactgctcagttctcgtcaaggacggcgtgggcgtgggagtctcttgcatggctcaggactgtccactccgtacaccagaggactttgtgtttccattgcttcccaatgaagaattgagagagaaatacaggcgctacctcttcagggactatgtggagagtcattaccagctccagctgtgccctggtgcagactgccccatggttattcgggtacaggagcctagagctcgccgagtacagtgcaatcggtgcaacgaggtcttctgtttcaagtgtcgtcagatgtatcacgcacccacagactgtgccacaatccggaaatggctcacgaagtgtgcagacgactctgaaacagccaactacattagtgctcacactaaagactgtcccaagtgcaacatctgcattgagaagaatggaggctgcaatcacatgcaatgctccaaatgtaaacacgacttctgctggatgtgtctaggagattggaagactcatggcagtgaatactatgagtgcagtcgttacaaggagaatcctgacatcgtgaaccagagccaacaagcccaggcgagggaagccctcaagaagtacttattctactttgagaggtgggaaaaccacaataaaagcttgcagctagaggcacagacataccagcggattcacgagaagattcaggagagggtcatgaacaatctggggacatggatcgactggcagtacctacagaatgctgccaagctcttggccaagtgtcgatacaccctgcaatacacctacccatatgcatattacatggagtccggacccaggaagaagctgtttgaataccagcaggctcagctggaggctgagatcgaaaacctctcatggaaagtggagcgtgcagacagctatgacagaggggacttggagaaccagatgcatatagcggagcagcggaggagaaccctgctgaaagatttccatgacacctaagttgggatgtggatgtgccggggtgaggaagatgtggctgcaaggtctcccggctgccatactgcatgctgcaggctctgcctttcatgaccccaggcaacagccagggccccactcctgagagacactggcaacacctcttagttgatttctgttttcttctcttttcactttttgtttctaccagggtagaggccatgttgaactggcctcttttcaggacttttatttccccctggatggttgttgggagggagggaaagtgttttctgaatggctattaatagtattagatcattacaacttatgtaactttcaaaggttgtacaattatacaaaaaaaaaaaaaaaggcaaactataggataacacagagccctttttgaaaataaattggcattggagtgttttaccctctagctgttttacttagaatgtaacatatgctgcctacccacctcaaaatgtctgtactgcaagagggccctgggcctctgctttccatattcacgtttggccagagttgtagtcccaaagaagagcatgggtggcagatggtagggaattgaactggcctgtgcaatgggcatggagcacaaggggtcacagcatgcctcctgccttaccgtggcagtacggagacagtccagaacatggtcttcttgccacggggtgttgttgtctctggtggtgctgcatgtctgtggctcacctttattcttgaaactgaggtttacctggatctggctactgaggctagagcccacagcagaatggggttgggcctgtggccccccaaactagggggtgtgggttcatcacagtgttgccttttgtctcctaaagatagggatctacttttgaagggaattgttcctcccaaataaatttgctttaccttggtcctttcttttgtgccagtattcaagtggtatagctctgagcagggtcacatttggccaaacctgacactgtcttgctgcattctcctttggcaaacatcagggtcagaattcaggatagcccttcctagggcactggactttctggcatgggggctgtgtttgcacaagttattttcatgttacctggagagtgtccagaggctgctctgaggctgaggtgtgttcccccttgcctggttccagctgtcagagggataccatcctagggtctgggaatccaaggccacgagactccttggtttgtggtccgagatcctgtactaaggagggtctggccagaggaacagaccagcttttgcacaatgaagcgcaagggaacaagtggtttgcctggtgtcctacctgtcctgaacctggtcctgtgggccattgaaaagttagatctgtgatctctggggtttttgtggctttgttcaatgcttccactctagggcaggcagagcagtctatactctcccaagcctgcttgacctccaagtagagctgatacagagatctgtgaatattgtgatagaaattctttggtattcatacatttcagctgcaagtcagcaatttcccaggtaccatgtaagctataaaacagtcattcttaaagacagaggatagctgtgactcatgggatcatgaggtccatggctggttgcaggttccctttttccttcctcaggttttgtctcttcctgtgttgtccccagcaagggagagactgtggggtggattgggagaacagattaggagtatagcaaatgaacccagaatggaacagtggggagctaactgtgaatgaggagagtacctgctgcaggacctggaggtcaggtgtgaatgctgtattggcacagggaataaatatcctggcgtctggagccttcacctctccgtcaagtccttcctgtgatactgccatggcacaggatctgagttgcagctctgcaccctaaatcacaccctgggcattgtctgggctgcagggctgccaggttctgtacttgtgtccagctgtggccctggatgctggagctggagggttttctgtgctcagactgtagcctgtagctcttggcctgtgtagagccccctcctgtgccctcagtggctgtcgtttgttaacatcatcaggaagatgggaaaggtcaggcagaatttttctgccctacaaagggtggaagagaaaggacacagtattttcatgaatttaccatatatctttgtttttcttcaacgaaaaagttaattgaggcaatgtcatctgctcaaagttgagtggtttattcacaataaactgtaagtttctgattat

SEQ ID NO: 559521 - DNA, 467 bp, Homo sapiens
  misc_feature (43)..(43): n is a, c, g, or t
  misc_feature (58)..(58): n is a, c, g, or t
  misc_feature (139)..(139): n is a, c, g, or t
  misc_feature (276)..(276): n is a, c, g, or t
  misc_feature (301)..(301): n is a, c, g, or t
  misc_feature (449)..(449): n is a, c, g, or t
aggccgggacccattgacagcacgatggtgacggagcaactangtggatgccatcggnagacgctggtggaccccaagcagcccctgcaggcccgcttccgcgcatgttcacgctgcgtgggctcggcggcccaggcancacttgcatggatcagccaggccttcgatgacgattccgccctgctcaagcaccgagctcggcctactgcctgggccagatgcaggatgcccagcgccatccccatgctggtggacgtgctgcaagacacccgtcangacgcccatggtgcgccatgagganggggaggccctggggcaatccggggacccggaaagttctggagatccctgaagcagtattcctccggaccccgtcaatcgaaggtggccgagacctgccagctggccgtgcgcaggcttgggagtggcttgcaagcaagcaacggcgnggaaccggcggcggggaa

SEQ ID NO: 559522 - DNA, 4173 bp, Homo sapiens
  misc_feature (22)..(22): n is a, c, g, or t
  misc_feature (29)..(32): n is a, c, g, or t
  misc_feature (34)..(34): n is a, c, g, or t
  misc_feature (36)..(37): n is a, c, g, or t
caaataaggctaggtacgaggnctgggtnnnnantnnggcacgaggcttctggaggaagcagcgcgggcttgaccggcgtcggcccgccgcctccgctgccgcttcgccccaatccggtccctctggcccggcctgacccggtctggcttgttcgggctcagcggccgcgaggccgcagctcccgatggaaatcatattatgtagaatacttgggtgacatctgcctgagagatctccaagaattacagaagacaaaaatactaatgcatttgagaaagcggtagttttggggggagggggaaaaagcaactgctttcctgatctgcaacttggctggatgctaagatgtcagtggacatgaatagccaggggtctgacagcaatgaagaggactatgacccaaattgtgaggaagaggaagaagaagaagaagacgaccctggggacatagaggactattacgtgggagtagccagcgatgtggagcagcagggggctgatgcctttgatcccgaggagtaccagttcacttgcttgacctacaaggaatctgagggtgccctcaatgagcacatgaccagcttagcttctgtcctaaaggtggccgttgatgctcactgccatcagctgcatcctccctatggcactggtataactaggagtgggattgctgggtcacaatctcattcagttgctaaacttatattagttaatttccactggcaagtttcagagatattggacagatacaagtccaattctgctcaactgcttgttgaggctcgagttcagcctaatccatcaaaacatgttcccacatcccatccccctcaccactgtgcagtgtgtatgcagtttgtgcgaaaggaaaacctactctctctggcctgtcagcaccagttttgccgcagctgctgggagcagcactgctcagttctcgtcaaggacggcgtgggcgtgggagtctcttgcatggctcaggactgtccactccgtacaccagaggactttgtgtttccattgcttcccaatgaagaattgagagagaaatacaggcgctacctcttcagggactatgtggagagtcattaccagctccagctgtgccctggtgcagactgccccatggttattcgggtacaggagcctagagctcgccgagtacagtgcaatcggtgcaacgaggtcttctgtttcaagtgtcgtcagatgtatcacgcacccacagactgtgccacaatccggaaatggctcacgaagtgtgcagacgactctgaaacagccaactacattagtgctcacactaaagactgtcccaagtgcaacatctgcattgagaagaatggaggctgcaatcacatgcaatgctccaaatgtaaacacgacttctgctggatgtgtctaggagattggaagactcatggcagtgaatactatgagtgcagtcgttacaaggagaatcctgacatcgtgaaccagagccaacaagcccaggcgagggaagccctcaagaagtacttattctactttgagaggtgggaaaaccacaataaaagcttgcagctagaggcacagacataccagcggattcacgagaagattcaggagagggtcatgaacaatctggggacatggatcgactggcagtacctacagaatgctgccaagctcttggccaagtgtcgatacaccctgcaatacacctacccatatgcatattacatggagtccggacccaggaagaagctgtttgaataccagcaggctcagctggaggctgagatcgaaaacctctcatggaaagtggagcgtgcagacagctatgacagaggggacttggagaaccagatgcatatagcggagcagcggaggagaaccctgctgaaagatttccatgacacctaagttgggatgtggatgtgccggggtgaggaagatgtggctgcaaggtctcccggctgccatactgcatgctgcaggctctgcctttcatgaccccaggcaacagccagggccccactcctgagagacactggcaacacctcttagttgatttctgttttcttctcttttcactttttgtttctaccagggtagaggccatgttgaactggcctcttttcaggacttttatttccccctggatggttgttgggagggagggaaagtgttttctgaatggctattaatagtattagatcattacaacttatgtaactttcaaaggttgtacaattatacaaaaaaaaaaaaaaaggcaaactataggataacacagagccctttttgaaaataaattggcattggagtgttttaccctctagctgttttacttagaatgtaacatatgctgcctacccacctcaaaatgtctgtactgcaagagggccctgggcctctgctttccatattcacgtttggccagagttgtagtcccaaagaagagcatgggtggcagatggtagggaattgaactggcctgtgcaatgggcatggagcacaaggggtcacagcatgcctcctgccttaccgtggcagtacggagacagtccagaacatggtcttcttgccacggggtgttgttgtctctggtggtgctgcatgtctgtggctcacctttattcttgaaactgaggtttacctggatctggctactgaggctagagcccacagcagaatggggttgggcctgtggccccccaaactagggggtgtgggttcatcacagtgttgccttttgtctcctaaagatagggatctacttttgaagggaattgttcctcccaaataaatttgctttaccttggtcctttcttttgtgccagtattcaagtggtatagctctgagcagggtcacatttggccaaacctgacactgtcttgctgcattctcctttggcaaacatcagggtcagaattcaggatagcccttcctagggcactggactttctggcatgggggctgtgtttgcacaagttattttcatgttacctggagagtgtccagaggctgctctgaggctgaggtgtgttcccccttgcctggttccagctgtcagagggataccatcctagggtctgggaatccaaggccacgagactccttggtttgtggtccgagatcctgtactaaggagggtctggccagaggaacagaccagcttttgcacaatgaagcgcaagggaacaagtggtttgcctggtgtcctacctgtcctgaacctggtcctgtgggccattgaaaagttagatctgtgatctctggggtttttgtggctttgttcaatgcttccactctagggcaggcagagcagtctatactctcccaagcctgcttgacctccaagtagagctgatacagagatctgtgaatattgtgatagaaattctttggtattcatacatttcagctgcaagtcagcaatttcccaggtaccatgtaagctataaaacagtcattcttaaagacagaggatagctgtgactcatgggatcatgaggtccatggctggttgcaggttccctttttccttcctcaggttttgtctcttcctgtgttgtccccagcaagggagagactgtggggtggattgggagaacagattaggagtatagcaaatgaacccagaatggaacagtggggagctaactgtgaatgaggagagtacctgctgcaggacctggaggtcaggtgtgaatgctgtattggcacagggaataaatatcctggcgtctggagccttcacctctccgtcaagtccttcctgtgatactgccatggcacaggatctgagttgcagctctgcaccctaaatcacaccctgggcattgtctgggctgcagggctgccaggttctgtacttgtgtccagctgtggccctggatgctggagctggagggttttctgtgctcagactgtagcctgtagctcttggcctgtgtagagccccctcctgtgccctcagtggctgtcgtttgttaacatcatcaggaagatgggaaaggtcaggcagaatttttctgccctacaaagggtggaagagaaaggacacagtattttcatgaatttaccatatatctttgtttttcttcaacgaaaaagttaattgaggcaatgtcatctgctcaaagttgagtggtttattcacaataaactgtaagtttctgattat

SEQ ID NO: 559523 - DNA, 229 bp, Homo sapiens
ataaaacctgtgtcggatgctttactctttcactgaacagaaactaaaataacctgttatactattagtctctaatacagtcctcgaggtttttgctcatacacttgagtatttgtctaaaacgttgtcctctttgtagcagctaggccctgccaccactgtgcttggctgagttctctaatctgtggtaacctgtagcttctctgtctattctctggctctcttctct

SEQ ID NO: 559524 - DNA, 4124 bp, Homo sapiens
  misc_feature (22)..(22): n is a, c, g, or t
  misc_feature (29)..(32): n is a, c, g, or t
  misc_feature (34)..(34): n is a, c, g, or t
  misc_feature (36)..(37): n is a, c, g, or t
caaataaggctaggtacgaggnctgggtnnnnantnnggcacgaggcttctggaggaagcagcgcgggcttgaccggcgtcggcccgccgcctccgctgccgcttcgccccaatccggtccctctggcccggcctgacccggtctggcttgttcgggctcagcggccgcgaggccgcagctcccgatggaaatcatattatgtagaatacttgggtgacatctgcctgagagatctccaagaattacagaagacaaaaatactaatgcatttgagaaagcggtagttttggggggagggggaaaaagcaactgctttcctgatctgcaacttggctggatgctaagatgtcagtggacatgaatagccaggggtctgacagcaatgaagaggactatgacccaaattgtgaggaagaggaagaagaagaagaagacgaccctggggacatagaggactattacgtgggagtagccagcgatgtggagcagcagggggctgatgcctttgatcccgaggagtaccagttcacttgcttgacctacaaggaatctgagggtgccctcaatgagcacatgaccagcttagcttctgtcctaaaggtataactaggagtgggattgctgggtcacaatctcattcagttgctaaacttatattagttaatttccactggcaagtttcagagatattggacagatacaagtccaattctgctcaactgcttgttgaggctcgagttcagcctaatccatcaaaacatgttcccacatcccatccccctcaccactgtgcagtgtgtatgcagtttgtgcgaaaggaaaacctactctctctggcctgtcagcaccagttttgccgcagctgctgggagcagcactgctcagttctcgtcaaggacggcgtgggcgtgggagtctcttgcatggctcaggactgtccactccgtacaccagaggactttgtgtttccattgcttcccaatgaagaattgagagagaaatacaggcgctacctcttcagggactatgtggagagtcattaccagctccagctgtgccctggtgcagactgccccatggttattcgggtacaggagcctagagctcgccgagtacagtgcaatcggtgcaacgaggtcttctgtttcaagtgtcgtcagatgtatcacgcacccacagactgtgccacaatccggaaatggctcacgaagtgtgcagacgactctgaaacagccaactacattagtgctcacactaaagactgtcccaagtgcaacatctgcattgagaagaatggaggctgcaatcacatgcaatgctccaaatgtaaacacgacttctgctggatgtgtctaggagattggaagactcatggcagtgaatactatgagtgcagtcgttacaaggagaatcctgacatcgtgaaccagagccaacaagcccaggcgagggaagccctcaagaagtacttattctactttgagaggtgggaaaaccacaataaaagcttgcagctagaggcacagacataccagcggattcacgagaagattcaggagagggtcatgaacaatctggggacatggatcgactggcagtacctacagaatgctgccaagctcttggccaagtgtcgatacaccctgcaatacacctacccatatgcatattacatggagtccggacccaggaagaagctgtttgaataccagcaggctcagctggaggctgagatcgaaaacctctcatggaaagtggagcgtgcagacagctatgacagaggggacttggagaaccagatgcatatagcggagcagcggaggagaaccctgctgaaagatttccatgacacctaagttgggatgtggatgtgccggggtgaggaagatgtggctgcaaggtctcccggctgccatactgcatgctgcaggctctgcctttcatgaccccaggcaacagccagggccccactcctgagagacactggcaacacctcttagttgatttctgttttcttctcttttcactttttgtttctaccagggtagaggccatgttgaactggcctcttttcaggacttttatttccccctggatggttgttgggagggagggaaagtgttttctgaatggctattaatagtattagatcattacaacttatgtaactttcaaaggttgtacaattatacaaaaaaaaaaaaaaaggcaaactataggataacacagagccctttttgaaaataaattggcattggagtgttttaccctctagctgttttacttagaatgtaacatatgctgcctacccacctcaaaatgtctgtactgcaagagggccctgggcctctgctttccatattcacgtttggccagagttgtagtcccaaagaagagcatgggtggcagatggtagggaattgaactggcctgtgcaatgggcatggagcacaaggggtcacagcatgcctcctgccttaccgtggcagtacggagacagtccagaacatggtcttcttgccacggggtgttgttgtctctggtggtgctgcatgtctgtggctcacctttattcttgaaactgaggtttacctggatctggctactgaggctagagcccacagcagaatggggttgggcctgtggccccccaaactagggggtgtgggttcatcacagtgttgccttttgtctcctaaagatagggatctacttttgaagggaattgttcctcccaaataaatttgctttaccttggtcctttcttttgtgccagtattcaagtggtatagctctgagcagggtcacatttggccaaacctgacactgtcttgctgcattctcctttggcaaacatcagggtcagaattcaggatagcccttcctagggcactggactttctggcatgggggctgtgtttgcacaagttattttcatgttacctggagagtgtccagaggctgctctgaggctgaggtgtgttcccccttgcctggttccagctgtcagagggataccatcctagggtctgggaatccaaggccacgagactccttggtttgtggtccgagatcctgtactaaggagggtctggccagaggaacagaccagcttttgcacaatgaagcgcaagggaacaagtggtttgcctggtgtcctacctgtcctgaacctggtcctgtgggccattgaaaagttagatctgtgatctctggggtttttgtggctttgttcaatgcttccactctagggcaggcagagcagtctatactctcccaagcctgcttgacctccaagtagagctgatacagagatctgtgaatattgtgatagaaattctttggtattcatacatttcagctgcaagtcagcaatttcccaggtaccatgtaagctataaaacagtcattcttaaagacagaggatagctgtgactcatgggatcatgaggtccatggctggttgcaggttccctttttccttcctcaggttttgtctcttcctgtgttgtccccagcaagggagagactgtggggtggattgggagaacagattaggagtatagcaaatgaacccagaatggaacagtggggagctaactgtgaatgaggagagtacctgctgcaggacctggaggtcaggtgtgaatgctgtattggcacagggaataaatatcctggcgtctggagccttcacctctccgtcaagtccttcctgtgatactgccatggcacaggatctgagttgcagctctgcaccctaaatcacaccctgggcattgtctgggctgcagggctgccaggttctgtacttgtgtccagctgtggccctggatgctggagctggagggttttctgtgctcagactgtagcctgtagctcttggcctgtgtagagccccctcctgtgccctcagtggctgtcgtttgttaacatcatcaggaagatgggaaaggtcaggcagaatttttctgccctacaaagggtggaagagaaaggacacagtattttcatgaatttaccatatatctttgtttttcttcaacgaaaaagttaattgaggcaatgtcatctgctcaaagttgagtggtttattcacaataaactgtaagtttctgattat

SEQ ID NO: 559525 - DNA, 4179 bp, Homo sapiens
  misc_feature (22)..(22): n is a, c, g, or t
  misc_feature (29)..(32): n is a, c, g, or t
  misc_feature (34)..(34): n is a, c, g, or t
  misc_feature (36)..(37): n is a, c, g, or t
  misc_feature (1246)..(1246): n is a, c, g, or t
caaataaggctaggtacgaggnctgggtnnnnantnnggcacgaggcttctggaggaagcagcgcgggcttgaccggcgtcggcccgccgcctccgctgccgcttcgccccaatccggtccctctggcccggcctgacccggtctggcttgttcgggctcagcggccgcgaggccgcagctcccgatggaaatcatattatgtagaatacttgggtgacatctgcctgagagatctccaagaattacagaagacaaaaatactaatgcatttgagaaagcggtagttttggggggagggggaaaaagcaactgctttcctgatctgcaacttggctggatgctaagatgtcagtggacatgaatagccaggggtctgacagcaatgaagaggactatgacccaaattgtgaggaagaggaagaagaagaagaagacgaccctggggacatagaggactattacgtgggagtagccagcgatgtggagcagcagggggctgatgcctttgatcccgaggagtaccagttcacttgcttgacctacaaggaatctgagggtgccctcaatgagcacatgaccagcttagcttctgtcctaaaggtatctcattcagttgctaaacttatattagttaatttccactggcaagtttcagagatattggacagatacaagtccaattctgctcaactgcttgttgaggctcgagttcagcctaatccatcaaaacatgttcccacatcccatccccctcaccactgtgcagtgtgtatgcagtttgtgcgaaaggaaaacctactctctctggcctgtcagcaccagttttgccgcagctgctgggagcagcactgctcagttctcgtcaaggacggcgtgggcgtgggagtctcttgcatggctcaggactgtccactccgtacaccagaggactttgtgtttccattgcttcccaatgaagaattgagagagaaatacaggcgctacctcttcagggactatgtggagagtcattaccagctccagctgtgccctggtgcagactgccccatggttattcgggtacaggagcctagagctcgccgagtacagtgcaatcggtgcaacgaggtcttctgtttcaagtgtcgtcagatgtatcacgcacccacagactgtgccacaatccggaaatggctcacgaagtgtgcagacgactctgaaacagccaactacattagtgctcacactaaagaccctcagcgaccngccacatttaaggaggtgctcctccccagaagtgctcacaccatgagcaactgggcacaggtgccaggagctttgtgtaatttgtcttaaaaccaacctggtggtgtgtgagcctaatggcacccttctgtctcctcatgtcccaagtgcaacatctgcattgagaagaatggaggctgcaatcacatgcaatgctccaaatgtaaacacgacttctgctggatgtgtctaggagattggaagactcatggcagtgaatactatgagtgcagtcgttacaaggagaatcctgacatcgtgaaccagagccaacaagcccaggcgagggaagccctcaagaagtacttattctactttgagaggtgggagagggtcatgaacaatctggggacatggatcgactggcagtacctacagaatgctgccaagctcttggccaagtgtcgatacaccctgcaatacacctacccatatgcatattacatggagtccggacccaggaagaagctgtttgaataccagcaggctcagctggaggctgagatcgaaaacctctcatggaaagtggagcgtgcagacagctatgacagaggggacttggagaaccagatgcatatagcggagcagcggaggagaaccctgctgaaagatttccatgacacctaagttgggatgtggatgtgccggggtgaggaagatgtggctgcaaggtctcccggctgccatactgcatgctgcaggctctgcctttcatgaccccaggcaacagccagggccccactcctgagagacactggcaacacctcttagttgatttctgttttcttctcttttcactttttgtttctaccagggtagaggccatgttgaactggcctcttttcaggacttttatttccccctggatggttgttgggagggagggaaagtgttttctgaatggctattaatagtattagatcattacaacttatgtaactttcaaaggttgtacaattatacaaaaaaaaaaaaaaaggcaaactataggataacacagagccctttttgaaaataaattggcattggagtgttttaccctctagctgttttacttagaatgtaacatatgctgcctacccacctcaaaatgtctgtactgcaagagggccctgggcctctgctttccatattcacgtttggccagagttgtagtcccaaagaagagcatgggtggcagatggtagggaattgaactggcctgtgcaatgggcatggagcacaaggggtcacagcatgcctcctgccttaccgtggcagtacggagacagtccagaacatggtcttcttgccacggggtgttgttgtctctggtggtgctgcatgtctgtggctcacctttattcttgaaactgaggtttacctggatctggctactgaggctagagcccacagcagaatggggttgggcctgtggccccccaaactagggggtgtgggttcatcacagtgttgccttttgtctcctaaagatagggatctacttttgaagggaattgttcctcccaaataaatttgctttaccttggtcctttcttttgtgccagtattcaagtggtatagctctgagcagggtcacatttggccaaacctgacactgtcttgctgcattctcctttggcaaacatcagggtcagaattcaggatagcccttcctagggcactggactttctggcatgggggctgtgtttgcacaagttattttcatgttacctggagagtgtccagaggctgctctgaggctgaggtgtgttcccccttgcctggttccagctgtcagagggataccatcctagggtctgggaatccaaggccacgagactccttggtttgtggtccgagatcctgtactaaggagggtctggccagaggaacagaccagcttttgcacaatgaagcgcaagggaacaagtggtttgcctggtgtcctacctgtcctgaacctggtcctgtgggccattgaaaagttagatctgtgatctctggggtttttgtggctttgttcaatgcttccactctagggcaggcagagcagtctatactctcccaagcctgcttgacctccaagtagagctgatacagagatctgtgaatattgtgatagaaattctttggtattcatacatttcagctgcaagtcagcaatttcccaggtaccatgtaagctataaaacagtcattcttaaagacagaggatagctgtgactcatgggatcatgaggtccatggctggttgcaggttccctttttccttcctcaggttttgtctcttcctgtgttgtccccagcaagggagagactgtggggtggattgggagaacagattaggagtatagcaaatgaacccagaatggaacagtggggagctaactgtgaatgaggagagtacctgctgcaggacctggaggtcaggtgtgaatgctgtattggcacagggaataaatatcctggcgtctggagccttcacctctccgtcaagtccttcctgtgatactgccatggcacaggatctgagttgcagctctgcaccctaaatcacaccctgggcattgtctgggctgcagggctgccaggttctgtacttgtgtccagctgtggccctggatgctggagctggagggttttctgtgctcagactgtagcctgtagctcttggcctgtgtagagccccctcctgtgccctcagtggctgtcgtttgttaacatcatcaggaagatgggaaaggtcaggcagaatttttctgccctacaaagggtggaagagaaaggacacagtattttcatgaatttaccatatatctttgtttttcttcaacgaaaaagttaattgaggcaatgtcatctgctcaaagttgagtggtttattcacaataaactgtaagtttctgattat

SEQ ID NO: 559526 - DNA, 4314 bp, Homo sapiens
  misc_feature (22)..(22): n is a, c, g, or t
  misc_feature (29)..(32): n is a, c, g, or t
  misc_feature (34)..(34): n is a, c, g, or t
  misc_feature (36)..(37): n is a, c, g, or t
caaataaggctaggtacgaggnctgggtnnnnantnnggcacgaggcttctggaggaagcagcgcgggcttgaccggcgtcggcccgccgcctccgctgccgcttcgccccaatccggtccctctggcccggcctgacccggtctggcttgttcgggctcagcggccgcgaggccgcagctcccgatggaaatcatattatgtagaatacttgggtgacatctgcctgagagatctccaagaattacagaagacaaaaatactaatgcatttgagaaagcggtagttttggggggagggggaaaaagcaactgctttcctgatctgcaacttggctggatgctaagatgtcagtggacatgaatagccaggggtctgacagcaatgaagaggactatgacccaaattgtgaggaagaggaagaagaagaagaagacgaccctggggacatagaggactattacgtgggagtagccagcgatgtggagcagcagggggctgatgcctttgatcccgaggagtaccagttcacttgcttgacctacaaggaatctgagggtgccctcaatgagcacatgaccagcttagcttctgtcctaaaggtatctcattcagttgctaaacttatattagttaatttccactggcaagtttcagagatattggacagatacaagtccaattctgctcaactgcttgttgaggctcgagttcagcctaatccatcaaaacatgttcccacatcccatccccctcaccactgtgcagtgtgtatgcagtttgtgcgaaaggaaaacctactctctctggcctgtcagcaccagttttgccgcagctgctgggagcagcactgctcagttctcgtcaaggacggcgtgggcgtgggagtctcttgcatggctcaggactgtccactccgtacaccagaggactttgtgtttccattgcttcccaatgaagaattgagagagaaatacaggcgctacctcttcagggactatgtggagagtcattaccagctccagctgtgccctggtgcagactgccccatggttattcgggtacaggagcctagagctcgccgagtacagtgcaatcggtgcaacgaggtcttctgtttcaagtgtcgtcagatgtatcacgcacccacagactgtgccacaatccggaaatggctcacgaagtgtgcagacgactctgaaacagccaactacattagtgctcacactaaagactgtcccaagtgcaacatctgcattgagaagaatggaggctgcaatcacatgcaatgctccaaatgtaaacacgacttctgctggatgtgtctaggagattggaagactcatggcagtgaatactatgagtgcagtcgttacaaggagaatcctgacatcgtgaaccagagccaacaagcccaggcgagggaagccctcaagaagtacttattctactttgagaggtgggaaaaccacaataaaagcttgcagctagaggcacagacataccagcggattcacgagaagattcaggagagggtcatgaacaatctggggacatggatcgactggcagtacctacagaatgctgccaagctcttggccaagtgtcgatacaccctgcaatacacctacccatatgcatattacatggagtccggacccaggaagaagctgtttgaataccagcaggctcagctggaggctgagatcgaaaacctctcatggaaagtggagcgtgcagacagctatgacagaggggtaagtgcctactgtcctcttggattctatattgcaggtagaggactggcatggtaataggtgacagcgttgttggcttgtgcactggtagctgctgctaagaatgggaagggcagtgtttttgactccttggaggtcctggagggtgtttgtggctttggctactccttgctcccaggcctgggccatgcaagcacacaccttgtttctctgatgcaggacttggagaaccagatgcatatagcggagcagcggaggagaaccctgctgaaagatttccatgacacctaagttgggatgtggatgtgccggggtgaggaagatgtggctgcaaggtctcccggctgccatactgcatgctgcaggctctgcctttcatgaccccaggcaacagccagggccccactcctgagagacactggcaacacctcttagttgatttctgttttcttctcttttcactttttgtttctaccagggtagaggccatgttgaactggcctcttttcaggacttttatttccccctggatggttgttgggagggagggaaagtgttttctgaatggctattaatagtattagatcattacaacttatgtaactttcaaaggttgtacaattatacaaaaaaaaaaaaaaaggcaaactataggataacacagagccctttttgaaaataaattggcattggagtgttttaccctctagctgttttacttagaatgtaacatatgctgcctacccacctcaaaatgtctgtactgcaagagggccctgggcctctgctttccatattcacgtttggccagagttgtagtcccaaagaagagcatgggtggcagatggtagggaattgaactggcctgtgcaatgggcatggagcacaaggggtcacagcatgcctcctgccttaccgtggcagtacggagacagtccagaacatggtcttcttgccacggggtgttgttgtctctggtggtgctgcatgtctgtggctcacctttattcttgaaactgaggtttacctggatctggctactgaggctagagcccacagcagaatggggttgggcctgtggccccccaaactagggggtgtgggttcatcacagtgttgccttttgtctcctaaagatagggatctacttttgaagggaattgttcctcccaaataaatttgctttaccttggtcctttcttttgtgccagtattcaagtggtatagctctgagcagggtcacatttggccaaacctgacactgtcttgctgcattctcctttggcaaacatcagggtcagaattcaggatagcccttcctagggcactggactttctggcatgggggctgtgtttgcacaagttattttcatgttacctggagagtgtccagaggctgctctgaggctgaggtgtgttcccccttgcctggttccagctgtcagagggataccatcctagggtctgggaatccaaggccacgagactccttggtttgtggtccgagatcctgtactaaggagggtctggccagaggaacagaccagcttttgcacaatgaagcgcaagggaacaagtggtttgcctggtgtcctacctgtcctgaacctggtcctgtgggccattgaaaagttagatctgtgatctctggggtttttgtggctttgttcaatgcttccactctagggcaggcagagcagtctatactctcccaagcctgcttgacctccaagtagagctgatacagagatctgtgaatattgtgatagaaattctttggtattcatacatttcagctgcaagtcagcaatttcccaggtaccatgtaagctataaaacagtcattcttaaagacagaggatagctgtgactcatgggatcatgaggtccatggctggttgcaggttccctttttccttcctcaggttttgtctcttcctgtgttgtccccagcaagggagagactgtggggtggattgggagaacagattaggagtatagcaaatgaacccagaatggaacagtggggagctaactgtgaatgaggagagtacctgctgcaggacctggaggtcaggtgtgaatgctgtattggcacagggaataaatatcctggcgtctggagccttcacctctccgtcaagtccttcctgtgatactgccatggcacaggatctgagttgcagctctgcaccctaaatcacaccctgggcattgtctgggctgcagggctgccaggttctgtacttgtgtccagctgtggccctggatgctggagctggagggttttctgtgctcagactgtagcctgtagctcttggcctgtgtagagccccctcctgtgccctcagtggctgtcgtttgttaacatcatcaggaagatgggaaaggtcaggcagaatttttctgccctacaaagggtggaagagaaaggacacagtattttcatgaatttaccatatatctttgtttttcttcaacgaaaaagttaattgaggcaatgtcatctgctcaaagttgagtggtttattcacaataaactgtaagtttctgattat

SEQ ID NO: 559527 - DNA, 3857 bp, Homo sapiens
  misc_feature (22)..(22): n is a, c, g, or t
  misc_feature (29)..(32): n is a, c, g, or t
  misc_feature (34)..(34): n is a, c, g, or t
  misc_feature (36)..(37): n is a, c, g, or t
caaataaggctaggtacgaggnctgggtnnnnantnnggcacgaggcttctggaggaagcagcgcgggcttgaccggcgtcggcccgccgcctccgctgccgcttcgccccaatccggtccctctggcccggcctgacccggtctggcttgttcgggctcagcggccgcgaggccgcagctcccgatggaaatcatattatgtagaatacttgggtgacatctgcctgagagatctccaagaattacagattgagtctcgctctgttgcccaggctggagtgcagtggtgcaatctctgctcactgcaacctccgtctcccgagttcaagcagttctcctgcctcagcctcctgagtagctgggaatctcattcagttgctaaacttatattagttaatttccactggcaagtttcagagatattggacagatacaagtccaattctgctcaactgcttgttgaggctcgagttcagcctaatccatcaaaacatgttcccacatcccatccccctcaccactgtgcagtgtgtatgcagtttgtgcgaaaggaaaacctactctctctggcctgtcagcaccagttttgccgcagctgctgggagcagcactgctcagttctcgtcaaggacggcgtgggcgtgggagtctcttgcatggctcaggactgtccactccgtacaccagaggactttgtgtttccattgcttcccaatgaagaattgagagagaaatacaggcgctacctcttcagggactatgtggagagtcattaccagctccagctgtgccctggtgcagactgccccatggttattcgggtacaggagcctagagctcgccgagtacagtgcaatcggtgcaacgaggtcttctgtttcaagtgtcgtcagatgtatcacgcacccacagactgtgccacaatccggaaatggctcacgaagtgtgcagacgactctgaaacagccaactacattagtgctcacactaaagactgtcccaagtgcaacatctgcattgagaagaatggaggctgcaatcacatgcaatgctccaaatgtaaacacgacttctgctggatgtgtctaggagattggaagactcatggcagtgaatactatgagtgcagtcgttacaaggagaatcctgacatcgtgaaccagagccaacaagcccaggcgagggaagccctcaagaagtacttattctactttgagaggtgggaaaaccacaataaaagcttgcagctagaggcacagacataccagcggattcacgagaagattcaggagagggtcatgaacaatctggggacatggatcgactggcagtacctacagaatgctgccaagctcttggccaagtgtcgatacaccctgcaatacacctacccatatgcatattacatggagtccggacccaggaagaagctgtttgaataccagcaggctcagctggaggctgagatcgaaaacctctcatggaaagtggagcgtgcagacagctatgacagaggggacttggagaaccagatgcatatagcggagcagcggaggagaaccctgctgaaagatttccatgacacctaagttgggatgtggatgtgccggggtgaggaagatgtggctgcaaggtctcccggctgccatactgcatgctgcaggctctgcctttcatgaccccaggcaacagccagggccccactcctgagagacactggcaacacctcttagttgatttctgttttcttctcttttcactttttgtttctaccagggtagaggccatgttgaactggcctcttttcaggacttttatttccccctggatggttgttgggagggagggaaagtgttttctgaatggctattaatagtattagatcattacaacttatgtaactttcaaaggttgtacaattatacaaaaaaaaaaaaaaaggcaaactataggataacacagagccctttttgaaaataaattggcattggagtgttttaccctctagctgttttacttagaatgtaacatatgctgcctacccacctcaaaatgtctgtactgcaagagggccctgggcctctgctttccatattcacgtttggccagagttgtagtcccaaagaagagcatgggtggcagatggtagggaattgaactggcctgtgcaatgggcatggagcacaaggggtcacagcatgcctcctgccttaccgtggcagtacggagacagtccagaacatggtcttcttgccacggggtgttgttgtctctggtggtgctgcatgtctgtggctcacctttattcttgaaactgaggtttacctggatctggctactgaggctagagcccacagcagaatggggttgggcctgtggccccccaaactagggggtgtgggttcatcacagtgttgccttttgtctcctaaagatagggatctacttttgaagggaattgttcctcccaaataaatttgctttaccttggtcctttcttttgtgccagtattcaagtggtatagctctgagcagggtcacatttggccaaacctgacactgtcttgctgcattctcctttggcaaacatcagggtcagaattcaggatagcccttcctagggcactggactttctggcatgggggctgtgtttgcacaagttattttcatgttacctggagagtgtccagaggctgctctgaggctgaggtgtgttcccccttgcctggttccagctgtcagagggataccatcctagggtctgggaatccaaggccacgagactccttggtttgtggtccgagatcctgtactaaggagggtctggccagaggaacagaccagcttttgcacaatgaagcgcaagggaacaagtggtttgcctggtgtcctacctgtcctgaacctggtcctgtgggccattgaaaagttagatctgtgatctctggggtttttgtggctttgttcaatgcttccactctagggcaggcagagcagtctatactctcccaagcctgcttgacctccaagtagagctgatacagagatctgtgaatattgtgatagaaattctttggtattcatacatttcagctgcaagtcagcaatttcccaggtaccatgtaagctataaaacagtcattcttaaagacagaggatagctgtgactcatgggatcatgaggtccatggctggttgcaggttccctttttccttcctcaggttttgtctcttcctgtgttgtccccagcaagggagagactgtggggtggattgggagaacagattaggagtatagcaaatgaacccagaatggaacagtggggagctaactgtgaatgaggagagtacctgctgcaggacctggaggtcaggtgtgaatgctgtattggcacagggaataaatatcctggcgtctggagccttcacctctccgtcaagtccttcctgtgatactgccatggcacaggatctgagttgcagctctgcaccctaaatcacaccctgggcattgtctgggctgcagggctgccaggttctgtacttgtgtccagctgtggccctggatgctggagctggagggttttctgtgctcagactgtagcctgtagctcttggcctgtgtagagccccctcctgtgccctcagtggctgtcgtttgttaacatcatcaggaagatgggaaaggtcaggcagaatttttctgccctacaaagggtggaagagaaaggacacagtattttcatgaatttaccatatatctttgtttttcttcaacgaaaaagttaattgaggcaatgtcatctgctcaaagttgagtggtttattcacaataaactgtaagtttctgattat

SEQ ID NO: 559528 - DNA, 3978 bp, Homo sapiens
  misc_feature (22)..(22): n is a, c, g, or t
  misc_feature (29)..(32): n is a, c, g, or t
  misc_feature (34)..(34): n is a, c, g, or t
  misc_feature (36)..(37): n is a, c, g, or t
caaataaggctaggtacgaggnctgggtnnnnantnnggcacgaggcttctggaggaagcagcgcgggcttgaccggcgtcggcccgccgcctccgctgccgcttcgccccaatccggtccctctggcccggcctgacccggtctggcttgttcgggctcagcggccgcgaggccgcagctcccgatggaaatcatattatgtagaatacttgggtgacatctgcctgagagatctccaagaattacagccaggggtctgacagcaatgaagaggactatgacccaaattgtgaggaagaggaagaagaagaagaagacgaccctggggacatagaggactattacgtgggagtagccagcgatgtggagcagcagggggctgatgcctttgatcccgaggagtaccagttcacttgcttgacctacaaggaatctgagggtgccctcaatgagcacatgaccagcttagcttctgtcctaaaggtatctcattcagttgctaaacttatattagttaatttccactggcaagtttcagagatattggacagatacaagtccaattctgctcaactgcttgttgaggctcgagttcagcctaatccatcaaaacatgttcccacatcccatccccctcaccactgtgcagtgtgtatgcagtttgtgcgaaaggaaaacctactctctctggcctgtcagcaccagttttgccgcagctgctgggagcagcactgctcagttctcgtcaaggacggcgtgggcgtgggagtctcttgcatggctcaggactgtccactccgtacaccagaggactttgtgtttccattgcttcccaatgaagaattgagagagaaatacaggcgctacctcttcagggactatgtggagagtcattaccagctccagctgtgccctggtgcagactgccccatggttattcgggtacaggagcctagagctcgccgagtacagtgcaatcggtgcaacgaggtcttctgtttcaagtgtcgtcagatgtatcacgcacccacagactgtgccacaatccggaaatggctcacgaagtgtgcagacgactctgaaacagccaactacattagtgctcacactaaagactgtcccaagtgcaacatctgcattgagaagaatggaggctgcaatcacatgcaatgctccaaatgtaaacacgacttctgctggatgtgtctaggagattggaagactcatggcagtgaatactatgagtgcagtcgttacaaggagaatcctgacatcgtgaaccagagccaacaagcccaggcgagggaagccctcaagaagtacttattctactttgagaggtgggaaaaccacaataaaagcttgcagctagaggcacagacataccagcggattcacgagaagattcaggagagggtcatgaacaatctggggacatggatcgactggcagtacctacagaatgctgccaagctcttggccaagtgtcgatacaccctgcaatacacctacccatatgcatattacatggagtccggacccaggaagaagctgtttgaataccagcaggctcagctggaggctgagatcgaaaacctctcatggaaagtggagcgtgcagacagctatgacagaggggacttggagaaccagatgcatatagcggagcagcggaggagaaccctgctgaaagatttccatgacacctaagttgggatgtggatgtgccggggtgaggaagatgtggctgcaaggtctcccggctgccatactgcatgctgcaggctctgcctttcatgaccccaggcaacagccagggccccactcctgagagacactggcaacacctcttagttgatttctgttttcttctcttttcactttttgtttctaccagggtagaggccatgttgaactggcctcttttcaggacttttatttccccctggatggttgttgggagggagggaaagtgttttctgaatggctattaatagtattagatcattacaacttatgtaactttcaaaggttgtacaattatacaaaaaaaaaaaaaaaggcaaactataggataacacagagccctttttgaaaataaattggcattggagtgttttaccctctagctgttttacttagaatgtaacatatgctgcctacccacctcaaaatgtctgtactgcaagagggccctgggcctctgctttccatattcacgtttggccagagttgtagtcccaaagaagagcatgggtggcagatggtagggaattgaactggcctgtgcaatgggcatggagcacaaggggtcacagcatgcctcctgccttaccgtggcagtacggagacagtccagaacatggtcttcttgccacggggtgttgttgtctctggtggtgctgcatgtctgtggctcacctttattcttgaaactgaggtttacctggatctggctactgaggctagagcccacagcagaatggggttgggcctgtggccccccaaactagggggtgtgggttcatcacagtgttgccttttgtctcctaaagatagggatctacttttgaagggaattgttcctcccaaataaatttgctttaccttggtcctttcttttgtgccagtattcaagtggtatagctctgagcagggtcacatttggccaaacctgacactgtcttgctgcattctcctttggcaaacatcagggtcagaattcaggatagcccttcctagggcactggactttctggcatgggggctgtgtttgcacaagttattttcatgttacctggagagtgtccagaggctgctctgaggctgaggtgtgttcccccttgcctggttccagctgtcagagggataccatcctagggtctgggaatccaaggccacgagactccttggtttgtggtccgagatcctgtactaaggagggtctggccagaggaacagaccagcttttgcacaatgaagcgcaagggaacaagtggtttgcctggtgtcctacctgtcctgaacctggtcctgtgggccattgaaaagttagatctgtgatctctggggtttttgtggctttgttcaatgcttccactctagggcaggcagagcagtctatactctcccaagcctgcttgacctccaagtagagctgatacagagatctgtgaatattgtgatagaaattctttggtattcatacatttcagctgcaagtcagcaatttcccaggtaccatgtaagctataaaacagtcattcttaaagacagaggatagctgtgactcatgggatcatgaggtccatggctggttgcaggttccctttttccttcctcaggttttgtctcttcctgtgttgtccccagcaagggagagactgtggggtggattgggagaacagattaggagtatagcaaatgaacccagaatggaacagtggggagctaactgtgaatgaggagagtacctgctgcaggacctggaggtcaggtgtgaatgctgtattggcacagggaataaatatcctggcgtctggagccttcacctctccgtcaagtccttcctgtgatactgccatggcacaggatctgagttgcagctctgcaccctaaatcacaccctgggcattgtctgggctgcagggctgccaggttctgtacttgtgtccagctgtggccctggatgctggagctggagggttttctgtgctcagactgtagcctgtagctcttggcctgtgtagagccccctcctgtgccctcagtggctgtcgtttgttaacatcatcaggaagatgggaaaggtcaggcagaatttttctgccctacaaagggtggaagagaaaggacacagtattttcatgaatttaccatatatctttgtttttcttcaacgaaaaagttaattgaggcaatgtcatctgctcaaagttgagtggtttattcacaataaactgtaagtttctgattat

SEQ ID NO: 559529 - DNA, 609 bp, Homo sapiens
gagcgccccggcccgcccggcgcccgccgccgtcgcgatgccctactccaaagccacaagcactgaagctgcgctatcccggccgaggacgagttgcccaacgactgagcgcccataaaaactccatggagcaaggtgctgagccccgaactgtacgcgtgagctgcgcgccgaagagcactcccgagcggcttcacgggtggacgacgttatccatacaggctgtggacaatccgggccacccatcaatcatgatcgattggctgcgtggcgggcgacgcaggcagtcctacagaagtgtcaaacatctcttcgacccatcattcgaggaccggaacggcgggctaaccagacgccaggcatgagcaccaagcaccgaagcgtcaagccccgacaaccatgagggcggagacacaccatgcgaacacaaacctaggatgactggagactcgcgggatggagcgcggggaccggacgcatccggagagaactgccgtacacccacgagacagcaggccgcggaagcgcccgacgccaacgacaagctacgcggagaaaacaccggaacgcaggacgcgaccgcgcggccgatacaagcgcaaaacatac

SEQ ID NO: 559530 - DNA, 306 bp, Homo sapiens
cccgggggggggggtttttttggggggaaaaaattttttttttagggggggggggggcccccctccccttggggggttttaaaaaaaagggaaaccaaatttttttcccccccggggggggtttttccggggttttttttttcccttggggccccccccggggggattttttaaaaaggggggtttgggcccccccccttcccccccccctttttttggggggttttttgttttttttttttcccccccccccccccccctcccccccctttttggggggggaggactttttttttggggggggga

SEQ ID NO: 559531 - DNA, 270 bp, Homo sapiens
ttccagagagcaccgatatcaccttccagtggcgagaaaactgtagtgagtcacgaccctcaacacccaaatcttacatctcaatgcccatcctaacgagagcactcatacttgatgcatccccgcagctacacacacgggacacacagcacacgcatgaacacagcacacacacgagcacagcacacacacgagcatacagcacacacacaaacgcacagcacacacagcacacagatgagcacacagcacacacacaagggcacagca

SEQ ID NO: 559532 - DNA, 465 bp, Homo sapiens
  misc_feature (349)..(349): n is a, c, g, or t
  misc_feature (351)..(351): n is a, c, g, or t
  misc_feature (359)..(360): n is a, c, g, or t
aacagggtggtgttgccgctgcttttgtgggcaagccagagcttggtggccctcatgtggccccccccatcaagggaaagaaggaggaattctggcttggaggcccctggagccaaatggcaaaaaggtgaagctctcctttcctgtgtgtactctgtccagttcctttagaaaaaatggatgcccagaggacttcccaccctgggttggggtcaaaaaacagccagcaaaagttaggggccttagggccctggggtgttgttccattgaaaccgactctggccctggcccttacttgcttttttagctctttaggcctctccagtttggacctgtcccccccctccantnaggtgttnntgcagcaaaccctccccccctcccccttccattttccccccctactgcagcccctccaggcctgttggtatagagcctacctgtatgtcaataaaccacagctga

SEQ ID NO: 559533 - DNA, 281 bp, Homo sapiens
aaaaaaaaacccccggttttaaggccaaaatccggtaatggttttttccggggccggcctcccggcttttaaaaaaaaaggaaaggtaatctttccccccttaaaataaaaaaatcttggccggtgccttttttttaccaaatttggtgggccaaaatggtttatatcctggggttccaaccaaccccggggggtggtcccaaggggctttttttccttttccattttgggtttatccaaaaaagaaaaatttcccataaataacggccttttttttttga

SEQ ID NO: 559534 - DNA, 546 bp, Homo sapiens
tgggatgagatagggtagaggtatataaggtatgagcatggcaatgacagtaggaggttaagtataagagtacaaaaaaaaggagctgcagaaaaggtcaaatcctcctaaatctagtttgtcttaacatcgggacttcttactttaggggaacaaggaaaacattgccatctcatagtttgctgcagggagtatacactaggagaataagggttgccatcttcatcacgtagcaggctgaaaactgtcgagatataaggtgctgagatgtgttagcagtagggtgaaggctttggtcattttctcttttttctttgagcaatttttctttttcatctttcaaatgatctaaatcttgctctagttctactatattttccagttttctttttctgcaattctgagcagccactttattcttacccctcctacgtatatcccgaattaatgcaagttgagcttcattgaactgctctttggacatcatttcgttgaagtcaacaacagggaggttaaccataggaagatatctgggggatcctctag

SEQ ID NO: 559535 - DNA, 109 bp, Homo sapiens
atacacacacaactcatgagacccacaaaaaatagcccttctaaacgctaatccaagcctcaacccactactaggccatccatcctagcacgcaagacaggcaaatcag

SEQ ID NO: 559536 - DNA, 101 bp, Homo sapiens
cacgggccgtcgttgaacacaaacagctataaccatgcatggccggtcgtttacacaaatcagcaataaccagtcatgggcggttcgtttacaccatcaaa

SEQ ID NO: 559537 - DNA, 886 bp, Homo sapiens
ttgttataaatatagccgtcgtgagatataggagtggtggaacggcttgtcggtgactttttatttcaaaatgtctacaaagttttaattctccattatacaggtaatttttcaaaatctagacattattcaaatgtaagccaaagtccttacacaaatagaatacactcaaagatcaaaaatatacatatctttcagcaaactttgttacataaataagaaaaatatatacagctggtgttttcaaagtacaattatcttaacactgcaaacatgtatagaaggaactaaaataaaaagaaacactacagcaaaggttaaaggaacaacaaattcattttacaacatcatcaattataaagatacatatatcaaatcttaggggaatatatacttcacactgggatattgtcttttactcccctttgactattttttgagaatctctctgtggatatgtgataattcattcatgactcattttttgaatgacccatgaatcaaatataaataaccataagcgccctaataaaggaagtttacgtcaaaaaaaatatattataattattaaatagttgaacgttcaattttatacaatatatacacatcttgaccaatctgtaaaaaaaactaataacaaatataaaagacacatcagaattatcataggtatatagtcatcaacttactttccgctcatcacattctatttaaattatttgcccgccctattcctgacgacctctattgtcccagtgaagggcgatagtataataacgccatatagcaggtatgaccacaaccccaccacttcaacctctttaggattgggttaatagatatcactagagaaagctaatacttcgcgatactaatatgatgatat

SEQ ID NO: 559538 - DNA, 81 bp, Homo sapiens
  misc_feature (41)..(41): n is a, c, g, or t
  misc_feature (69)..(69): n is a, c, g, or t
gcaggataaggaagtttttatttgcttgtttgaagacaggntcttgctttattgcccaggttggagaanagtggcgagatc

SEQ ID NO: 559539 - DNA, 144 bp, Homo sapiens
ggatagggcattatccaagtactcatctgatttaagtttgattagattgataggccatgaattacttctccatctcactaagggttaaaggcgtgcaagcccccactggctgtgtcccctgccaccgaagtgagtgacctgccc

SEQ ID NO: 559540 - DNA, 847 bp, Homo sapiens
  misc_feature (600)..(600): n is a, c, g, or t
aaaataggtgttattagattgaaaggggtgtagtggagtgtaggatcggcgcgcgatccatttttatttcaaaatgtctacaaagttttaattctccattatacaggtaatttttcaaaatctagacattattcaaatgtaagccaaagtccttacacaaatagaatacactcaaagatcaaaaatatacatatctttcagcaaactttgttacataaataagaaaaatatatacagctggtgttttcaaagtacaattatcttaacactgcaaacatgtatagaaggaactaaaataaaaagaaacactacagcaaaggttaaaggaacaacaaattcattttacaacatcatcaattataaagatacatatatcaaatcttaggggaatatatacttcacactgggatcttaacttttacttcactttgtttatttttttagaatactctctggataggtgaaaatctatccatgacacctattacgaaagttacatgtgaagaattcaataatctaggtctttgtactctgggatagatgtaaaaagaattctttaaaagttaaatttgtataagcctatgttaacaatttccaagnaaactggtctattggaaattaaatatttcaaagtagaaaatgttaggaaaacttcacttcaaaaattttaacacagtaagcataagaaaaattttgccaatgtttccttaaaaaaaggcaactcagctaggtttatgtttaccccaaaattctccttgctattttgagttttgccacagttcaaaacgctcggaactataaggtgtagaccgagacgaatctcatcaattttttccgctcctctcgt

SEQ ID NO: 559541 - DNA, 366 bp, Homo sapiens
  misc_feature (9)..(9): n is a, c, g, or t
  misc_feature (313)..(313): n is a, c, g, or t
agttaaagntgatgagttaaatcacatagtttgggttttattcaagttcctaaaactcaagttaaagaaaatccttgaggccgggcacggtggctcatgccctgtaatccccgcactttgggaggccgaggcgggcggatcacaaggtcaggagatcgagactgtcctggctaacacggtgaaaccccgtctctactaaaaatacaaaaaattagccggatgtggtgacgggtgcctgtagtcccagctattcgggaggctgaggcaggagaatggcgtgaacccgggaggtggagcttgcagtgagccgagntcatgccactgcactctagtctgggtgacagagcgagattctgtctcaaaaaa

SEQ ID NO: 559542 - DNA, 170 bp, Homo sapiens
gcagcatcatttatttgggattcttttatctgatttcaacagtgaaaaacatccctatgataaagcctaatgacccatttcacaaaagatggaatttagccttctagaaatatgacgagaaagctgactcagagaagtgagtctgatttatagggtagtagatgacatct

SEQ ID NO: 559543 - DNA, 475 bp, Homo sapiens
ttggtttttcaagaaaagccacaaaacgtgtgcgtgtgtgtgtgtgtgtgtgtgaaatctttcaatttacaagtgttaggtttcttttttttcctttaaggaggtcaaataaaacctactgaaggtggcacggcgtggggcttaattcctgaaatcccacccccttgggaggccaaggaaggcggatcacctgaggtcataattttgagaccaccctgcccaaagtggttaaactttgcccttcctaaaatcccaaaatttacttgggcattttgttgggcgcctgtaatctcacttcctgggaaggcttaggatggaaaatgttttcacccggaaccttgagtttctatgaccttaaattggccccttgccttcacccttgggtgacaaataaaaaactccttttttttttatactttcccaaatttttttatttgcgccctttcgagctcccttgggcttccccttatggggg

SEQ ID NO: 559544 - DNA, 810 bp, Homo sapiens
  misc_feature (66)..(66): n is a, c, g, or t
aaatatgtattgtcgcatattttagatattgctgagttaattgaagatatagaagtacacaaaggnggttggcacgcgtacagtttttatttcaaaatgtctacaaagttttaattctccattatacaggtaatttttcaaaatctagacattattcaaatgtaagccaaagtccttacacaaatagaatacactcaaagatcaaaaatatacatatctttcagcaaactttgttacataaataagaaaaatatatacagctggtgttttcaaagtacaattatcttaacactgcaaacatgtatagaaggaactaaaataaaaagaaacactacagcaaaggttaaaggaacaacaaattcattttacaacatcatcaattataaagatacatatatcaaatcttaggggaatatatacttcacactgggatcttaacttttacttcactttgtttatttttttagaatactctctggataggtgaaaatctatccatgacacctattacgaaagttacatgtgaagaattcaataatctaggtctttgtactctgggatagatgtaaaaagaattctttaaaagttaatgagatctcgtactaggtattacatcagcacgggaacacgtccagttgggcaggatgatttccaagggcataacggatagggcaaaatatatctcaaagcattctaatacttacaaccgtatatgaagtttattccaactcttttcttggacgcgagaactaatgtagagtaaattttaatgccccaaagatcattattttttagtattgagagaagtcg

SEQ ID NO: 559545 - DNA, 108 bp, Homo sapiens
gtgatgttcaggaggccgctgtcgtgcatttgccattttcctgacaccgctcgcgcactcaggtggccgccgtgcacccctcgccatggccagcccgacagcggccgc

SEQ ID NO: 559546 - DNA, 924 bp, Homo sapiens
aaaataggtgttattagattgaaaggggtgtagtggagtgtaggatcggcgcgcgatccatttttatttcaaaatgtctacaaagttttaattctccattatacaggtaatttttcaaaatctagacattattcaaatgtaagccaaagtccttacacaaatagaatacactcaaagatcaaaaatatacatatctttcagcaaactttgttacataaataagaaaaatatatacagctggtgttttcaaagtacaattatcttaacactgcaaacatgtatagaaggaactaaaataaaaagaaacactacagcaaaggttaaaggaacaacaaattcattttacaacatcatcaattataaagatacatatatcaaatcttaggggaatatatacttcacactgggatcttaacttttacttcactttgtttatttttttagaatactctctggataggtgaaaatctatccatgacacctattacgaaagttacatgtgaagaattcaataatctaggtctttgtactctgggatagatgtaaaaagaattctttaaaagttaatttggaatagcccttggtaaaaggtttcaaggagatgggtgttggtgaatttaaatgttgaaaagagaaaaggggagagaagactctcatcagaagattttagcgcgggtgtgggagaggaagatgtacgcgcgtgggtcgaaaaaaaagaaaacacgaagaggggttggtacaccccaaagacgaggtcgtttgttgaggggtggagcggtcaggaagccccggatgtaagcgcgggaaagtccgagaagtgggggctggtgcgactcgagtctgtgaagggcgtgcgggggggaggggggaaggccgaggggtgtgtgagagaggggagaggggcgtgtagaggaagggcggggg

SEQ ID NO: 559547 - DNA, 925 bp, Homo sapiens
aaaataggtgttattagattgaaaggggtgtagtggagtgtaggatcggcgcgcgatccatttttatttcaaaatgtctacaaagttttaattctccattatacaggtaatttttcaaaatctagacattattcaaatgtaagccaaagtccttacacaaatagaatacactcaaagatcaaaaatatacatatctttcagcaaactttgttacataaataagaaaaatatatacagctggtgttttcaaagtacaattatcttaacactgcaaacatgtatagaaggaactaaaataaaaagaaacactacagcaaaggttaaaggaacaacaaattcattttacaacatcatcaattataaagatacatatatcaaatcttaggggaatatatacttcacactgggatgtgaactatggactaaagctttgggcatgttgttacaaattctctttgagtgggcgagaaataagaggcaggacaccaattagtgaggtagcatggggaggatctgatcgtgtgggactttggaactcagggataaaccgtagttgaaattatagaaattataattcatatatagcagtgtgcgcaatggaaagttagtttcgttattggggatacaatcacgttataggattagatgtggtgcaagagcaaggcttcgaaaaatatggagaagtaagttagaaaatgactgtaagcgctcggctactaataaggatggagtaagggaaaggatataaagaataaggccacagaaatcgacagtagttaattgagtgtgtagctcgtagtcggtgagcgtaatcgttgatagttgtgttagtagcgtgttggtttaacagtgataatcgggaggactggataaggttagtggatggggaagcagattgtaagttgagtggtgttgacgaaggtgc

SEQ ID NO: 559548 - DNA, 203 bp, Homo sapiens
cactgagcccctggatgccattgagcccctggatgctacttacatgaaagaagactttaaacaatataatcagctgcacaaaattgtacagggtggggttatgctgtgaatattaagttttcctcatataatgtttttcttcgactgttcaagtaacataattatagatttccacggtcagaatttagtttgtcaacaatgcc

SEQ ID NO: 559549 - DNA, 158 bp, Homo sapiens
  misc_feature (138)..(138): n is a, c, g, or t
  misc_feature (144)..(144): n is a, c, g, or t
taggaccccatgctgtctcaggatgtgtcatatacaagcatagatggattcatgacatacgagtccgatctgcttcatcggccatgcgatatcaccaatggcgtggtgttatcctgatacagccaagaatctagaatngatggnagctctagctggtg

SEQ ID NO: 559550 - DNA, 893 bp, Homo sapiens
  misc_feature (859)..(859): n is a, c, g, or t
  misc_feature (861)..(861): n is a, c, g, or t
aaaataggtgttattagattgaaaggggtgtagtggagtgtaggatcggcgcgcgatccatttttatttcaaaatgtctacaaagttttaattctccattatacaggtaatttttcaaaatctagacattattcaaatgtaagccaaagtccttacacaaatagaatacactcaaagatcaaaaatatacatatctttcagcaaactttgttacataaataagaaaaatatatacagctggtgttttcaaagtacaattatcttaacactgcaaacatgtatagaaggaactaaaataaaaagaaacactacagcaaaggttaaaggaacaacaaattcattttacaacatcatcaattataaagatacatatatcaaatcttaggggaatatatacttcacactgggatcttaacttttacttcactttgtttatttttttagaatactctctggataggtgaaaatctatccatgacacctattacgaaagttacatgtgaagaattcaataatctaggtctttgtactctgggatagatgtaaaaagaattctttaaaagttaatcccacatcagcctatgtcaaccaatcccacgttaactgctctattggaaatgataatattacatcctatgcaacgcccttgaaatagatatactcatacatctttaacacccccaagtactttatatccgattatccctctaactaatctatatcaataggcatcgctatttctggtattccctccgtcttttatttgctctctaccatctcttttcgccagacctacttctcacaacttttgtatagaagtccatacagtctgctcattgcctccatactatgtaacatngntattttttatgattcttcaatcagtttctatt

SEQ ID NO: 559551 - DNA, 863 bp, Homo sapiens
  misc_feature (600)..(600): n is a, c, g, or t
  misc_feature (798)..(798): n is a, c, g, or t
aaaataggtgttattagattgaaaggggtgtagtggagtgtaggatcggcgcgcgatccatttttatttcaaaatgtctacaaagttttaattctccattatacaggtaatttttcaaaatctagacattattcaaatgtaagccaaagtccttacacaaatagaatacactcaaagatcaaaaatatacatatctttcagcaaactttgttacataaataagaaaaatatatacagctggtgttttcaaagtacaattatcttaacactgcaaacatgtatagaaggaactaaaataaaaagaaacactacagcaaaggttaaaggaacaacaaattcattttacaacatcatcaattataaagatacatatatcaaatcttaggggaatatatacttcacactgggatcttaacttttacttcactttgtttatttttttagaatactctctggataggtgaaaatctatccatgacacctattacgaaagttacatgtgaagaattcaataatctaggtctttgtactctgggatagatgtaaaaagaattctttaaaagttaaatttgtataagcctatgttaacaatttccaagnaaactggtctattggaaattaaatatttcaaagtagaaaatgttaggaaaacttcacttcaaaaattttaacacagtaagcataagaaaaattttgccaatgtttccttaaaaaaaggcaactcagctaggtttatgtttaccccaaaattctcctttctttagttaaacttatggcccgaatttaaataatgccatntatactataatctttgattattaaacatgaaaaattaagaaatcattttacattttcacacttag

SEQ ID NO: 559552 - DNA, 876 bp, Homo sapiens
  misc_feature (600)..(600): n is a, c, g, or t
aaaataggtgttattagattgaaaggggtgtagtggagtgtaggatcggcgcgcgatccatttttatttcaaaatgtctacaaagttttaattctccattatacaggtaatttttcaaaatctagacattattcaaatgtaagccaaagtccttacacaaatagaatacactcaaagatcaaaaatatacatatctttcagcaaactttgttacataaataagaaaaatatatacagctggtgttttcaaagtacaattatcttaacactgcaaacatgtatagaaggaactaaaataaaaagaaacactacagcaaaggttaaaggaacaacaaattcattttacaacatcatcaattataaagatacatatatcaaatcttaggggaatatatacttcacactgggatcttaacttttacttcactttgtttatttttttagaatactctctggataggtgaaaatctatccatgacacctattacgaaagttacatgtgaagaattcaataatctaggtctttgtactctgggatagatgtaaaaagaattctttaaaagttaaatttgtataagcctatgttaacaatttccaagnaaactggtctattggaaattaaatatttcaaagtagaaaatgttaggaaaacttcacttcaaaaattttaacacagtaagcataagaaaaattttgccaatgtttccttaaaaaaaggcaactcagctaggtttatgtttaccccaaaattctccttactttcttaactcatgcaatattcgaaaaccccgagaactaaaacttgccaaagaggcaaatttccaaacacctgccttaattaatccaaaatgcgtagtggtgaggaactccaaatgg

SEQ ID NO: 559553 - DNA, 239 bp, Homo sapiens
ttaaaactaagtgggtacagtgaacacagtaagaagatacaaatgataataaggaaatatacaactgtgaaaatgtatgtaaggtataatagagacaggcatagtagcttgcacctgtggtcccagctactccagaggctgaggtgggaggattgcttgagcccaggagtccgaggctacagtgagctatgtcgtgtcattgcactctagcctgggtgactgagcgagaccccatctct

SEQ ID NO: 559554 - DNA, 121 bp, Homo sapiens
tcgttaacgctcgattcgcgtacaatcaggcagctgctgacgggtcagtttcctttctgggggccccgggcaggcgattcccctctctgtagcgtccagtttttcatcatgtaccgtgggt

SEQ ID NO: 559555 - DNA, 485 bp, Homo sapiens
gttgaagcaagttttcagacaaaagggagataatgagtttattgatatgttgaacaatgtgcgtgttgggaacttgaattatgaaaccattgaagcgttccaaaaattggatcgacaaatcaactacactgacggaatagaaccaacacagttgtacccaactttaaaagaagttctgatggcgaatcaagcaaaattaaacagtttaccagggaaagtatacactttccaagccaaagatccagaaaacccttttctcgtcagtatgcttgataataatcttatggtggataaagttcttcatttaaaaacgggggcccaagtcatgtgtgtcaaaaatttcactgatgaattggtcaatggtaccttaggtaccgttttatttatggctacccgtaaactttatatgaagtttttggaacaatatgtgtatattgatgcggaagaccaggcggcgcttgctgaaatgaggttcgtatgtaata

SEQ ID NO: 559556 - DNA, 215 bp, Homo sapiens
cgatagagagaaaacagaagagttacaaaacactgagttataaagaccacgaccaactttacctacagtactaaataccctagtgtctagcactgtaactagacactcattctagccaccccattaaaaagtccatatttgatctttcttccaaatttccaagattctcttacacgtgtgctctctctcctattaggcacttactcgatttatct

SEQ ID NO: 559557 - DNA, 1098 bp, Homo sapiens
gtgagagtctctagaaaccagaaaggataagacaatggaaaagcattctccccagattgcctccagatgggaacatagccctgccaacatctttgtgttcatcatgtgtatgttggagaacggatatcttacgcgtgtgtgtatgccggaggtgtgcgttcgaagtggggtcgaccgcggatcaggtggtattcctcccggccccctcggttcggctggctctttgctcatcgtttgcttgtgactgtgctccacgggacgagcttgacttgtgtgaggtcttgtgaggaccggaaatgggggcttcactggggtttctccatgcggatactaccgagctcgagtggctttggtttcacccgggtttctgtcctgcccagaagtaggcgtggctcgtcaagcagggtgtatgaaggcacgcagagacccgcaggtcgttgcctgtgacggagaacaatggtagggattcgaatgaccatagtggtatggccatagtaagcggtctacggggggtgcccacagagacatcggttggagaaggcgtccatgttggccgcttgggttcgaccaggcgcatttgaattcttaagacgctgaaagcttgtttattgtggccacacgaatggattgttcctgaactgaacctcacaatatttggcggctgcgcagcaagattatcccagggtgcatataatattcctaagtatttacaacatttggcacgcgggcgtcggcaaaataaacctagataatggcgggcgtcccttgtgagagggtgaaaacggctactgcacactgcggaacgatcggcttgaggagcatccggacatattggcgcgtgggcattaccacattagaggtcgaggaaacgaggtccctgcgaatgacgaagtgtgcctggctatggatagctcctggcgaggtcatgagtggcgccaacattgtgttgtggcccccttgcccaagtgtttttcggcccacggtatgggaaccccaactgacttgtactctttgacccttaaaggataccacgcgcaggtgggaccgaactttgcccaagggttgttaacagaatggattactttacacaacacttta

SEQ ID NO: 559558 - DNA, 596 bp, Homo sapiens
gcgggcgccgccatattggctgttgtcctgtgaggggagcggtagcggcggcggcggcggcggcggcggcgcagtagccgccgaggccgcctgcgccatttaacaggcaagtattaagtgctatggtggtgcagctgcttcggacaatcttccagataaattcgagccgaaaatgacgaagacaaaggggaaagaggagaggatcgctgatatatgttcatctaggcccatgttaagaagaagatggagttgtgcctttggtcacatatatgcagaatctgatgagaaaggtgatatttgtagcacagtctaagggaacgttgggtacatgttcaagacagaggaagtgagccagcaaggtgttagccagtgggcaagaaagtggagagaagtcgtacaagtgttagcccgagtgattgttgtagggcgatagaataggttaaacgaagaggaggattaagggggccaggaatcattgattaatggagaatttaatgatgcgatattgaagaacaatgtaagcagactcgtaaaaacccgagaatagcttccttaaaccgatgtgaagggagaatgatcagaaaaacggaaagaag

SEQ ID NO: 559559 - DNA, 477 bp, Homo sapiens
ccctccccaattagaaactaccgcgccaagaacaacactatttgtgtatttttcttattaatataagaaggcaggaatgtcaggcctctgagcccaagccaagacatcgcatcccctgtgacttgcacgtatacatccacgtggcctgaagtaactgaagatccacaaaagaagtaaacatagccttaactgatgacattccaccattgtgatttgttcccgccccaccctaactaatcaatgtactttgtaatctcccccacccttaagaaggttctttgtaattctccccacccttgagaatgtacttcgtgagatccacccctgcccacaaaacattgctcttaacttcactgcctaacccaaaacctataagaactaataataatccaccactccttgctgactctctttttggactcagcccacctgcacccaggtgaaataaacagccatgttgctcactgtggagaaggg

SEQ ID NO: 559560 - DNA, 307 bp, Homo sapiens
  misc_feature (30)..(30): n is a, c, g, or t
  misc_feature (53)..(53): n is a, c, g, or t
  misc_feature (58)..(58): n is a, c, g, or t
  misc_feature (90)..(90): n is a, c, g, or t
  misc_feature (132)..(132): n is a, c, g, or t
  misc_feature (138)..(138): n is a, c, g, or t
  misc_feature (145)..(145): n is a, c, g, or t
  misc_feature (150)..(150): n is a, c, g, or t
  misc_feature (170)..(171): n is a, c, g, or t
  misc_feature (178)..(178): n is a, c, g, or t
  misc_feature (198)..(198): n is a, c, g, or t
  misc_feature (207)..(208): n is a, c, g, or t
  misc_feature (213)..(213): n is a, c, g, or t
  misc_feature (216)..(216): n is a, c, g, or t
  misc_feature (233)..(233): n is a, c, g, or t
  misc_feature (236)..(236): n is a, c, g, or t
  misc_feature (240)..(241): n is a, c, g, or t
gaattccccccccccccccccccccaaaanttatcaagactagggtgaattanttagncccagatctttcagtagaccagttatttttanagggattcaatatttttagtaactactccatcttcctttctngtttanggtcatntgggntcaaccatctaaacattttnntccaatnctgttttcctgaggtttctnccatctctnnaattnatntatgtatgtattaatcnatntatnnggggatggaatttcactcttgttgcccaggctggaatgaaatggtgcaatctcggctcactgcacc

SEQ ID NO: 559561 - DNA, 167 bp, Homo sapiens
aaccatggatgtggtgagcaccacctcgcgacactgcgtcagcctgcccgcctgtgtcctgcccacctgcagctgcggccaacgactgtcatggtgacagccacatgacctcgcaggtagcctgtctgtcatgcctgctgggtgctcaggcagtcgtggttgctccc

SEQ ID NO: 559562 - DNA, 3735 bp, Homo sapiens
  misc_feature (22)..(22): n is a, c, g, or t
  misc_feature (29)..(32): n is a, c, g, or t
  misc_feature (34)..(34): n is a, c, g, or t
  misc_feature (36)..(37): n is a, c, g, or t
caaataaggctaggtacgaggnctgggtnnnnantnnggcacgaggcttctggaggaagcagcgcgggcttgaccggcgtcggcccgccgcctccgctgccgcttcgccccaatccggtccctctggcccggcctgacccggtctggcttgttcgggctcagcggccgcgaggccgcagctcccgatggaaatcatattatgtagaatacttgggtgacatctgcctgagagatctccaagaaatctcattcagttgctaaacttatattagttaatttccactggcaagtttcagagatattggacagatacaagtccaattctgctcaactgcttgttgaggctcgagttcagcctaatccatcaaaacatgttcccacatcccatccccctcaccactgtgcagtgtgtatgcagtttgtgcgaaaggaaaacctactctctctggcctgtcagcaccagttttgccgcagctgctgggagcagcactgctcagttctcgtcaaggacggcgtgggcgtgggagtctcttgcatggctcaggactgtccactccgtacaccagaggactttgtgtttccattgcttcccaatgaagaattgagagagaaatacaggcgctacctcttcagggactatgtggagagtcattaccagctccagctgtgccctggtgcagactgccccatggttattcgggtacaggagcctagagctcgccgagtacagtgcaatcggtgcaacgaggtcttctgtttcaagtgtcgtcagatgtatcacgcacccacagactgtgccacaatccggaaatggctcacgaagtgtgcagacgactctgaaacagccaactacattagtgctcacactaaagactgtcccaagtgcaacatctgcattgagaagaatggaggctgcaatcacatgcaatgctccaaatgtaaacacgacttctgctggatgtgtctaggagattggaagactcatggcagtgaatactatgagtgcagtcgttacaaggagaatcctgacatcgtgaaccagagccaacaagcccaggcgagggaagccctcaagaagtacttattctactttgagaggtgggaaaaccacaataaaagcttgcagctagaggcacagacataccagcggattcacgagaagattcaggagagggtcatgaacaatctggggacatggatcgactggcagtacctacagaatgctgccaagctcttggccaagtgtcgatacaccctgcaatacacctacccatatgcatattacatggagtccggacccaggaagaagctgtttgaataccagcaggctcagctggaggctgagatcgaaaacctctcatggaaagtggagcgtgcagacagctatgacagaggggacttggagaaccagatgcatatagcggagcagcggaggagaaccctgctgaaagatttccatgacacctaagttgggatgtggatgtgccggggtgaggaagatgtggctgcaaggtctcccggctgccatactgcatgctgcaggctctgcctttcatgaccccaggcaacagccagggccccactcctgagagacactggcaacacctcttagttgatttctgttttcttctcttttcactttttgtttctaccagggtagaggccatgttgaactggcctcttttcaggacttttatttccccctggatggttgttgggagggagggaaagtgttttctgaatggctattaatagtattagatcattacaacttatgtaactttcaaaggttgtacaattatacaaaaaaaaaaaaaaaggcaaactataggataacacagagccctttttgaaaataaattggcattggagtgttttaccctctagctgttttacttagaatgtaacatatgctgcctacccacctcaaaatgtctgtactgcaagagggccctgggcctctgctttccatattcacgtttggccagagttgtagtcccaaagaagagcatgggtggcagatggtagggaattgaactggcctgtgcaatgggcatggagcacaaggggtcacagcatgcctcctgccttaccgtggcagtacggagacagtccagaacatggtcttcttgccacggggtgttgttgtctctggtggtgctgcatgtctgtggctcacctttattcttgaaactgaggtttacctggatctggctactgaggctagagcccacagcagaatggggttgggcctgtggccccccaaactagggggtgtgggttcatcacagtgttgccttttgtctcctaaagatagggatctacttttgaagggaattgttcctcccaaataaatttgctttaccttggtcctttcttttgtgccagtattcaagtggtatagctctgagcagggtcacatttggccaaacctgacactgtcttgctgcattctcctttggcaaacatcagggtcagaattcaggatagcccttcctagggcactggactttctggcatgggggctgtgtttgcacaagttattttcatgttacctggagagtgtccagaggctgctctgaggctgaggtgtgttcccccttgcctggttccagctgtcagagggataccatcctagggtctgggaatccaaggccacgagactccttggtttgtggtccgagatcctgtactaaggagggtctggccagaggaacagaccagcttttgcacaatgaagcgcaagggaacaagtggtttgcctggtgtcctacctgtcctgaacctggtcctgtgggccattgaaaagttagatctgtgatctctggggtttttgtggctttgttcaatgcttccactctagggcaggcagagcagtctatactctcccaagcctgcttgacctccaagtagagctgatacagagatctgtgaatattgtgatagaaattctttggtattcatacatttcagctgcaagtcagcaatttcccaggtaccatgtaagctataaaacagtcattcttaaagacagaggatagctgtgactcatgggatcatgaggtccatggctggttgcaggttccctttttccttcctcaggttttgtctcttcctgtgttgtccccagcaagggagagactgtggggtggattgggagaacagattaggagtatagcaaatgaacccagaatggaacagtggggagctaactgtgaatgaggagagtacctgctgcaggacctggaggtcaggtgtgaatgctgtattggcacagggaataaatatcctggcgtctggagccttcacctctccgtcaagtccttcctgtgatactgccatggcacaggatctgagttgcagctctgcaccctaaatcacaccctgggcattgtctgggctgcagggctgccaggttctgtacttgtgtccagctgtggccctggatgctggagctggagggttttctgtgctcagactgtagcctgtagctcttggcctgtgtagagccccctcctgtgccctcagtggctgtcgtttgttaacatcatcaggaagatgggaaaggtcaggcagaatttttctgccctacaaagggtggaagagaaaggacacagtattttcatgaatttaccatatatctttgtttttcttcaacgaaaaagttaattgaggcaatgtcatctgctcaaagttgagtggtttattcacaataaactgtaagtttctgattat

SEQ ID NO: 559563 - DNA, 2061 bp, Homo sapiens
  misc_feature (22)..(22): n is a, c, g, or t
  misc_feature (29)..(32): n is a, c, g, or t
  misc_feature (34)..(34): n is a, c, g, or t
  misc_feature (36)..(37): n is a, c, g, or t
caaataaggctaggtacgaggnctgggtnnnnantnnggcacgaggcttctggaggaagcagcgcgggcttgaccggcgtcggcccgccgcctccgctgccgcttcgccccaatccggtccctctggcccggcctgacccggtctggcttgttcgggctcagcggccgcgaggccgcagctcccgatggaaatcatattatgtagaatacttgggtgacatctgcctgagagatctccaagaattacagaagacaaaaatactaatgcatttgagaaagcggtagttttggggggagggggaaaaagcaactgctttcctgatctgcaacttggctggatgctaagatgtcagtggacatgaatagccaggggtctgacagcaatgaagaggactatgacccaaattgtgaggaagaggaagaagaagaagaagacgaccctggggacatagaggactattacgtgggagtagccagcgatgtggagcagcagggggctgatgcctttgatcccgaggagtaccagttcacttgcttgacctacaaggaatctgagggtgccctcaatgagcacatgaccagcttagcttctgtcctaaaggtgagcagtgttgtaaactccagtgtaatcccccccagttaaatctaaggatgagctgttgttaattaatgtctcctccagactaattgaatggccttgtagcttgaaaccaaatttaagtgtatgtcaacatcatttggacattttgttacatttactttgttttctaatatatgcatgtctaaggtcctcagattcccaaattagtaagaattagaaagtaggggtgggacagattcaagaaagatgtaccataccagaaatgtgtagtagcagaattgcacaactttgcacgtttcaggaagtgagttttcagaattttatgaggttgatacaataagcatcagaatcaccatcttctgtacgactgtgagtgactgataaatgtcttgagagtatacagatccctctggtttgccctgaatagtcattgcctttgggctaatgagctcatttgtttcatgtactgattttaataataattctttcttatgcttgtatttcattgatttagggggtgttagtatggaaattgtaaagaatgaacaaagttgattaccccatcagcaagcattttatttaacacataagctaaaacatacctttggatgtcttgtaccttaggccagttattatcctatttacattttttatgatcattttgacagtttcccaacaagcatgtttccttctctaacactggccattatgggaaattggaaatatttctctttagtgttttcactaatcttttttcatgaattgttacttggattttgtttctgattaaattggaggtcaaaagggcaccttggcatgatgtcaaccaaataaattttattggaacttaaacagaaaaaaaaaaaaaaaaaaaaaaaaaaaaaaaaaaaaaacaaaaaaaaaaaaacaacaaaaaaaaaaaaaaaaaaaaaaaaaaacaaaaaaaacaaaaaacaaaaaaaacaaaaaaaaaaaaaagaaaaaaaaaacaaaacaaaaaaaaacaaataagaaaaagaaaaaaaaaagaccaaaggcagaaacaaaacaaagaaagaaggggaggaggaggacacagtacagacaatcacggaggacgaacaacccaccttacatagtaacctagacagagaaagacaacaagtgcgagacacgtatatacaacacagacctcagagtaacacaaccgtcgaggcgaagaacacgcggcacacagaacagtagacaaactcactacgagtggcgtactgaagaacacacagataaggatatcaccgaggcaggaaagcacagagcagagctcgcgtaacacaacaaaaagccgccgagacaaaggacccggagaaacacaaaccacaacagagacacgacggcgagcagacgcgagaaccgcaggccgccacggccgccacaacaccggcgaagacgaagacaccacggacacacaccacacggacact

SEQ ID NO: 559564 - DNA, 1137 bp, Homo sapiens
  misc_feature (22)..(22): n is a, c, g, or t
  misc_feature (29)..(32): n is a, c, g, or t
  misc_feature (34)..(34): n is a, c, g, or t
  misc_feature (36)..(37): n is a, c, g, or t
  misc_feature (700)..(700): n is a, c, g, or t
  misc_feature (753)..(756): n is a, c, g, or t
  misc_feature (765)..(765): n is a, c, g, or t
  misc_feature (792)..(792): n is a, c, g, or t
  misc_feature (838)..(838): n is a, c, g, or t
  misc_feature (884)..(885): n is a, c, g, or t
  misc_feature (888)..(888): n is a, c, g, or t
caaataaggctaggtacgaggnctgggtnnnnantnnggcacgaggcttctggaggaagcagcgcgggcttgaccggcgtcggcccgccgcctccgctgccgcttcgccccaatccggtccctctggcccggcctgacccggtctggcttgttcgggctcagcggccgcgaggccgcagctcccgatggaaatcatattatgtagaatacttgggtgacatctgcctgagagatctccaagaattacagaagacaaaaatactaatgcatttgagaaagcggtagttttggggggagggggaaaaagcaactgctttcctgatctgcaacttggctggatgctaagatgtcagtggacatgaatagccaggggtctgacagcaatgaagaggactatgacccaaattgtgaggaagaggaagaagaagaagaagacgaccctggggacatagaggactattacgtgggagtagccagcgatgtggagcagcagggggctgatgcctttgatcccgaggagtaccagttcacttgcttgacctacaaggaatctgagggtgccctcaatgagcacatgaccagcttagcttctgtcctaaaggttgagacggactctcgctgtgtcacccaggctggagtgcagtggcacgatctcggttcactgcaagctccgcctaccgggttcataccattctcctgnctcagctcccaagtagctgggactacaggtgcccgcacacaccggctaaattnnnntgtatctcnacgtagagacgggctttcaccttgttngccaggatggtctcgatctcctgacctcatgatccacctgctcagnctcccaacgtgctgggattacaggtgtgagccaccgcgcctgtccnnatngtcactttttaaggctgtccccagataggatggagaatatgcaatttatacaaagtttaatacatttcttcttctttatggatggtgtttactggagtaaggttgaaatttcttgaaattattttggattcttggaatttttaaattgggttggttgcaagggtggatttttaatggggggtatccttggaaagaagaggggtggaagcggagtactggaaaagtgttagaaatgggtaaattgttaaa

SEQ ID NO: 559565 - DNA, 846 bp, Homo sapiens
ggtcagaggaggcgcggggagagtagggtgctgtggtctgagctagagggtgaagctggcggagcaggaggatgggcgtctgaatgccagaatggataaccggtttgtgctacagcatttgtgtaatggctgtgtgtgcttagcctcatttccacccatctacatggcagcctccatggcacagacttctggtatgaatatcgaagtccagttcaagaaaattccagtgattgtgaataaaagcatcctgggatgaattcatttaggtgatggaggcagcatgaaccagattataatgatgcactttttcgatacacgtggcacagtgggatgtgtggacgacggtgtatcaccatacccaaaaacatgcatggtatagcccaccagaaaggacagagtcattgatgtggtcacaaaatgtgtgagttccaccactaactgagcagttcatggagaaattgtgatccggaaaccacaatagcgggatgatctccttaggacctatcttgtggcgttgccatgtcccttttacctttggtgagtcaaggttgatgtgcttggggggcttggatcggacttggttgcttggattttgcgaaggttttatatccccaccatttggcaggggattctccatctcttgcaggtctggtgtacacgtgggctcagcaaagttggtatgtgctggaattgatatcaccagaaatagagtcctgaaggttcgggattgggttgcttctgctggtgggtttgccctaaagcaggtttggcctcatggtgggcacaacggagagcctagaaggttggggtgcaaaggcggtaagctttttacaaatgttccctcag

SEQ ID NO: 559566 - DNA, 767 bp, Homo sapiens
  misc_feature (22)..(22): n is a, c, g, or t
  misc_feature (29)..(32): n is a, c, g, or t
  misc_feature (34)..(34): n is a, c, g, or t
  misc_feature (36)..(37): n is a, c, g, or t
caaataaggctaggtacgaggnctgggtnnnnantnnggcacgaggcttctggaggaagcagcgcgggcttgaccggcgtcggcccgccgcctccgctgccgcttcgccccaatccggtccctctggcccggcctgacccggtctggcttgttcgggctcagcggccgcgaggccgcagctcccgatggaaatcatattatgtagaatacttgggtgacatctgcctgagagatctccaagaattacagaagacaaaaatactaatgcatttgagaaagcggtagttttggggggagggggaaaaagcaactgctttcctgatctgcaacttggctggatgctaagatgtcagtggacatgaatagccaggggtctgacagcaatgaagaggactatgacccaaattgtgaggaagaggaagaagaagaagaagacgaccctggggacatagaggactattacgtgggagtagccagcgatgtggagcagcagggggctgatgcctttgatcccgaggagtaccagttcacttgcttgacctacaaggaatctgagggtgccctcaatgagcacatgaccagcttagcttctgtcctaaaggtgagacggactccagcctgggcaacacagcgagactccgtctcaaaaaaaaaaacttgaatgatttcacagtgatgaccatgttattgatcataaatagagaaaaatacggcaggatgagcaaggggttgtcggagattttaaaaggaaaacagagctgtcttat

SEQ ID NO: 559567 - DNA, 1259 bp, Homo sapiens
  misc_feature (22)..(22): n is a, c, g, or t
  misc_feature (29)..(32): n is a, c, g, or t
  misc_feature (34)..(34): n is a, c, g, or t
  misc_feature (36)..(37): n is a, c, g, or t
  misc_feature (822)..(822): n is a, c, g, or t
  misc_feature (875)..(878): n is a, c, g, or t
  misc_feature (887)..(887): n is a, c, g, or t
  misc_feature (914)..(914): n is a, c, g, or t
  misc_feature (960)..(960): n is a, c, g, or t
  misc_feature (1006)..(1007): n is a, c, g, or t
  misc_feature (1010)..(1010): n is a, c, g, or t
caaataaggctaggtacgaggnctgggtnnnnantnnggcacgaggcttctggaggaagcagcgcgggcttgaccggcgtcggcccgccgcctccgctgccgcttcgccccaatccggtccctctggcccggcctgacccggtctggcttgttcgggctcagcggccgcgaggccgcagctcccgatggaaatcatattatgtagaatacttgggtgacatctgcctgagagatctccaagaattacagattgagtctcgctctgttgcccaggctggagtgcagtggtgcaatctctgctcactgcaacctccgtctcccgagttcaagcagttctcctgcctcagcctcctgagtagctgggattacagaagacaaaaatactaatgcatttgagaaagcggtagttttggggggagggggaaaaagcaactgctttcctgatctgcaacttggctggatgctaagatgtcagtggacatgaatagccaggggtctgacagcaatgaagaggactatgacccaaattgtgaggaagaggaagaagaagaagaagacgaccctggggacatagaggactattacgtgggagtagccagcgatgtggagcagcagggggctgatgcctttgatcccgaggagtaccagttcacttgcttgacctacaaggaatctgagggtgccctcaatgagcacatgaccagcttagcttctgtcctaaaggttgagacggactctcgctgtgtcacccaggctggagtgcagtggcacgatctcggttcactgcaagctccgcctaccgggttcataccattctcctgnctcagctcccaagtagctgggactacaggtgcccgcacacaccggctaaattnnnntgtatctcnacgtagagacgggctttcaccttgttngccaggatggtctcgatctcctgacctcatgatccacctgctcagnctcccaacgtgctgggattacaggtgtgagccaccgcgcctgtccnnatngtcactttttaaggctgtccccagataggatggagaatatgcaatttatacaaagtttaatacatttcttcttctttatggatggtgtttactggagtaaggttgaaatttcttgaaattattttggattcttggaatttttaaattgggttggttgcaagggtggatttttaatggggggtatccttggaaagaagaggggtggaagcggagtactggaaaagtgttagaaatgggtaaattgttaaa

SEQ ID NO: 559568 - DNA, 1806 bp, Homo sapiens
gatcttgtggaggagtgcacagtcaatgcctgttcaagattaatcattttccctgtgcctatgactgaggctgtttctcacatcctgcccctggtttgcctgtcccaaggatttcgtctgaagggcgggacattccccctgcctcttcgcaccacagccagagcctgccattaggaccaatgaaagcaaagtacctcatcccctcagtgactaagaatcgcagtatttaagaggtagcaggaatgggctgagagtggtgtttgctttctccaccagaagggcacactttcatctaatttggggtatcactgagctgaagacaaagagaagggggagaaaacctagcagaccaccatgtgctatgggaagtgtgcacgatgcatcggacattctctggtggggctcgccctcctgtgcatcgcggctaatattttgctttactttcccaatggggaaacaaagtatgcctccgaaaaccacctcagccgcttcgtgtggttcttttctggcatcgtaggaggtggcctgctgatgctcctgccagcatttgtcttcattgggctggaacaggatgactgctgtggctgctgtggccatgaaaactgtggcaaacgatgtgcgatgctttcttctgtattggctgctctcattggaattgcaggatctggctactgtgtcattgtggcagcccttggcttagcagaaggaccactatgtcttgattccctcggccagtggaactacacctttgccagcaccgagggccagtaccttctggatacctccacatggtccgagtgcactgaacccaagcacattgtggaatggaatgtatctctgttttctatcctcttggctcttggtggaattgaattcatcttgtgtcttattcaagtaataaatggagtgcttggaggcatatgtggcttttgctgctctcaccaacagcaatatgactgctaaaagaaccaaccaggacagagccacaatcttcctctattcattgtaatttatatttttcacctggtattcatttgtaaaactttgtattagtgtaacatactccccacagtctacttttacaaacgcctgtaaagactggcatcttcacaggatgtcagtgtttaaatttagtaaacttcttttttgtttgtttatttgtttttgtttttttttaaggaatgaggaaacaaaccaccctctgggggtagtttacagactgagtgacagtactcagtatatctgagataaactctataatgttttggataaaaataacattccaatcactattgtatatatgtgcatgtattttttaaattaaagatgtctagttgctttttataagaccaagaaggagaaaatccgacaacctggaaagatttttgttttcactgcttgtatgatgtttcccattcatacacctataaatctctaacaagaggccctttgaactgccttgtgttctgtgagaaacaaatatttacttagagtggaaggactgattgagaatgttccaatccaaatgaatgcatcacaacttacaatgctgctcattgttgtgagtactatgagattcaaatttttctaacatatggaaagccttttgtcctccaaagatgagtactagggatcatgtgtttaaaaaaagaaaggctacgatgactgggcaagaagaaagatgggaaactgaataaagcagttgatcagcatcattggaacatggggacgagtgacggcaggaggaccacgaggaaataccctcaaaactaacttgtttacaacaaaataaagtattcactacca

SEQ ID NO: 559569 - DNA, 839 bp, Homo sapiens
  misc_feature (22)..(22): n is a, c, g, or t
  misc_feature (29)..(32): n is a, c, g, or t
  misc_feature (34)..(34): n is a, c, g, or t
  misc_feature (36)..(37): n is a, c, g, or t
  misc_feature (408)..(408): n is a, c, g, or t
  misc_feature (435)..(435): n is a, c, g, or t
  misc_feature (481)..(481): n is a, c, g, or t
caaataaggctaggtacgaggnctgggtnnnnantnnggcacgaggcttctggaggaagcagcgcgggcttgaccggcgtcggcccgccgcctccgctgccgcttcgccccaatccggtccctctggcccggcctgacccggtctggcttgttcgggctcagcggccgcgaggccgcagctcccgatggaaatcatattatgtagaatacttgggtgacatctgcctgagagatctccaagaattacagattgagtctcgctctgttgcccaggctggagtgcagtggtgcaatctctgctcactgcaacctccgtctcccgagttcaagcagttctcctgcctcagcctcctgagtagctgggattacaggtgcatgccatcatgcctagctaatttccgtatctcnacgtagagacgggctttcaccttgttngccaggatggtctcgatctcctgacctcatgatccacctgctcagnctcccaacgtgctgggattacaggtgtgagccaccgcgcccagcctaattcctgtatctccacgctacacgatggggatgtcgccatgttgcgctagggctggcctcaatctcctggcctcaggtgatctgcgccaccttgggtcttcccaaagttgcccgggacttctcttctattctttccttgttcttctttgtgcacccggagctctccctctgatctccccaccctggacgtgccgttgcgcgcgacctcgggctcccgtcgcacctccgcctcccggggttccacccctttctccggccctcagcctcccccgtactgtggcactgccggcccctggccctagtcccggcta

SEQ ID NO: 559570 - DNA, 1039 bp, Homo sapiens
  misc_feature (954)..(954): n is a, c, g, or t
  misc_feature (995)..(995): n is a, c, g, or t
  misc_feature (1017)..(1017): n is a, c, g, or t
  misc_feature (1037)..(1037): n is a, c, g, or t
  misc_feature (1039)..(1039): n is a, c, g, or t
gatcttgtggaggagtgcacagtcaatgcctgttcaagattaatcattttccctgtgcctatgactgaggctgtttctcacatcctgcccctggtttgcctgtcccaaggatttcgtctgaagggcgggacattccccctgcctcttcgcaccacagccagagcctgccattaggaccaatgaaagcaaagtacctcatcccctcagtgactaagaatcgcagtatttaagaggtagcaggaatgggctgagagtggtgtttgctttctccaccagaagggcacactttcatctaatttggggtatcactgagctgaagacaaagagaagggggagaaaacctagcagaccaccatgtgctatgggaagtgtgcacgatgcatcggacattctctggtggggctcgccctcctgtgcatcgcggctaatattttgctttactttcccaatggggaaacaaagtatgcctccgaaaaccacctcagccgcttcgtgtggttcttttctggcatcgtaggaggtggcctgctgatgctcctgccagcatttgtcttcattgggctggaacaggatgactgctgtggctgctgtggccatgaaaactgtggcaaacgatgtgcgatgctttcttctgtattggctgctctcattggaattgcaggatctggctactgtgtcattgtggcagcccttggcttagcagaaggaccactatgtcttgattccctcggccagtggaactacacctttgccagcaccgagggccagtaccttctggatacctccacatggtccgagtgcactgaacccaagcacattgtggaatggaatgtatctctgttttctatcctcttggctcttggtggaattgaattcatcttgtgtcttattcaagtaataaatggagtgcttggaggcatatgtggcttttgctgctctcaccaaacaagcaantatgactggctaaaaaggaaccaaacccaagggacaggagnccacaaatccttccctcccaantttcaattggtaaattttanan

SEQ ID NO: 559571 - DNA, 1188 bp, Homo sapiens
tcgagatccattgtgctctaaaggctcgccctcctgtgcatcgcggctaatttggggtatcactgagctgaagacaaagagaagggggagaaaacctagcagaccaccatgtgctatgggaagtgtgcacgatgcatcggacattctctggtggggctcgccctcctgtgcatcgcggctaatattttgctttactttcccaatggggaaacaaagtatgcctccgaaaaccacctcagccgcttcgtgtggttcttttctggcatcgtaggaggtggcctgctgatgctcctgccagcatttgtcttcattgggctggaacaggatgactgctgtggctgctgtggccatgaaaactgtggcaaacgatgtgcgatgctttcttctgtattggctgctctcattggaattgcaggatctggctactgtgtcattgtggcagcccttggcttagcagaaggaccactatgtcttgattccctcggccagtggaactacacctttgccagcaccgagggccagtaccttctggatacctccacatggtccgagtgcactgaacccaagcacattgtggaatggaatgtatctctgttttctatcctcttggctcttggtggaattgaattcatcttgtgtcttattcaagtaataaatggagtgcttggaggcatatgtggcttttgctgctctcaccaacagcaatatgactgctaaaagaaccaacccaggacagagccacaatcttcctctatttcattgtaatttatatatttcacttgtattcatttgtaaaactttgtattagtgtaacatactccccacagtctacttttacaaacgcctgtaaagactggcatcttcacaggatgtcagtgtttaaatttagtaaacttcttttttgtttgtttatttgtgtaacatactccccacagtctacttttacaaacgcctgtaaagactggcatcttcacaggatgtcagtgtttaaatttagtaaacttcttttttgtttgtttatttgtttttgtttttttttaaggaatgaggaaacaaaccaccctctgggggtagtttacagactgagtgacagtactcagtatatctgagataaactctataatgttttggataaaaataacattccatggcacatatatacaatagtgattggctttagagcacaat

SEQ ID NO: 559572 - DNA, 353 bp, Homo sapiens
  misc_feature (23)..(23): n is a, c, g, or t
  misc_feature (26)..(26): n is a, c, g, or t
caatgagcagcattgtaagttgngangcattcatttggattggaacattctcaatcagtccttccactctaagtaaatgcatcacaacttacaatgctgctcattgttgtgagtactatgagattcaaatttttctaacatatggaaagccttttgtcctccaaagatgagtactagggatcatgtgtttaaaaaaagaaaggctacgatgactgggcaagaagaaagatgggaaactgaataaagcagttgatcagcatcattggaacatggggacgagtgacggcaggaggaccacgaggaaataccctcaaaactaacttgtttacaacaaaataaagtattcactacca

SEQ ID NO: 559573 - DNA, 1807 bp, Homo sapiens
gatcttgtggaggagtgcacagtcaatgcctgttcaagattaatcattttccctgtgcctatgactgaggctgtttctcacatcctgcccctggtttgcctgtcccaaggatttcgtctgaagggcgggacattccccctgcctcttcgcaccacagccagagcctgccattaggaccaatgaaagcaaagtacctcatcccctcagtgactaagaatcgcagtatttaagaggtagcaggaatgggctgagagtggtgtttgctttctccaccagaagggcacactttcatctaatttggggtatcactgagctgaagacaaagagaagggggagaaaacctagcagaccaccatgtgctatgggaagtgtgcacgatgcatcggacattctctggtggggctcgccctcctgtgcatcgcggctaatattttgctttactttcccaatggggaaacaaagtatgcctccgaaaaccacctcagccgcttcgtgtggttcttttctggcatcgtaggaggtggcctgctgatgctcctgccagcatttgtcttcattgggctggaacaggatgactgctgtggctgctgtggccatgaaaactgtggcaaacgatgtgcgatgctttcttctgtattggctgctctcattggaattgcaggatctggctactgtgtcattgtggcagcccttggcttagcagaaggaccactatgtcttgattccctcggccagtggaactacacctttgccagcaccgagggccagtaccttctggatacctccacatggtccgagtgcactgaacccaagcacattgtggaatggaatgtatctctgttttctatcctcttggctcttggtggaattgaattcatcttgtgtcttattcaagtaataaatggagtgcttggaggcatatgtggcttttgctgctctcaccaacagcaatatgactgctaaaagaaccaacccaggacagagccacaatcttcctctatttcattgtaatttatatatttcacttgtattcatttgtaaaactttgtattagtgtaacatactccccacagtctacttttacaaacgcctgtaaagactggcatcttcacaggatgtcagtgtttaaatttagtaaacttcttttttgtttgtttatttgtttttgtttttttttaaggaatgaggaaacaaaccaccctctgggggtagtttacagactgagtgacagtactcagtatatctgagataaactctataatgttttggataaaaataacattccaatcactattgtatatatgtgcatgtattttttaaattaaagatgtctagttgctttttataagaccaagaaggagaaaatccgacaacctggaaagatttttgttttcactgcttgtatgatgtttcccattcatacacctataaatctctaacaagaggccctttgaactgccttgtgttctgtgagaaacaaatatttacttagagtggaaggactgattgagaatgttccaatccaaatgaatgcatcacaacttacaatgctgctcattgttgtgagtactatgagattcaaatttttctaacatatggaaagccttttgtcctccaaagatgagtactagggatcatgtgtttaaaaaaagaaaggctacgatgactgggcaagaagaaagatgggaaactgaataaagcagttgatcagcatcattggaacatggggacgagtgacggcaggaggaccacgaggaaataccctcaaaactaacttgtttacaacaaaataaagtattcactacca

SEQ ID NO: 559574 - DNA, 323 bp, Homo sapiens
ttttttttttaaacagggtgtcagtctgttgcccaggctggattgcagtggtacgatcttgactcactgcagccttgccctcccagtctcaggcgatcctcccaccttagcctcccgagcagctgggactacatacaagcatgtgccaccacatctggctaattttgtatgttttgcatgttttgccatgttgcccaggctgttcttgaagtcctgagctcaatcaatcttactgcctcggcctcccaaagtgctgggatgataggcatgagcaccatgcctgacctctcagtcataaggcctctgttttaatgtggtcgacg

SEQ ID NO: 559575 - DNA, 1915 bp, Homo sapiens
gatcttgtggaggagtgcacagtcaatgcctgttcaagattaatcattttccctgtgcctatgactgaggctgtttctcacatcctgcccctggtttgcctgtcccaaggatttcgtctgaagggcgggacattccccctgcctcttcgcaccacagccagagcctgccattaggaccaatgaaagcaaagtacctcatcccctcagtgactaagaatcgcagtatttaagaggtagcaggaatgggctgagagtggtgtttgctttctccaccagaagggcacactttcatctaatttggggtatcactgagctgaagacaaagagaagggggagaaaacctagcagaccaccatgtgctatgggaagtgtgcacgatgcatcggacattctctggtggggctcgccctcctgtgcatcgcggctaatattttgctttactttcccaatggggaaacaaagtatgcctccgaaaaccacctcagccgcttcgtgtggttcttttctggcatcgtaggaggtggcctgctgatgctcctgccagcatttgtcttcattgggctggaacaggatgactgctgtggctgctgtggccatgaaaactgtggcaaacgatgtgcgatgctttcttctgtattggctgctctcattggaattgcaggatctggctactgtgtcattgtggcagcccttggcttagcagaaggaccactatgtcttgattccctcggccagtggaactacacctttgccagcaccgagggccagtaccttctggatacctccacatggtccgagtgcactgaacccaagcacattgtggaatggaatgtatctctgttttctatcctcttggctcttggtggaattgaattcatcttgtgtcttattcaagtaataaatggagtgcttggaggcatatgtggcttttgctgctctcaccaacagcaatatgactgctaaaagaaccaacccaggacagagccacaatcttcctctatttcattgtaatttatatatttcacttgtattcatttgtaaaactttgtattagtgtaacatactccccacagtctacttttacaaacgcctgtaaagactggcatcttcacaggatgtcagtgtttaaatttagtaaacttcttttttgtttgtttatttgtgtaacatactccccacagtctacttttacaaacgcctgtaaagactggcatcttcacaggatgtcagtgtttaaatttagtaaacttcttttttgtttgtttatttgtttttgtttttttttaaggaatgaggaaacaaaccaccctctgggggtagtttacagactgagtgacagtactcagtatatctgagataaactctataatgttttggataaaaataacattccaatcactattgtatatatgtgcatgtattttttaaattaaagatgtctagttgctttttataagaccaagaaggagaaaatccgacaacctggaaagatttttgttttcactgcttgtatgatgtttcccattcatacacctataaatctctaacaagaggccctttgaactgccttgtgttctgtgagaaacaaatatttacttagagtggaaggactgattgagaatgttccaatccaaatgaatgcatcacaacttacaatgctgctcattgttgtgagtactatgagattcaaatttttctaacatatggaaagccttttgtcctccaaagatgagtactagggatcatgtgtttaaaaaaagaaaggctacgatgactgggcaagaagaaagatgggaaactgaataaagcagttgatcagcatcattggaacatggggacgagtgacggcaggaggaccacgaggaaataccctcaaaactaacttgtttacaacaaaataaagtattcactacca

SEQ ID NO: 559576 - DNA, 174 bp, Homo sapiens
tatcagttcctacaagcacactacctccagtcttcgacgactttgctcactacgagaagcgccaggaggaggaggatgtggtgcgcaaggaacggcagagtcgaaacaaacaatgagggcgaaccagctttcttacatgttgctaacgatttgtactttgataaacaagtttat

SEQ ID NO: 559577 - DNA, 1914 bp, Homo sapiens
gatcttgtggaggagtgcacagtcaatgcctgttcaagattaatcattttccctgtgcctatgactgaggctgtttctcacatcctgcccctggtttgcctgtcccaaggatttcgtctgaagggcgggacattccccctgcctcttcgcaccacagccagagcctgccattaggaccaatgaaagcaaagtacctcatcccctcagtgactaagaatcgcagtatttaagaggtagcaggaatgggctgagagtggtgtttgctttctccaccagaagggcacactttcatctaatttggggtatcactgagctgaagacaaagagaagggggagaaaacctagcagaccaccatgtgctatgggaagtgtgcacgatgcatcggacattctctggtggggctcgccctcctgtgcatcgcggctaatattttgctttactttcccaatggggaaacaaagtatgcctccgaaaaccacctcagccgcttcgtgtggttcttttctggcatcgtaggaggtggcctgctgatgctcctgccagcatttgtcttcattgggctggaacaggatgactgctgtggctgctgtggccatgaaaactgtggcaaacgatgtgcgatgctttcttctgtattggctgctctcattggaattgcaggatctggctactgtgtcattgtggcagcccttggcttagcagaaggaccactatgtcttgattccctcggccagtggaactacacctttgccagcaccgagggccagtaccttctggatacctccacatggtccgagtgcactgaacccaagcacattgtggaatggaatgtatctctgttttctatcctcttggctcttggtggaattgaattcatcttgtgtcttattcaagtaataaatggagtgcttggaggcatatgtggcttttgctgctctcaccaacagcaatatgactgctaaaagaaccaaccaggacagagccacaatcttcctctattcattgtaatttatatttttcacctggtattcatttgtaaaactttgtattagtgtaacatactccccacagtctacttttacaaacgcctgtaaagactggcatcttcacaggatgtcagtgtttaaatttagtaaacttcttttttgtttgtttatttgtgtaacatactccccacagtctacttttacaaacgcctgtaaagactggcatcttcacaggatgtcagtgtttaaatttagtaaacttcttttttgtttgtttatttgtttttgtttttttttaaggaatgaggaaacaaaccaccctctgggggtagtttacagactgagtgacagtactcagtatatctgagataaactctataatgttttggataaaaataacattccaatcactattgtatatatgtgcatgtattttttaaattaaagatgtctagttgctttttataagaccaagaaggagaaaatccgacaacctggaaagatttttgttttcactgcttgtatgatgtttcccattcatacacctataaatctctaacaagaggccctttgaactgccttgtgttctgtgagaaacaaatatttacttagagtggaaggactgattgagaatgttccaatccaaatgaatgcatcacaacttacaatgctgctcattgttgtgagtactatgagattcaaatttttctaacatatggaaagccttttgtcctccaaagatgagtactagggatcatgtgtttaaaaaaagaaaggctacgatgactgggcaagaagaaagatgggaaactgaataaagcagttgatcagcatcattggaacatggggacgagtgacggcaggaggaccacgaggaaataccctcaaaactaacttgtttacaacaaaataaagtattcactacca

SEQ ID NO: 559578 - DNA, 1964 bp, Homo sapiens
  misc_feature (1817)..(1819): n is a, c, g, or t
  misc_feature (1821)..(1821): n is a, c, g, or t
  misc_feature (1825)..(1825): n is a, c, g, or t
  misc_feature (1829)..(1829): n is a, c, g, or t
gatcttgtggaggagtgcacagtcaatgcctgttcaagattaatcattttccctgtgcctatgactgaggctgtttctcacatcctgcccctggtttgcctgtcccaaggatttcgtctgaagggcgggacattccccctgcctcttcgcaccacagccagagcctgccattaggaccaatgaaagcaaagtacctcatcccctcagtgactaagaatcgcagtatttaagaggtagcaggaatgggctgagagtggtgtttgctttctccaccagaagggcacactttcatctaatttggggtatcactgagctgaagacaaagagaagggggagaaaacctagcagaccaccatgtgctatgggaagtgtgcacgatgcatcggacattctctggtggggctcgccctcctgtgcatcgcggctaatattttgctttactttcccaatggggaaacaaagtatgcctccgaaaaccacctcagccgcttcgtgtggttcttttctggcatcgtaggaggtggcctgctgatgctcctgccagcatttgtcttcattgggctggaacaggatgactgctgtggctgctgtggccatgaaaactgtggcaaacgatgtgcgatgctttcttctgtattggctgctctcattggaattgcaggatctggctactgtgtcattgtggcagcccttggcttagcagaaggaccactatgtcttgattccctcggccagtggaactacacctttgccagcaccgagggccagtaccttctggatacctccacatggtccgagtgcactgaacccaagcacattgtggaatggaatgtatctctgttttctatcctcttggctcttggtggaattgaattcatcttgtgtcttattcaagtaataaatggagtgcttggaggcatatgtggcttttgctgctctcaccaacagcaatatgactgctaaaagaaccaacccaggacagagccacaatcttcctctatttcattgtaatttatatatttcacttgtattcatttgtaaaactttgtattagtgtaacatactccccacagtctacttttacaaacgcctgtaaagactggcatcttcacaggatgtcagtgtttaaatttagtaaacttcttttttgtttgtttatttgtttttgtttttttttaaggaatgaggaaacaaaccaccctctgggggtagtttacagactgagtgacagtactcagtatatctgagataaactctataatgttttggataaaaataacattccaatcactattgtatatatgtgcatgtattttttaaattaaagatgtctagttgctttttataagaccaagaaggagaaaatccgacaacctggaaagatttttgttttcactgcttgtatgatgtttcccattcatacacctataaatctctaacaagaggccctttgaactgccttgtgttctgtgagaaacaaatatttacttagagtggaaggactgattgagaatgttccaatccaaatgaatgcatcacaacttacaatgctgctcattgttgtgagtactatgagattcaaatttttctaacatatggaaagccttttgtcctccaaagatgagtactagggatcatgtgtttaaaaaaagaaaggctacgatgactgggcaagaagaaagatgggaaactgaataaagcagttgatcagcatcattggaacatggggacgagtgacggcaggaggaccacgaggaaataccctcaaaactaacttgtttacaacaaaataaagtattcactaccaaaaaaaaagnnncncaanaccncaaaagacactgttgcggcgccctggcccgaaaaggtttaacacccttgttggggcccggccccgtgttttgacccgtggcaagcgttcccaggaaaccggcgcgacggggggtcccccaaaaacccgggaccgg

SEQ ID NO: 559579 - DNA, 645 bp, Homo sapiens
aatgggagatagggtcttaactctggtccaggcgggaggagtgcagtcgtacagtcagggctcactgaagtctgtgaccccgctgcctcagcctcccaaataactggggccacaggtgtgcaccacaactctcagtctaatttttaaaattttttatagagggtggggtttatactatgcgtggtccagaacgtggtcttaaacctccgtgggctcaaggtgatcccccgtgcctgggcctcccaaacgtggtgagattacgggcatgagccaccacaacgtggccgtgaaattcttaagggatgggagtgtcgatgacagcacctggcatcgtgggtgcctaaccgtgggagacggaaggaagcacgccaggggaagtgtttccctgtggggacaaggtgctaagtatgggggagcccatagcccctgtgagatagatgggctacttggcctttcttctggacctggtctggcagaaggtgggattgggggtaagtggtcttgagggatccatttagtcaccctcaaattaagattttaacttcatcatttctggggcctgcacctccaagataacaaagaagaagcatgggtcgtgccaaagaggtccacaaccaggtgtgcacggttcacttgcagcccatt

SEQ ID NO: 559580 - DNA, 189 bp, Homo sapiens
ctgaggatcacactacagcagctatccagagtacatcaaagctgtgagactatgaatgtatacagaccaccaagctcagtctatcccagtgagtcagcaagacttaaggcattgttcagtatttcatgacttgcggtgatttgacttgaaaagaaagatttcggtttggtccaagtaactgaacaactg

SEQ ID NO: 559581 - DNA, 312 bp, Homo sapiens
agatgcatgcccacagcccggtgatcatatgatcttctcagtggacacactcttgagtctcataatgcaaggaagatcccagcagtcatgcacgcagccccttgtaaccatataaaatgccaagccatgttttcatcttcctggagctgcaatgctcctgctggggcataatatagacgtcaatatcttccttaggttcctccttgtggcattgtctcaatggtccggtgcagagggtccacgatctgccagatggcgagagtgtggcccatccatgcccaccggcaggcccattgtggctgccatcccttt

SEQ ID NO: 559582 - DNA, 1791 bp, Homo sapiens
gatcttgtggaggagtgcacagtcaatgcctgttcaagattaatcattttccctgtgcctatgactgaggctgtttctcacatcctgcccctggtttgcctgtcccaaggatttcgtctgaagggcgggacattccccctgcctcttcgcaccacagccagagcctgccattaggaccaatgaaagcaaagtacctcatcccctcagtgactaagaatcgcagtatttaagaggtagcaggaatgggctgagagtggtgtttgctttctccaccagaagggcacactttcatctaatttggggtatcactgagctgaagacaaagagaagggggagaaaacctagcagaccaccatgtgctatgggaagtgtgcacgatgcatcggacattctctggtggggctcgccctcctgtgcatcgcggctaatattttgctttactttcccaatggggaaacaaagtatgcctccgaaaaccacctcagccgcttcgtgtggttcttttctggcatcgtaggaggtggcctgctgatgctcctgccagcatttgtcttcattgggctggaacaggatgactgctgtggctgctgtggccatgaaaactgtggcaaacgatgtgcgatgctttcttctgtattggctgctctcattggaattgcaggatctggctactgtgtcattgtggcagcccttggcttagcagaaggaccactatgtcttgattccctcggccagtggaactacacctttgccagcaccgagggccagtaccttctggatacctccacatggtccgagtgcactgaacccaagcacattgtggaatggaatgtatctctgttttctatcctcttggctcttggtggaattgaattcatcttgtgtcttattcaagtaataaatggagtgcttggaggcatatgtggcttttgctgctctcaccaacagcaatatgactgctaaaagaaccaacccaggacagagccacaatcttcctctatttcattgtaatttatatatttcacttgtattcatttgtaaaactttgtattagtgtaacatactccccacagtctacttttacaaacgcctgtaaagactggcatcttcacaggatgtcagtgtttaaatttagtaaacttcttttttgtttgtttatttaaggaatgaggaaacaaaccaccctctgggggtagtttacagactgagtgacagtactcagtatatctgagataaactctataatgttttggataaaaataacattccaatcactattgtatatatgtgcatgtattttttaaattaaagatgtctagttgctttttataagaccaagaaggagaaaatccgacaacctggaaagatttttgttttcactgcttgtatgatgtttcccattcatacacctataaatctctaacaagaggccctttgaactgccttgtgttctgtgagaaacaaatatttacttagagtggaaggactgattgagaatgttccaatccaaatgaatgcatcacaacttacaatgctgctcattgttgtgagtactatgagattcaaatttttctaacatatggaaagccttttgtcctccaaagatgagtactagggatcatgtgtttaaaaaaagaaaggctacgatgactgggcaagaagaaagatgggaaactgaataaagcagttgatcagcatcattggaacatggggacgagtgacggcaggaggaccacgaggaaataccctcaaaactaacttgtttacaacaaaataaagtattcactacca

SEQ ID NO: 559583 - DNA, 995 bp, Homo sapiens
cgttgcgtccgtcgtgcgacccgaggctccgctgcgcgtgtgccttcgtaccggggctccatccatgacttcccagtgctttgagcccaaccaggatgccgaggctctgtagactgccatgaggggcttcggctagtgacacaggaggccatactgtggacatacttcaccctacacggacacaacatggcatgagagcaggaggtctttcaccgatgcctacaaagtccctctacgcgcgaaggaccgtcaattgctgactttacaacgtactgacattgacgggccaagctatcgaacgcgtcctgattcgtagggcctgactgacggccacgcatgcctacttcgtgactgccaacacgaaacttacaatgactgccactctcgggccactttgggactgactgacgacacgatgcctcaattgcacgactcttgcgcttcccggacccaactgagcccagatgcaccacgctgcgttggccagcactacccaatgactgccctaccgagcgcggaccctggcaaggctgacatcatcgagggcaaaccctctggacaacttccatgaagcatgcttgctggtacctgctcccagaggaaccaaggcaccgacgactgaccgtacatgtacgccgaaggaaccctgagataccaaccacaggcactgtcccaggcacccgtactaccgcaagccaaggggcaacctcgcaacactcgcgcgaaacacgattgcacacccccagacacactagacacaactacgtctgcacccaaacatccgccagcgcaaacgccagagaattccttaacggcaattggaatggtacggacttgagcgtaattcacgacaacgaaccccaagcagcgagcaaccccctgacatggcaaagccccagtccataccgacgtgagcaacccatgacatacgacccaacaccctcgcccacaaccctacaggcctaggccccgaacctcgacatcgtgataatccc

SEQ ID NO: 559584 - DNA, 2030 bp, Homo sapiens
gatcttgtggaggagtgcacagtcaatgcctgttcaagattaatcattttccctgtgcctatgactgaggctgtttctcacatcctgcccctggtttgcctgtcccaaggatttcgtctgaagggcgggacattccccctgcctcttcgcaccacagccagagcctgccattaggaccaatgaaagcaaagtacctcatcccctcagtgactaagaatcgcagtatttaagaggtagcaggaatgggctgagagtggtgtttgctttctccaccagaagggcacactttcatctaatttggggtatcactgagctgaagacaaagagaagggggagaaaacctagcagaccaccatgtgctatgggaagtgtgcacgatgcatcggacattctctggtggggctcgccctcctgtgcatcgcggctaatattttgctttactttcccaatggggaaacaaagtatgcctccgaaaaccacctcagccgcttcgtgtggttcttttctggcatcgtaggaggtggcctgctgatgctcctgccagcatttgtcttcattgggctggaacaggatgactgctgtggctgctgtggccatgaaaactgtggcaaacgatgtgcgatgctttcttctgtattggctgctctcattggaattgcaggatctggctactgtgtcattgtggcagcccttggcttagcagaaggaccactatgtcttgattccctcggccagtggaactacacctttgccagcaccgagggccagtaccttctggatacctccacatggtccgagtgcactgaacccaagcacattgtggaatggaatgtatctctgttttctatcctcttggctcttggtggaattgaattcatcttgtgtcttattcaagtaataaatggagtgcttggaggcatatgtggcttttgctgctctcaccaacagcaatatgactgctaaaagaaccaacccaggacagagccacaatcttcctctatttcattgtaatttatatatttcacttgtattcatttgtaaaactttgtattagtgtaacatactccccacagtctacttttacaaacgcctgtaaagactggcatcttcacaggatgtcagtgtttaaatttagtaaacttcttttttgtttgtttatttgtttttgtttttttttaaggaatgaggaaacaaaccaccctctgggggtagtttacagactgagtgacagtactcagtatatctgagataaactctataatgttttggataaaaataacattccaatcactattgtatatatgtgcatgtattttttaaattaaagatgtctagttgctttttataagaccaagaaggagaaaatccgacaacctggaaagatttttgttttcactgcttgtatgatgtttcccattcatacacctataaatctctaacaagaggccctttgaactgccttgtgttctgtgagaaacaaatatttacttagagtggaaggactgattgagaatgttccaatccaaatgaatgcatcacaacttacaatgctgctcattgttgtgagtactatgagattcaaatttttctaacatatggaaagccttttgtcctccaaagatgagtactagggatcatgtgtttaaaaaaagaaaggctacgatgactgggcaagaagaaagatgggaaactgaataaagcagttgatcagcatcattggaacatggggacgagtgacggcaggaggaccacgaggaaataccctcaaaactaacttgtttacaacaaaataaagtattcactaccatgttaaaaaaaaaaaaaaaaaaaaaaaaaaaaaaaaaaaaaaaaaaaaagaagagagagagaaaagaaaaaaaagaagaaaaaaagaagagagagaagaaaagaagagaaaagaaagaagaagaagaaggagagaggagaagaagaagggggagagacaaggcgacgagcgcaagagaagaggaggaggtgggggagaggagacggggcgagggggtggagga

SEQ ID NO: 559585 - DNA, 615 bp, Homo sapiens
gataaaggctggacatggagaagaggctgcgggatctggagaatcagtaccggaaagaagaggaagaagccgatcttctgctggtatcagcagacgtactgtctgcagtactcgagacagcggaggatgactctgacaagcgcatcttgtgaatgagagcttggaggctcattctcctccattgcaggagcagctggcgaccaccatggtccatgatcattgtcaaactgctgtggtctgcccagcagtgcgaagcgcagggcccctctcagggtttatcagatcccccagtcgaccgcgaggctgccagggctagagaccctccgtgtgtggccaccagtggtctgacctgaagatgcaggtcggtgaatgagatctgctacgaggtggtcctggctgacttccgccacgggcgggctgagattgaggccctggccgccctcaagatgcgggagctgtgtcgcacctatggcaagccagacggcccggagacgcctggagggctgtgtgccgggatgtctgggacactgtaggcgaggaggaatgaggtggagctggcaatggtggtggctgtgacgcaggagcccgaggagtgatgtgggactccgtgcccat

SEQ ID NO: 559586 - DNA, 587 bp, Homo sapiens
aattttctttatatcccttttaaaaaaaaaatacaataaattaaaaaaacccaaaaatattataaacaaaaaaaaaacccaccaatatcccccactacaccaacatcaactcattctcacaccaacaacaaaaaaatttaaccaatccaaaaaaaaacaactccacaccgcaatcctcgtcatagatttcacccatccaacatacccaactcctcaacaacctcataaaatttcttcttcctctcctcctcatccaccccaatacaccaccataatccaccccgacaaaccttaacacctcacatatgaaaaacattaaactaaactcacgaaactcaccccaccccacacccctgttacgacatccacaacatctaaaaaacccacaccataccccaatatatccccctacacatattcaaactcatcactcccataaacttaaaccctcaaaaataaaaaaccactttataaacaaacaattccctagaccttccgctcaatatccaacaaaataacttatattaacccccctattcccctctactaaaccccaccaccatccacactaaatcaaacaacacccc

SEQ ID NO: 559587 - DNA, 1143 bp, Homo sapiens
atctgtttgttttttgttttgcgtgtgagtgcgccgcgcagggtacgcgcaagcagacgggggacgatcgttgatgtacatgttgttgttttcgtttgctgatgcgggtgtgaagtgtccacatttggtgtgctgtgctcgtcctctactcgtccctggcctttcttctgcgagatgctctcggcccgcctcgtgtggcacccaggtttgtggaaaaacccccgggtgtaaagaccgtgttccgcctgtgggagtttgtcccacgcttttccttcccgggtccggttccctgtagttcctgccgtgtcccacgctggtgtagtctcccgccctcctatgtggatggtccaacaggtttgtctttaaaagtcctgtgacgcatgtgtgtcccatgtgggcagatcctggatatcctggtttcacggggcctgatagatgagggcccagacctttggtcatcttcaaggaggtcatacagctgccccctgacgccctgcgctcccaagcagggtttccacctgtctgagggccgaaccttatgcgtatcccgtatgcccagaccgactccagatatccagttgccccagatggaaaggccacccttcgtgggaacggggacccccagcgggagaagaaggaagccccaggatcccggaggaccctacgagctcaatgcttgttccccaagcgttgttccaatcccagttccccctggcgttctaagagagagtcccgtcttgggtacacccgggcggctcatgtaccatctgcccttctgtgggagatgttgcaccacatgaggtcacccagagccggagggccagcttctccgatgcccctgtccagggctttgtagatcaccgcacggacacacgccctgtgagattctcctttgcccagaagtagcaccctctttccccccactgcctgcccctttgcccctgttctggggccacccccttcttcccccttggctcagcccccctgaaggtaagtccccccttgggggcctttttggagaccctgtgtgagatgagtggtcgcccacccagccttgtaccccgagtctgtcccccagaccttgcacctggcgctgttaggcccggaattaaagtggctttttgaggtttggtttttccacca

SEQ ID NO: 559588 - DNA, 424 bp, Homo sapiens
  misc_feature (232)..(232): n is a, c, g, or t
tcaccatgtgtctctcgcagctgcgacccgaccatgaccatcctgcaggccccgaccccggctccctcttcaccatcccgggacaccggcggggctccggtcctgagatcttcagcttcgaccctctcccggagcccgaagcgtgccctgccgggcgcccccatcgccttctcggagtgggctacccggaaaatgcgcaaagcacaggactagaggttgcttctacacgctnccgaacgtttggtccccggtgtccggcacaagggcgttgccccaagtgtccaggaagggaaaaccctgaaaatccccaaaggaacccaagagatacggggccatatccttcgtttgtccgttggccttagtcgtacaacccaaatttcaggtccttttactttgcccccaagaaatttcccctagaaattgg

SEQ ID NO: 559589 - DNA, 260 bp, Homo sapiens
acaaacaacatgaagcacatggcttggagataacatggggcggctcccatagcaacaagaagcttttggcctccttgggaatagacacccgaaacattctcttcacgggcaataagaagcagcctgttatagtggccatgtatgcagcaggattgggtatgttagagcccaccaaggaatcactgaaaccactttctgctgcagaaaaaatagcttccatcggtcagacagccaccatgtgcttcatgttggttgggtac

SEQ ID NO: 559590 - DNA, 369 bp, Homo sapiens
  misc_feature (11)..(11): n is a, c, g, or t
  misc_feature (85)..(85): n is a, c, g, or t
  misc_feature (98)..(98): n is a, c, g, or t
  misc_feature (304)..(304): n is a, c, g, or t
aaaacggagancactgccactcaacatcaggttagcttcttaaaaacttagcttatatatgtgtagcttaaaagaattctgacanccggacgcggtgntcacgcctgtaatcccagccactatgggaggccgaggcgggcggattatgaggtcaggagatcgagaccatcctggctaacacagtgaaacctcgtctctactaaaaatacaaaaattagccaggcgtggtggcaggcgcttgtagtcccagctactcaggagactaaggcaggagaatagcatgaatccaggaggcagagcttgncagtgagccaagatcgtgccactgcactccagcctgggtgacagcagtgagactccgtctcaaac

SEQ ID NO: 559591 - DNA, 183 bp, Homo sapiens
ggtcgcagcacctgctcctttctatctttcgggagacagcaggccctctacagccacctggtctcttcttcaccttccccacccctgtccagcgctagtatctcagtctccttccatctatcttctccatcccactctgacctctgattgccctttactctgctagccctcagctctaagaag

SEQ ID NO: 559592 - DNA, 144 bp, Homo sapiens
tgcttgtaggtcgatctctagcacggatcccccaacttcgatcgcggagaaacttggtgtgcactccaagtacacgtgatggactatagtgtttacagttaatgtattcaattgcatttccttgtgtcttatgctctaaataac

SEQ ID NO: 559593 - DNA, 227 bp, Homo sapiens
attgcatggagctgcagcagtcatccgtcagcccagaagccaatacagaaaacaaaaacaatcacagtttctcatcagttacctagaataaaagagtagaccgtgaacaagattcccattttattaaaataattaatatatttccaaaagaatgactgtaatttatctctaaccattggacctaattgcccacagtttgatcccgctgcagagagtcatatccatcc

SEQ ID NO: 559594 - DNA, 878 bp, Homo sapiens
  misc_feature (747)..(747): n is a, c, g, or t
taatatcccctttcttaaaagacaagctagtatactggaaaaagaaaaaaataataataaaataaaaaccaagacaacttttagtaccctcatctttattggggaaggggagggggaactccgtgggtcgcccaccctcacccgtgctcttcccagctcagctaagctcgtccctcggtgccccccctttggggggcgatgggagaggaccagggtgggcgtgtggagggtttcgtggaactagcagagggtggtgagtggggcagggtggagggtgggagcataccgtgggaacccggggctcgggggaaacctcgggggtgcccaggacgggaaaggggcacgctagcattggcggtgcagtgccgtaccagggttgaaagggctgtggcccaggcagcacgtgtcggtatacaccattgtctcaaaacggggcgaagggccggggctgctgcgcttcgtagaggccttgctcccttgggacctgggtctcccatctggaccctccaaggccttagctggcctcacatgtcggggcaggtatccacctaaccagggctgcagggcaggatggatgggaagccggcgaatggggctaggaagaacgctacaggtggcttgcgaatgttgggctggggccccgaccggtgggcacctataaatactatggaagttatagccaattcacgagctccgactagtgtctgtgatggtaaacattcctatatactccggaccttggtatcnccctgtggtcccactaacaaacaacatgcaccggaacccagataaacagatatatccaatacaccacctggtggctgacaaataagcacaatactgattacctaaaaaatgacacgggacaacatacgaca

SEQ ID NO: 559595 - DNA, 679 bp, Homo sapiens
gtcaccctctcctgccctgacgtgtcagcctgttgcgaagtgcagtccgaggtcatagatgagtgactatgagagcgggcacgacgagtcacttcgaagaggtgatgatccgcctcctggattcccagcagcacacggaagtctgactctcgaactcccgccaaagtgcctgagctttagtgaatctagaggtcatatgagtaatccgcgctgttcttagcatcactgcattcactaaactttttatggtcagccgaatgaggcatagcatgtgctgagatccagcgaccactgagacggtgctagccatttccagtgtcccaactacgtgctcttcgtgatgctcttgatcggctgtgccatttcccaacgtcttttgggatttacatctgtctgtgttaaaataatcaaacgaaaaatcagtcctgtgttgtcagcatgattcatgtatttatatagatttgattattttaattttcctgtctcttttttatgtacattttatgtacagatttgatttttcatagttttaactagatttccaagatattttgtgcatttgtttcaactgaatatgggtggtggtagtgccattatctagcaccctgatattatttcttactataaccagggttacatactgtctatttccactgaagtgtgacattttgttagtaca

SEQ ID NO: 559596 - DNA, 131 bp, Homo sapiens
aatcatctcgcacctgtatccggggaggctaattatgataagctccatctgcctacgacaaacagaccttatatcgctcattgcatatctctttcaatactgccaccattgccctgcgtattaagcagtcc

SEQ ID NO: 559597 - DNA, 82 bp, Homo sapiens
ggatttgctggtgcagtacaactaggcttaatctcgaattcaagttctaacgttagaagcttgaattcgagcagtagtagta

SEQ ID NO: 559598 - DNA, 617 bp, Homo sapiens
ggcatgtaccaccatgcccggctaatgttgtatttttagtagagatggggtttctccgtgttggtcaggctgatctcaacctcccaacctcaggtgatctgcccgcctcggcctcccaaagtgctggaattacaggcgtgagccaccgcgcccagcctacaggtgtctctttgaaaaaaaagtaggtttattttaaattctttaataaatcttcatattgctttcaataggggttgaactaatttacattcataccaacagttcccttttttctgcatcctcaccaacatgtccctttttttaattttttaatagtagacattctgactagtgtgagatgatatctcactgcggttttaattgtttatctgattagtgatcttgagcatctgctcatgtgtgttgccacttatatgtcctcttttgagacgtatctggctatgtcctttccccactttttaatgcggccttttttcttcttaataagttccttatcgattctgggcaattggccctttgtcacaagcttagttctgtatttcctccggtttggacgttgcctgtccctgggtagcttcttccctatgccaacgctcttcgcttaatttcccttctct

SEQ ID NO: 559599 - DNA, 330 bp, Homo sapiens
cattagctcttatactttgattaaaatatactttaaaaagatgctgttagtggccgggcatggtggctcaccctgtaatcccagcactttgggaggccaaggcgggcagttcgtgaggtcaagagattgagaccagcctggccaacatggtgaaaccccgtctctgctgggaatgcaaaagttggctgggcgtggtggcaggtgcctgtggtcccagccactcaggaggctgaggcaggagaatcggttgaaccggggaggcggaggttgcagtgagctgagatcgcgccattgcactccagcctggcaacagagcaagactccatctca

SEQ ID NO: 559600 - DNA, 184 bp, Homo sapiens
  misc_feature (9)..(9): n is a, c, g, or t
  misc_feature (12)..(12): n is a, c, g, or t
  misc_feature (18)..(18): n is a, c, g, or t
  misc_feature (29)..(29): n is a, c, g, or t
  misc_feature (31)..(31): n is a, c, g, or t
  misc_feature (41)..(41): n is a, c, g, or t
  misc_feature (53)..(54): n is a, c, g, or t
  misc_feature (74)..(75): n is a, c, g, or t
  misc_feature (78)..(79): n is a, c, g, or t
  misc_feature (95)..(96): n is a, c, g, or t
  misc_feature (114)..(114): n is a, c, g, or t
  misc_feature (127)..(127): n is a, c, g, or t
  misc_feature (139)..(139): n is a, c, g, or t
  misc_feature (149)..(149): n is a, c, g, or t
  misc_feature (157)..(157): n is a, c, g, or t
aggggtggntcncgcgcnactggctattncnataacttatnattagcaccacnntacctggcacactggccttnnctnnaccgagtgaacatttnnaaatagagcacacttcanatactgccgagtncacatgtaagtnagagtgttcnactctagnaaactgtgtagtgcaaagccaagatat

SEQ ID NO: 559601 - DNA, 150 bp, Homo sapiens
gccaatggcagcagttagctgggggcttctgaagggatgcacatctttagcagatctccctcatgtacttatactgttttacacagtggaaacaggtagagcccctcagaggatgaagggagtgggtattgcatcagctttattgtctgg

SEQ ID NO: 559602 - DNA, 532 bp, Homo sapiens
tcgtggttgtagtccggcgagaataccaaaaaagcaaaaaaaaaaaaaaaaaaaaaaaaaaaaaagtgtgtgtggggggccgggggccccgcgaaaaagctttctaagaacaatgcgggtggggggggggggcgccacaggtaggagataagggacgaacatggggcacaaagcgcgggtccccataaggagaagactccggggccaggagacaatagggggtgggagatttcttccccaatataaaaaagcgcgccggggggggaacacgggggcggtcctgggaaaacaacctccgagagagggggaacacgcgggagagggcccatagacggggggattcatatctacacgaggaggagtccacaagaggaggaagccggaaaaaatccaaaaatattaggccccgggaaaggggggagaacaacagaaagaaacaacaaacaacacaaacaaacacagaacagcaaaaaacagaaaaagcagaagacaacaaaaataaacaagctacaccgaacaatcaaacaagaaa

SEQ ID NO: 559603 - DNA, 294 bp, Homo sapiens
agacctagaggatccccgctacaacgccaaggcgattagcacatcgccgaggccacgctggacatttgtggtggtggcgccccgcgcgcccgaatcgaggaccgggacattgcggaagatgcgcgacaccagttcacggctttctgctcgttgccgcccggccgcttcagggcccaggcccaggcggccagatagttccagcgggcaccgcccgaggtcttgggatttggcgtgatcacgctgaccccgggccgggccagatcgtcccagtcccggatcgccttggcgttgtag

SEQ ID NO: 559604 - DNA, 198 bp, Homo sapiens
  misc_feature (7)..(7): n is a, c, g, or t
ggaactnttgtcgtggtagggacaggcgggtggctgggaactttgtcgtgggtagggacaggcgggtggtgggaactttgtcgtgggtaagggcaggcgggtggctgggaactttgtcgtgggtaagggcaggcgggtggctgggaactttgtcgtgagtaggggcaggcgggtggctgggaactttgtcgtgagtag

SEQ ID NO: 559605 - DNA, 166 bp, Homo sapiens
ataaagagccgatcatgccagtcttctcccatgagagcgatctaaagtagtctgacatgctagtagattatcctagatgtcgctgtaacagtggggaagacggacggatatcctaattgattagtgtctgtttcctacacatttgacattactgatgggacgaaga

SEQ ID NO: 559606 - DNA, 489 bp, Homo sapiens
  misc_feature (27)..(28): n is a, c, g, or t
  misc_feature (30)..(30): n is a, c, g, or t
ctaaggcacaagaggctaagaaggtcnntncagagagaaagtcactgtaggtcagtcacagcaggccaggcccaggacacagggttgagcattttacgggcaggtaagaggcttctgggaaacttggcctctgaggcaaccctggcccaggatggagaggttttcatgtgctgaagtcaaactggcccacattcctccatcctgaaaggctaaggaaagcaaccactctaacgtcagactcatagccgtgtcatccagccaagatgctacggccacttcctgacaagctccgaagtcctcagctgaagggggaactgagaccccttggctaatggctctgtggcctgaggtttggtccccagccctggcagggcagggccgccataggtcagtcctccccgacaccgtaccatgtctgccagcttcttgaagccggctggcccactcgtccagatactcgtaatcttggtctgggccggaggcagagga

SEQ ID NO: 559607 - DNA, 494 bp, Homo sapiens
atacataaacatgagcccagtggaatatggtgaggggtgatggggacacagattggagcactcaactcaggcacaggaccccagcagaacatgacccaggtcacatcctagagattggcccttgcagactttctgaagcctcgtgattctgtcatcttaccaaggtgtgaacccaaacatcatctcctgaacttctgggcacagagctctgagcaagcttcaatcatgaacccattatggagatggggagttaggtgcagacagactgctgctcagtggtagaaccagacatctgacccaggccacctgtaccagcgaccctgcttttagccagacagctcagtcgcacgcaagtcatgtggggccatcaatatatttatctaagatagagtctcacttagtaggccaggctggagtgcagtggtgcgatctcggattactgcaactaccagctcccgagtacaagcgacacttctgcctcagcctcgcaagta

SEQ ID NO: 559608 - DNA, 101 bp, Homo sapiens
catgagctcgacctcatgcatggcccttccccaataccagacactggcatagagccaactgagataaatgctatttaaataaagtgtatttaatgaatttc

SEQ ID NO: 559609 - DNA, 782 bp, Homo sapiens
  misc_feature (104)..(104): n is a, c, g, or t
ccctacgcgatccggctgagatggtgctgcgacgtgtgttgctccggcgtcgtcggaacacatcatttattaattaccatagaatccatggatcaaatcttagnataaattctttttagaataaatcgcccgagacataaagaatttacgataatcaaatcctgtctgatcatcccccagcctgtgtaggacttatgtctagtacttgtgttatatcgttccatcgtgtttcatcatcacatatacccggatagaatcaagctcgcatgaccggagtcctggaccagactcagtcgtgtccgcctgccagacgagctttccgacgacaggaatccgtagcatgatccgagtgtccttgtaccacggtgtagatccactggacaccttgagctactcagtcacgacaccatcagcttactcactcagggcccgcggacattgcaccgttgcctaggtcgcttatggctgggtccatgactggtgtggattccggcaactcgcttcggttttacttggtcctggtgacccccgctaaggtaggtccatgttttaccccaaatcatccctcggggtttggggctatatgtgtctttggttcgcgccctttacctttggtccttccctgtgtcgatttcatcctcaccgccgttaacttggaacccttcttctgctactatcatctctggcgagcaccaccactctgttaaagacacccacggggaacaaccccaacggcgtcgcaacttcctatcaaaacgcgaaacaaccccattttacaaggg

SEQ ID NO: 559610 - DNA, 80 bp, Homo sapiens
cccctcttccagagcttccacggtgctggcaaagtcctgcagcttcttcttcgagtcggagagctacaaggacagcgtca

SEQ ID NO: 559611 - DNA, 715 bp, Homo sapiens
  misc_feature (612)..(612): n is a, c, g, or t
  misc_feature (633)..(633): n is a, c, g, or t
ccgatgccgcaggcctggcttaggcaagattggagataatcagggaatcaccggcaccaagatggaccgcttggtcaaggacatgaagatcaagatactgttggagatctatatcttgtccctgcctattaaggaattagcgaccattgctagctttctagtagcctctataaaggttgagggactgaagattctgccagtgcagaatcagacacgtgccgttgagttgaataagatcatggcattacgttgatatcggcgtcaacattgttcacgtgctactggtagacaagggcatgtcggaggtgtacgtactcatctaggtagacatcatcctggccatgctctgtattgtcctggacgcatagactactgacgatacaagatcggccttcctcacactaggccattgagtggtgacaggccgttaccgtatattgcgtgccacgcatcagccatgtaatcatagcagtagcattcgttccgcaattgtgcctactatagctattatagatggctggtaacgaggatctgatcaaactaagcatttaagtgactgacatcgtggtaaattaggcaaggtcaccttgaagtcctgccattgactactgntaccacaccctaggctattgnaacagaccggatgcaccacatttactgataatagtcactgacgacttcttttaaaccgaacgtcctccgctagcgacacagc

SEQ ID NO: 559612 - DNA, 431 bp, Homo sapiens
  misc_feature (163)..(163): n is a, c, g, or t
  misc_feature (195)..(195): n is a, c, g, or t
  misc_feature (223)..(223): n is a, c, g, or t
gcggtcgtctgaggacccagtctttccctcaacacatgtgctaggagatactaccatagaaatcaatacagtacagactaccggataggattataacagaaaaagcagcattacatatgaataggaaatactcctggtgtatggcattcatttctcatatatntattgagcacctcccaatatagagcatacatntaagcatgttacatagtgggcacttaanatattgttgaatattatcagtggataagacagacacacaccgtctgtactcccaaagaactgatagttttattggggaataaagctgtagaacttaatcattacaactcagtggtgaaagtgctgatttgtagatgttagagtagtgtgcaggcttgatcgggacagaaagaatgaatagaattcaaatttgaggggaaaagaccctg

SEQ ID NO: 559613 - DNA, 117 bp, Homo sapiens
ggtttgggcaggtgctgggtttttcgctcggtcggacttcggctcttcctcgggcagcggaaacggccgcgacgtcgagaagtggcctaaaacttcgacgttggttgaaagaaatgg

SEQ ID NO: 559614 - DNA, 129 bp, Homo sapiens
caggcgcgtattgggtcatggagtgtcagcaaagaccaaagatggagtgagagaggttcagaaactggcgtacgtaaagagctgtgctgccaaggtatacgtgcgggagaatacaatctggtttccttg

SEQ ID NO: 559615 - DNA, 161 bp, Homo sapiens
agttgctaccccacaaacagtgtatagccagtgcaatgtgtcttgtatatgtaggatctgggtggaatgtgtcttgtagaggaggaactggatgtaatgtgtctgcagaggaggagctggattgatattgttgtctgtatgtagaggaactggatggaatg

SEQ ID NO: 559616 - DNA, 372 bp, Homo sapiens
gcaggatcccccgtagacagagttgtgcaggtagaggagatgggagattgtgactgacttaatacgtggtgtgtgaggctgatgaagggggcccagctgtcagtgattgggggtggggactcagaatatcccataagcagagaaggcaaaaggagaaaaaggagatttgtgtaggtgtgaaatcctggaaggtgccttgcagccatagctcctcaattagcatgaggaattgagatggattatctaagggcgtggggaaggggtaccaggagagatctgagacaaggtatgaagtaaaagatttaagattggaagtggagagtgtcatgggccagtgcctttcggatgggtgacttctggaattcttgttag

SEQ ID NO: 559617 - DNA, 221 bp, Homo sapiens
cgagcgagctattacattataactggacatgctatacattcttgaagttagttgcaatacagaatctgacctataataaactttcctgttacattaaaatccactgctttattttacattatgaatcttttacctatgcacaacttttttttttttttgggtttttttcccttttttgggccggcccccggggttttgggagttccccgggctaaaaaagc

SEQ ID NO: 559618 - DNA, 411 bp, Homo sapiens
gtagcttgaaggacctggctgcgcaggcacatatgtgtgccaaaactgatagaacagtacatgcggagagggaacatgtattaaatagacatcatatatcactagaattgagtgaaaaagaccaaaccctcagggcatgcgagctgcgatgaatgaggcgcgctaaaggagaaggtgaccggatgaccctacaagacagcctgaacacatatcagagcccggatcgaaggcactgcctgtccctgaagacctggggctctaagtcattcacgtgcggggccggcgctccgcattcaatcttccggcataccactcccctcggatgtcttctgagacaaggacagcccacgtccaccaaccccactgcaggcaaaccggcgcctgcctgatggaggacagtaaaggaaggaa

SEQ ID NO: 559619 - DNA, 235 bp, Homo sapiens
gagaaaagtgtggacagtaagaagggggcaaagcaataggatggagctgccaaggaacttttaagggtaagtgttcagcctctattcttaatttacaacagagatggggaaggaccagggagcaactccgcacatggtggtttcattcattttcacagtgttacacagtacacatcgcgcttattcaaccctggtaaaattgggtccagagacgcagttgtcactctcctaaatc

SEQ ID NO: 559620 - DNA, 483 bp, Homo sapiens
ggttgtcgttaactgcgggctgcgttgactgaggttgcgaggtgaaaaccatcataggctcgtaatacaatcagcctgaagacagacaggtggtcacctccaggcaacatggtgagactcggcccctccagcagctactgcactccgtcacgggtggggtccgctgggtgccacggctgaactgtgtcccctcccaagatgcacgtgtggaagttctaagccccggcatcgcgcagtgcaaccgtgtttggaaacagggtctttaggaaggcgataaaagtaactggggtcactagggcgggccctaatcccataggaccagcgccttacaagaaagagggcacagataacatagggacgagccaggtgccacggccgtcctgtgggcacaccagtctgtggcgccgtgttggtccccctccaacgtggaaaggcccggtcactaggtcactcattaccgccaatcgcagacccaagtctggt

SEQ ID NO: 559621 - DNA, 110 bp, Homo sapiens
cacgagggggcacgctacgagagtacaatgtattgggtcgctgcctggccacccccaagtgacacaggccgcgcctctatcgcatgggaatctttgcgcctaatcatgtc

SEQ ID NO: 559622 - DNA, 202 bp, Homo sapiens
  misc_feature (61)..(61): n is a, c, g, or t
tagaggatcctggtgaacaagagatctgtgagtgccaggggctgcatcatcggggcctccntcgaaaggtcccaagctgggcatggacataacgtgctcatgtcgcccagttgctgatggagcaggtggcagctgagggcagcgggcccttcctgtacctactctaccagcatttgttcttcaactttcacctccgtactgg

SEQ ID NO: 559623 - DNA, 323 bp, Homo sapiens
gagatggtcccaggagacccggtgggggaaacagacatgaaaacagttactctcaatatagggttgtcgtgggcccgtaatcaaggtgaataaggaggctggggcgcgatggctcacgcctgtaatctcagcattttaggaggctgagttgggtggatccctttgagcccagaagttcaagacaagcattagcaacatggcaaaaccccggtctctacaaaaacaaaacagaacacatcaaatacacacacacaccaaaatttagctgggtgaggtggtgcatgcctcttgtctcagctactcgggaggctgaagtgggagga

SEQ ID NO: 559624 - DNA, 927 bp, Homo sapiens
agaaaattagctgggtctggtggtggatgcctgtaatcccagctactcgggaggctgaggcaggagaattgcttgaacccaggaggtggacggtgcagtgagctattactccagcctgggcaacaagagcgaaactctgtctcaaaaaaaaaaaacaggggggggggactttaagagagtggtgatgacccaaactgttgaaccaattatgtttcggcgtggggggtgtcctaaagctggttgaatcctgaatgggttccatacacgtggaactacgctgggcttaatggcagccagcgtcctgggggcaggcagaaccttatctcattctcaactcgtaactcctattggcgtgacttccaacgcggtgcaggatttctcagagcagaacctgtgctcctatacgggcccgggcgctttcaaggaatcggggtgccccagtcctctatcgaggagcctggcccatacctgtgggcaaagccgtgccatacccttctccagagcgtgcggacacatctattagattccccagcgtggttgtacacagacgagctttcaaccccctcttccaccctgtggtccttacacgaaccctataggggtgacagtgttgcgagctgaactattgctcagtggccctcaaaatagaccaagggggggctaacgctccgctagcgcttctcaacattctccacgagaaaacaagtctgagacactgccctggaagggggccagttgtgggctacttccaatttacctgtggctgggacgaatcttccccgacaccaagagcctcttcagcacgtgggctcacacacagcctgtacacaggcgaagaagaaactctgtgggcataatgcggagtacaaaacccccgatctttcccctatattgccccctgcggcatctatggaccgtgttactcgc

SEQ ID NO: 559625 - DNA, 280 bp, Homo sapiens
cgtaccgtcagaagcatctgagttcaggagatcgagaccattcctgataacacggtgaaactccgtctctactaaaaataaaaaattagctgggtgtggtggcgagcacctgtagtcccagctactcaggaggctgaggcaggagaatggcgtgaacctgggaggcagagcttgcagtgggccgagattgtgccactgcactccagtcttggcaacagagggagactctgtctcaaaaaaaaaagaatttgtaagatttcaaactcaggatgcttcttga

SEQ ID NO: 559626 - DNA, 442 bp, Homo sapiens
tcccccactcatgccgcgttcctggagaaccaggcatgacagatggcttatgttgcttagaacgccactgcaggtagaacgtgcagcatattcaagcgcacttatgagaattacagcctactgatcgatccttcagggcttccctgcttactgtgtttcgcaatttctgcttggagatatgcgtcttgatgattgcttggctatgcatatagcagggacagtgcgatccctgaaccgtatctgcggcagcactgtcgaagttgaggcaagattctctttcttattttgcccccctttggcgaggctatcatacatttatattttcaggaggagaagtcaagtccttacccccagccattccctgtggcaaaagggatgtaggtccattgcttcctttttcttggttgattcactatagtttgcttgctttaaacgtgtggga

SEQ ID NO: 559627 - DNA, 901 bp, Homo sapiens
gccttgggttctgtgtgtgctggctgcccggtggctctggccccgtcgggccgttggcccacgccgtcggcccctgagctccggtaggccgccgctggaggagctgttcgtccggggtgggctcgttggggatcttccttgatcgccacgcggagtttgaagccctattttaatcgtcagtgcagcgctccgatcttgcgtgggcgcgcagatagagaagctaggtgcaccatggagaatcgagcatcgtagtctgcggggcagcactgaggcatcgttggctggcgagcggatggagaagtgaaggatttacaggacaatgttgcagagaatgaaatcactttgtgtcaaccacagcaaaaataactcagctgaagcatcagattatcttactttttggttccctcaggaagaaacacgatgacaacatgatttgatcctggaagtaacttgcaggagttggaggtcaggaaggcaatcgttgtttacactcacgagatatcttgatatagtatcatctaaatatgctggatataaggacgatggccatatttgaaaaccctgcgaatatgttccagggtgacaatagggtcggcctctaaggacaatgcctatcttggccaagcacttggggaggttccaggacagaccgtattagcgacacctggacaaattgtgagaagcgacggtgttcgacaagaaagataactaaatggacgtgcctcaaagaacagaaaaagcggaaagggccgcgattccaatagctatgcaacccagtgacctgttatctagtataaaccccgaatcaaatgacgaataattctctgggaataacatccgaaaaattggagaattggaccgtaagcgaggcattggagttgtgggcgaacaagtaattcag

SEQ ID NO: 559628 - DNA, 338 bp, Homo sapiens
  misc_feature (19)..(19): n is a, c, g, or t
  misc_feature (53)..(53): n is a, c, g, or t
  misc_feature (136)..(136): n is a, c, g, or t
ccacgcccagctaattttngtattttttagtagagacagggtttcaccatgtnggccaggctggtctcaaactcccaacctcaaatgatccggccaccttggcctcccaaaatgctggcattacaggcgtgagcanccacacccggcttacatgcattttttatcaccacaaactgaaactctgtacccactgaaaaagagctccaaattccaccctcaccccagaccctggtaaccactatttcactttctttctgaatttcccttcatatgagtgggatcaaacaagagttgtccttttgtgtttagcattcttacttagcaagccatcaactgct

SEQ ID NO: 559629 - DNA, 111 bp, Homo sapiens
ggtcaagggtatacgagtagctgcgctcccctgatagaacctccaaacaagctctcaaggtccattgtaggagaacgtagggtagtcaagcttccaagaactccagaccac

SEQ ID NO: 559630 - DNA, 127 bp, Homo sapiens
ggatctagaggatcccatatgctgcactttacaacactgcactacatgactcaggaatcggctctacgaatgtgaagcgagaggaaactagacctcatcagcccaacatcaaagatcaccatcggaa

SEQ ID NO: 559631 - DNA, 371 bp, Homo sapiens
ggctaatgaagacatttaccatgtttatacaaaggaggcaatcactaagggctgatgtaaggataaagtaaacgcagcctgggagagaaaggaggagggatccagtgcacgaggagagttcagaaaaagtgcctcagatagtaaaggcgggtgttaaaagggcaggtgagagcatgaatatatgtagagacagaggagaaacgttaccaaattcggtttaaattaaagtggatacagggtcaaaaaatagcacgtgaaaaatgaaaaatccattgggaatattctaaagacagaggtagcagaaccttaattctggttacaccgcaaaactagccaacacttatttagtttgaaaaaaatggtctaaacac

SEQ ID NO: 559632 - DNA, 961 bp, Homo sapiens
cgtccgggtggcgcatgcctgtaatcccaacactttgggagaaccgagggagctggatcacctgaggtcaggagttcgagaccagcctggccaacatggaaaaactccatctccactaaaaatacaaaagtagcctggtgtggtggcacatgcctgtaatcccagctacttgggaagctgaggcaggagaatcacttgaacctgggaggtggaggttgcagtgagccaagatcacgccattgcactccagcctgggcaacaagagtgaaactccgtctcaaaaaaaaaaaaaaaaagatgtttctcattttttcatgtaatcttatccaagcaactgtcccattggtcagcaagtcaattttccataatggggattttcccaaaatatttttggaactacggctatcaatggctacttaagggtacgggggacatgtggtgcggggagtgtaacgggaattcaccagctatcttaaatttcccagggaaccttggaagtctatcactctaatgaacggtctgtcctctacatgacctttgtgcctcaccttggccccaagtcagtttaggacacacaacagtcattggacgcaaggacactgcagagagttcctacgtcacggggtactttccgcggtgacataggtcagctgtaaggcctgcttataaaatttgctcactgaagcagtctggcttttggtacccctgtgtccaccttcttgttcaaaagcaaacgtggcgtggatagccaacggtactccggatcggtggtgaatcagcccaccatttggtgggccaccgggctgtgaaactacggatacggtggaaaaggcagacgctacaacgggaagcaggtacacaaaaaacagggggcatccgagcactcgtgctgcagcgctgtaggcgccagcagactgttgcctctggtcacgaactttgtgtatatacacggagaaagaaa

SEQ ID NO: 559633 - DNA, 230 bp, Homo sapiens
gccggacccgcggttatgtcttacggaataggtgttggtattgtgtaatcatactaaataagtaagtattcacggttacatacctcttcttgggtgctgtggacttagccattctcccaaatcatttgtatggcatttattaatcacaggtctatgacccccattaaaacagacactctattgtcaactcgttctatcctgtcttacatgagcgtaagacataaccgcgg

SEQ ID NO: 559634 - DNA, 842 bp, Homo sapiens
tctaaaatgagaactatcgtctgagcagagcttgctgtctctccatatgcattgaggccagcactgaatacctgacatggctacatttgtcaacatcatgttgttggacttggttgtagccgcgagtttgtgacacataacgtggtccctcagtccgtaaagcatcatcccctggaatgtggattgataatcgatattcgggaagaaatatagagtatcatcacataggtgtagagtgagagatgtagagcaattaaatgtggttctaaagactctatgtatggcttcagtgttttgaaaaatacatcgttgtacccagagctaattttgaagtgccctcactattgatgcatttttaatacagcaatcaccggagacttggtaccatgggacattgtctgatgatcattgctggcatgaagcgtgttgcggagatcattctgcaacccggtttaccaggtttattaacttgagcttcagtgtcatcttttatccagtttgactacaaagatatttcagagagcttcatgagtggatttcttcatggtgtccatttatttagcaagctcggggactgttcacaagttacagttcgtcctgacatatgtggtccttggcagatggcttggggttcttccggtatacacgtgtttgctcagattcttttgcattcctcattctgcatgcttttctttcagacgatttggcacatcaatcttttctaaccccattgagccatttcttgggaagtgtcattttcatcacgtcataatgtcaggccagtgaaattctgcgagaaaaataaaagtgtctgggtagtgaggaaaaataaaaaagaaaat

SEQ ID NO: 559635 - DNA, 667 bp, Homo sapiens
ccctcagccaccaaattctagacagggcttcctctgacagaggtgcaggctatgactacatggctccagggcatgccactcaccctgcagtccccatggccttgggtggtggttatcacgcttctccatcagggggcggtaaagctctttccgaaagtgctgtgattccagtcatgagctatggtgaagctcttaaagaaggggtggcttgaccgctcgtgctgactcatgcctgtactccgagcactttgagagtctgagtggggctgaatcacgatgtcaggagctcgggaccatcctggatagcacggcgaaaccctatctctcctagaatcactgtcgcttagtgtgccgtggtgatgagcgcctgcagtgccagacacgcgctagcagagagcctcggaatcgtttcaatctgtgcggcgaagctagctgagtgcgaagctagcgccacttgactccagcctgtttgccagacagaggctctggcagattacgtggacgacttccttcacggtcacatgccttacgtagcgtgccaactctctcttcgactcggcacaaacttcatccattccatccggcctagggcgtcacttggccttctccctcctctggtcagtcatataccactttctgccccgcctttttacaccctattcctggc

SEQ ID NO: 559636 - DNA, 859 bp, Homo sapiens
agcggagcctgtttgcgcgagagatcgcgagcgtgtggcgatcgcttctgtctgtctacttcagatatggaagctgaggggatgcacgagaggcagccagaacctaccgtcagggtctcgactcgggtgtcatgaccgccccgcggaggatcgagtaagcgatgggggagcccggcttcttcgctcacaggagaccgcagccggtggccggagctggtgacctgacggcgggtgagggatgagcgccgggtggctgctgcatggagatgatgggtgcgacggtgactgtggggacggaaggacttgggtgtcgcgattaccaatggggtatcagaaagatcttgcgcccctgactgatatcgtcgaaacacactgatgtttccgactgcagaatcctgagggaccatgtggactagattgatggacttgactggagggtctgaaatggtgtcagagctgagagcagagcggcgtctgggaatcctttgaagggctctattgccgatgcgatcgaggggagacgtacatgccaagcgttgggagtgtgcgtctggagatagatacagtgagaatgcggacgtagtgcaatatgaagttgacgtgagagaaggactggggagatgaagtagtatcgcttgtctttcctccaaagaatgtagcaaagtgatagaaataaactaaggagatggatgaagcttagaagggaaattcgaggttctgggactgcagtgagcgcagggtccctggcacgcttgacgggtcgcctcagaaagtgtcgaggatgccacacctttactactaaaagtgtgctttgtgatgtcctggtccagaccaggggaaggtccccgagggggaacag

SEQ ID NO: 559637 - DNA, 751 bp, Homo sapiens
gttggcgcgcaacgggttctaggctgcaggctgctcgatggaccctgcggccccggccccggtctcggcctggcatgatatgcagaggcagcaggccgtgccggggtgtggcatgttgctgtaaccagtgtgcccagtgggatgttactggtggacagtgccacctggacggtgcgtggcccccgcagggctgacacccatgctttgctagctggcttgtcggtgcactcctggggtatacctccgttcgcgcgggttgacctgctcttgtgttcaaggagctatggacgacgacgtgctggtcacgagtacgcagttgtgtcaccgagtctctctcagagttgccaggctcgtctctctggcggtttggaccaaaatgcttgcctccccgtgtgacagtctgctcattccctgtggtggcaagggcgtcctgttggtgtacccctaacacttgcggctagatggacacctcagaggcctgtcgctctatctgtaccgaacacaagttcctaccttttggcgcgccgagggccggatattgaccacctcgaaaggggggccctgccaaactggtagctccctattgcactttcttgatctgtacaagtacggcgagcaagtcggtttcgacgagcccctggatgtagttcgagtggcacagggttccgtgggcggcccggggcattggcatcatttcaggccttgtgctcctaagcgcaacgattcattggtacattgtctttggggggcg

SEQ ID NO: 559638 - DNA, 430 bp, Homo sapiens
caccacagcccccaagtagtggaccacaggtatatgccaccatgccagctaatttttttgtatttttggtagagatggggtatcaccatgttgcccaggctggtctcgatctcctgacctcaagtgatccgccgccttgactcccaaagagctgggattacaggcatgagccaccatgcccggccaggtatttttttatagcaatgcaagaatggactactactgtaatttatacaagaaaagaggtttatttggttcatggttctgcaggctctacaagcatggtgccaacatccacttggcttctggtgaagcttcaggaagcttccacccatggaggaataggtaccacatggtgagagagggagcaaagcagtagggagagatgtgaggcttttttttattatatttttatattttttacaccacc

SEQ ID NO: 559639 - DNA, 312 bp, Homo sapiens
tgtacacccagcccccagcacagggcctgtccaggacaagtgcccagtaaacacttgggaagcaatgcaagggtccttccagcagttcctgcaaacagacccccgacccaagcccttccttttgcctcccctgcccccactgctggtcatttttgctggcacagaagttttttccctggttttccagaaatcccctttccccactcagccagagggaggtattaaaaatgcgggccagcccacatcagtccccagcaaagtcctctttaagggatttttgttgcttggagaataaaccctcggattccttca

SEQ ID NO: 559640 - DNA, 483 bp, Homo sapiens
ccatgtcatggcaggcattgttggcgatagggagctccccaatccccaaaagattccgttggagtgcggggggttttttcaaattcaggataattaccttcctctttttgggggccccagggtggccggcaaaattggcccttcaatccaggccaacaaattaagttgggtggtggtttagtgtttgcaaggggcccctccaaaccagtccccgttctttaaggaaaatttcgggcaaaagggggtttaaaaagtggcccgggtgaaggggctttataaggaggtggttttccccccagtgttttttcaatatgaggaagccagttcccgcccccttttgggtttcttttaaaaggaggggggcccccctccccccccccttttttttgggggttgggggcaaattttccaagggggaaaagttccctaaaaatttcaaggggggggggggggggttttcaataaaaatttgggtccccttta

SEQ ID NO: 559641 - DNA, 892 bp, Homo sapiens
  misc_feature (75)..(75): n is a, c, g, or t
  misc_feature (229)..(229): n is a, c, g, or t
  misc_feature (425)..(425): n is a, c, g, or t
  misc_feature (512)..(512): n is a, c, g, or t
  misc_feature (525)..(525): n is a, c, g, or t
  misc_feature (527)..(527): n is a, c, g, or t
  misc_feature (545)..(545): n is a, c, g, or t
  misc_feature (554)..(554): n is a, c, g, or t
  misc_feature (561)..(561): n is a, c, g, or t
  misc_feature (566)..(567): n is a, c, g, or t
  misc_feature (571)..(571): n is a, c, g, or t
  misc_feature (591)..(591): n is a, c, g, or t
  misc_feature (594)..(594): n is a, c, g, or t
  misc_feature (601)..(601): n is a, c, g, or t
  misc_feature (613)..(613): n is a, c, g, or t
  misc_feature (621)..(621): n is a, c, g, or t
  misc_feature (669)..(669): n is a, c, g, or t
tagaaattggaatcctctagcttctatttttagaatttttaaaaatgaaacttgttagatcacttgttgtctttnctttatgtgtttttactacaataaaaagagcaaggaaaactttgaggatattgattccagcctctctgttactttatttataatatggatatatatgtgctgtatgcaggttattagattattaaatggaaaatgtacctagcctaggatctanacatatggcagaaattcagaaagtatgattaataaaaaagaaacatgaggaaagcctagcggtttctgtgtagtcatgatctcaaatatcactggtcatcctaatgtcacctaagtagaatgcttagaacaaaataattagcctatatcatactggtttgcaaactcaaattttaaactaactgaaagtagtttanaaataggtatatattttacgtagctagttttatatacttgtgatgccattgacaaatcgatgtaactttctttgctctggtattgtnctagatacctccnantgtccgtaagtataccantggcccccntgtattntgtcnnaaanttaattcagaattctgagtnatnggaatgnttacctctgaanttatgtgngttcagttggctcttttcttccttgctctttgttcaaattagcatgcnagtatttttacaatgggctaagtatttatcaggaattaactttgctctatatatggacaacttaatttgtcgacgatgccttctgccgggttccgaatcattcgcgccaaaatctcgcggctgcccctacaccccgtcagcccggtaacaacttcactcccaccacccccatgcatcccccacaccttgcccgacccgccccacagcgggcaaccgcgccccc

SEQ ID NO: 559642 - DNA, 836 bp, Homo sapiens
  misc_feature (75)..(75): n is a, c, g, or t
  misc_feature (229)..(229): n is a, c, g, or t
  misc_feature (425)..(425): n is a, c, g, or t
  misc_feature (456)..(456): n is a, c, g, or t
  misc_feature (469)..(469): n is a, c, g, or t
  misc_feature (471)..(471): n is a, c, g, or t
  misc_feature (489)..(489): n is a, c, g, or t
  misc_feature (498)..(498): n is a, c, g, or t
  misc_feature (505)..(505): n is a, c, g, or t
  misc_feature (510)..(511): n is a, c, g, or t
  misc_feature (515)..(515): n is a, c, g, or t
  misc_feature (535)..(535): n is a, c, g, or t
  misc_feature (538)..(538): n is a, c, g, or t
  misc_feature (545)..(545): n is a, c, g, or t
  misc_feature (557)..(557): n is a, c, g, or t
  misc_feature (565)..(565): n is a, c, g, or t
  misc_feature (613)..(613): n is a, c, g, or t
tagaaattggaatcctctagcttctatttttagaatttttaaaaatgaaacttgttagatcacttgttgtctttnctttatgtgtttttactacaataaaaagagcaaggaaaactttgaggatattgattccagcctctctgttactttatttataatatggatatatatgtgctgtatgcaggttattagattattaaatggaaaatgtacctagcctaggatctanacatatggcagaaattcagaaagtatgattaataaaaaagaaacatgaggaaagcctagcggtttctgtgtagtcatgatctcaaatatcactggtcatcctaatgtcacctaagtagaatgcttagaacaaaataattagcctatatcatactggtttgcaaactcaaattttaaactaactgaaagtagtttanaaattgtaactttctttgctctggtattgtnctagatacctccnantgtccgtaagtataccantggcccccntgtattntgtcnnaaanttaattcagaattctgagtnatnggaatgnttacctctgaanttatgtgngttcagttggctcttttcttccttgctctttgttcaaattagcatgcnagtatttttacaatgggctaagtatttatcaggaattaactttgctctatatatggacaacttaatttgtcgacgatgccttctgccgggttccgaatcattcgcgccaaaatctcgcggctgcccctacaccccgtcagcccggtaacaacttcactcccaccacccccatgcatcccccacaccttgcccgacccgccccacagcgggcaaccgcgccccc

SEQ ID NO: 559643 - DNA, 825 bp, Homo sapiens
  misc_feature (316)..(316): n is a, c, g, or t
  misc_feature (337)..(338): n is a, c, g, or t
  misc_feature (342)..(342): n is a, c, g, or t
gaccgaccttcctaaatggctgtggctaccatgttctctcgcgcgggtgtcgctgggctgtcggcctggaccttgcagccgcaatggattcaagttcgaaatatggcaactttgaaagatatcaccaggagactaaagtccatcaaaaacatccagaaaattaccaagtctatgaaaatggtagcggcagcaaaatatgcccgagctgagagagagctgaaaccagctcgaatatatggattgggatctttagctctgtatgaaaaagctgatatcaaggggccctgaagacaagaagaaacacctccttattggngtgtcctcagatcgaggactnngtgntgctattcagtatcctccagtgtgctagacacagatgactagcgcgaggtctgcttacaactgaacaggcaattggctggtgaaagaagtataatcgcgtttgcttggagattgcttgacaaaatcagagcgcgatacttttataggactcattctgaccaggtttctggtggcctccaaagaagtggggaggaaaagacccgccactattatggagatgcggtcggctcatgcccttgaaagtgactaacgttcctggactattgaaattttgatgaagggctccagtcatccttcaatacatgcaggttctgcatctccctataacaaccgaaacaaccagccccatctttctcccttaactacacggtggccacgtgctgaccgcgctgagttctgttgaacgaatcgcatgctggcgagactgcagcattaaccagaactacaatctggcaaaaataactacaaccctgaagggatcac

SEQ ID NO: 559644 - DNA, 217 bp, Homo sapiens
ccagttaatttcttccccggtgctttcagacacgatagtacactatagtaactgcacacagaaggggctagagtaaatgacagctagtcaaagatgaccgaagtctcctgaaaatcaggacacaggcagagaaatcaagaatgcaccaagcagattctcaaccgtcccacgtaacaccctcatgctatcatatttccagtggatgctacctagtgag

SEQ ID NO: 559645 - DNA, 274 bp, Homo sapiens
aacgatggacagtgcagttatccgctggactctataattcctaatacagagcccaaaaaatgtaagacaaacccaaaaaatttagcagaagcatatccgaacaatggtgtccagaatctcgtttgtgcagaaatgtttccactagacttatagagtactctaccgaagaaagaggcgagggctcgtaataaaggtcaccctttggacatatttgcaactcttcaatggataaccatagatggtagattgtcataagcttaagaggtacagaagg

SEQ ID NO: 559646 - DNA, 632 bp, Homo sapiens
  misc_feature (316)..(316): n is a, c, g, or t
  misc_feature (337)..(338): n is a, c, g, or t
  misc_feature (342)..(342): n is a, c, g, or t
gaccgaccttcctaaatggctgtggctaccatgttctctcgcgcgggtgtcgctgggctgtcggcctggaccttgcagccgcaatggattcaagttcgaaatatggcaactttgaaagatatcaccaggagactaaagtccatcaaaaacatccagaaaattaccaagtctatgaaaatggtagcggcagcaaaatatgcccgagctgagagagagctgaaaccagctcgaatatatggattgggatctttagctctgtatgaaaaagctgatatcaaggggccctgaagacaagaagaaacacctccttattggngtgtcctcagatcgaggactnngtgntgctattcattccctcatgggtaagcagatgaatagaggggggcgcccaataacaggaactcggaaaggagttattctttttaagaagaggtgacaacaacagacccaatccctcaagggaccaattctggccagattaatgtaagaatttaaagaagagaggacgcaagccccccacctagtaagatacatgaatcattcatctataaaaagctgggactcacaaaactctccgtcacatatatcaacttttagaataataaatgtccccacaccaccataaatataac

SEQ ID NO: 559647 - DNA, 178 bp, Homo sapiens
gaccgaccttcctaaatggctgtggctaccatgttctctcgcgcgggtgtcgctgggctgtcggcctggaccttgcagccgcaatggattcaagtaataggaaacaggaaaggtccaaggacccgaaactgcaggaaagggaaagaccagattctagaacattgttgggacctacagc

SEQ ID NO: 559648 - DNA, 478 bp, Homo sapiens
  misc_feature (392)..(392): n is a, c, g, or t
  misc_feature (394)..(396): n is a, c, g, or t
aaaatcaccaagtgactgtgaaaccgtcagttcggaaggctggttagaacatgtgggagcaacatgaatgttctacaaaagtttaaagcagagattgtttcaaatgggtgtagtagatattactgaaaaccaaaaaagagtgagattgtcagtgtaagaatgtgatttaatgtttgtagtgcttacaattttgtgtaccaactggatgactaaaaagagtaaaataatttaattaatagctcatattttatgtgtgaaaacatgttagtgaacatatataatcaaaatagatttcattgctattgcatagtctctaatccgtagactgttttccctttccccttttctcccccctccccaactccccccctctttttttctccccccccgcncnnncccctttccaagttaaatgtcttaaatgtatacattagatgtgtgttttaaaatgcataaaacacgttgaaatacattaatg

SEQ ID NO: 559649 - DNA, 984 bp, Homo sapiens
gcagcgagcctgggtccatctcatctgccgcttggagggtgtgcgtgtgcgtgcatgtgcgtgtgcttgtgtgcatggttgagaatctggcacatggtgcctctggtcgtgctcttgcttcgcgctcctttatgttagttcatgtatgaatacgcgcgacgctcacgccacgtgttcggggagatgccctcgactgagccgtgaggggctaccgtgtgtccgactgcgtagtccttcgtttgtcttgctgatcttgagtagctccctccacgttcaatatctcaggctatgttgacctgtacatctgccctcctagaagggataggtagtgcagaggctgatgaagacagtcccttgactagacaccgaaatccataaacaccatcttctcgcaccactgtatggacgagcagcccctgaagacacgtttgctgggactgggagactgcttggtgttccctgaggacaagagacactcctgacagtgttgggcatctgctccccgtggacacagccccactctccactttctgagcctcagacaacctcattcagcctcttgggctccttttcaaggacattaagtaactcaccaaaatagctcatgcccttcagctttgacaagaactcacggttcccaaactctgctttctggccacttggatggaaaacgtgtggaccaagcaattaccatcgccttggaatctgcggaatggagcagcatgggaaaacttgaacagtcatcaacgagcctcccagtggattccttggttctggcctcgaaggatcatttggtcgaaggtctcagcatcccattcaaaggtgtcctgcgtcgacattttccgaggctaaccgtcaagggggagaaagcaacccggaaagaattaattttgttctattgaggaaaaccgattcatcgggccgctagtcaggatggaaaataaagagaggaaccagaatagatcaaaatggttgacaatataa

SEQ ID NO: 559650 - DNA, 482 bp, Homo sapiens
tttgaacacccaaatcaccaataatgctttattttccacatcaagattaatttatatgtaggttgagtacaagtactaaaatgtatacttcttgcctaatagctaaggtatacataagcttcaccatacatcttgcagccacctgtctgtcctatgtcattgttataaatgtagagattttaggaaactattttattcaacctgggacatctatactgtgggagttagcactgacctgatgtcttatttaaaagtaatgtatattacctttacatatattccttatatatttaaacgtatttccatgtcatccagcctcaaaatcacatggtggcttaagagcatgagttctgcagctcagatctggactgaaatcctgatgctaccacatgcgctcaggttgtgattgtggtcaagtcacttaacttcttcatggcccaggtgcctcattctcaacagagaaaaccttcatacatgccagg

SEQ ID NO: 559651 - DNA, 217 bp, Homo sapiens
gggggaggggggtgggtgcgaacgcgggtgggggtgggggggagtatgcggcgcgcatccgggtgtattttcagtttatttgctctctgttttatggatttcagactcttcaaaatactcttcagggggcgggggggccaaatgaaaaccagaaaaatgatgcgtggaatttcataggaggcagcgggcggatgagaaaggcgctcctcctggtcta

SEQ ID NO: 559652 - DNA, 228 bp, Homo sapiens
ccagtggtgtcatcgcttaaagtaaaccacataaattttagtggtattaagtgtgtgtgtgtggtgtctgtgtatgtgagtgtgtatggtgtctgtgtgtctgtgtgtgtctgtatgtgtggcatctatgtgtgtgtgtgtgttgcctgagtgtgtgtgagtgtgtgtggagtctgagtgagtgtgtggtctctgtgtgtgtgtgagtctgtgtgtgtatgacccact

SEQ ID NO: 559653 - DNA, 352 bp, Homo sapiens
cccggtattcccaccccatagcaggaactggtactacaacaccactagtgcttgatgtccagacctaagaccagtttctagcccaactctcagaaacatcttggtgtgctcaaaggatactcctatcctctggtccaagcttccacccagttgtagattgtctgcaagcaccttgagtcatccatatctactttctacttgtatgcctccagtgacagggagctcactacctaacagagcaagttatttcaacaccactcggctatactcctttcaggagacaatccttcacctggctgactgcagttaccatatgccgtcgggcggggataccagggggggtaccgagctc

SEQ ID NO: 559654 - DNA, 109 bp, Homo sapiens
gtctgattcctagaggtatcccgcgatggaacactacgatcatcaggcattagattcttataagaagtgtgctggctgggcttggtggctcacacctgtaatcccagca

SEQ ID NO: 559655 - DNA, 191 bp, Homo sapiens
ccttccaagcgtaatatccaacagtttaaggtactataccacatggtaacctactgtttgccagcctgtaaaacacacacacacacacacacacacacacaatatatagacaatagatgacaaatcatagagtcaaacttttttttatactagctcagcagacaaaaacttctctgtcaaggtgttataac

SEQ ID NO: 559656 - DNA, 918 bp, Homo sapiens
  misc_feature (427)..(427): n is a, c, g, or t
tccgtggaaacacaccttgggcgttaatggtccgcacgccatggtgcccgcgacactagtaggcaacaagctggcccgtccgagacaatgctagcacaaagagcgtcctgttgggaagaccgttgtctgataacagacgaagccgcccgccccttcctcaaaagagggcttgtgcgcccaagaagatcctgggccgaccaccctgctgttgatgagatgaaccctctcgttggggagcacgctgtagctacaaatcacacaggaacgatgtgaactagaggagtattctccagtgcgttcacccaggagtggtataaaaacacgccggggagtaccaccccagcgttccactgcacaaacacaacaggttcttcccgcagaggcgtgtagaagaatacccgggcgagttacaaaaaaacattctttnggtgaagacagggagatacatccacctcaaaagtagcataccacacgacggtggcggcaacaagatactcacacaacggctccctacactgccgcacgacgacgctgggatgacagacggccgttatagaccaccacccacactcttggtgagaggcgccgcgcgcgccacaggcgtgggagtaacgcctcgtgcggccccacgggtgttcaacagactccccgccgggcacaagtgcgacgacaaacgccactcccccttcgtcaataaatcaggatgatatacggcacccagcatactggctgcgccccgtccacgcgtggcgctctgacagcatctgtcggcggcgatacaatacagcaggcggcggagatggtgttgtcggcgcacgcaagagcacgaggcctgtcacgctagccaccagagctgtgggacgcacacgacttgacacccggggctggccaacccaaaatcccttcgcccaaataaca

SEQ ID NO: 559657 - DNA, 315 bp, Homo sapiens
ttctggtgtcgattctatgatgtatctcggagtataccgaacaggaccaaaattggttcggtgttgtcttatgtactagtatatcaccatagaagttcttagaatacaagtcaatacagtaacagtcttttgcaccgttgggaaaggttgtgcattagaaatgccctacggatagttgttgggattttattatgctgttgacggtttggtttgtgtggttttgtttgctgttgattttttctctcttgctaccagcatggctatgccagacaaaccccccagtcccgggagctaggaagtgtctaggacgggtct

SEQ ID NO: 559658 - DNA, 256 bp, Homo sapiens
  misc_feature (15)..(15): n is a, c, g, or t
tcttagcacgaatgntccaggccaatgaacgcgtagcggctggagcacgaactgtgccgcgccatcgaacgtgaagaattgagcctgtattaccaacccaaacgcagactggtcacccaacgactgatacggggccgaagccttgatcccgttggcaccacccgaccttgggcgaggtcccgcccgagcacttttatttgccctgggcgaagagaacgggatgatccttgcaaatcggcggactgggtactggaac

SEQ ID NO: 559659 - DNA, 305 bp, Homo sapiens
  misc_feature (305)..(305): n is a, c, g, or t
ggcggctgcccctgctcctgaggaggagatggatgaatgtgagcaggcgcttgctgctgagcccaaggccaagggacccctttcggctcacctgcccccaagagttaccctttgtgtttggatgaattttaagcgccaaagtactcccttaagggacaccacctctcttgtgggcacttccatattttcttggggggcacttttataaaggacggcttggtcccccttggtactcagagtatctcctttccctcaaggaacctcactcagaaccctccatgaggctgccaacatcatcactaggn

SEQ ID NO: 559660 - DNA, 2482 bp, Homo sapiens
aaaacatgctgctcaatgggcttcagttccttcaaatcttttcttaaatgtttcaaaaatcttatatatatatgtatttttttcatgctttatattgaaagttttaagctttgattattgccatattcagctagccaaaaacaactacatagaaccttcaaagcgtattaattctggctaggttagcctaggttgagtaggaggttgaatagatgacttctgaagttccttcaactctaaattttatgattctgggaatttataacatccaagaatcacagaatgttagaatgggaaggaactttaagatcatctagtctaagccactcattttacagatgagaaaggctacccagagtgtagagacagaagcagagctctagggaggcagagagaggggaagtggcagaagggccagagctggggagggtctgggcataacctcacaggactggtcaatccatggcctgcagaggaaaaagggagaagagagaccacacaggagcttcagcatcactccaggaaactgatcacaggttggatgggatgcgaatggggccagtggcaccagctggtgtctgaacaggaatcagtaatggtcactctgtctgaggtcacctggcagtcagggccggccagacttttgtgctttctacagctagcatagctgcttctcatggtttggcagaacagcagcatccagagctgattctgccttgctctcatgtgtctaacctgttgtagatgagctgggtagcccagagctgcgccctgctcaccctccatggcccctggcctattcatggccttgttgtgtttctgaagtctttctttgccacattcctaaagatttttgttgttatggctgtggggccaaaaccctcttcactttttcagcatgcctggaattttcccagatcggctggatggactctacttcattcttggtaaagtttctctatcctgccatcactacctgttgtaattagtttggtcaacaacaacaacaacccagtgaggctctgattaaacaccacctctctctgttgaagccaaccctttcgttcaccacgctgatgggaaccaccttcctaatgccaagcactccacaccggtctctgtttttttccctgcgctatctgaatacacttggcaggtgggcagccttcaggaatcatcatacaattaggcttcaggagctctgttttagtcaattatgtggataaccttggaaaaacaaaatgcacagtaggtggcatcaacaagcccgttgtgcctttgggcacagcttttccctcgtgctgtttggatcatatactcattaagtccaccagctgaaaatgtcacaactggctgtgtgccatgcattaggaaaatcaaatacaggagaaattgggatatattgagcaaataagagagaatgatttttccacaatttacaaaagatttaccagtaaaaatgccaccttagttcatttacatatttcaaagatgattacaggtcactaactctttgatagaaagtataatttaaactaaagctatcaggaaccatggcatactaaagattaattagatattaggagaaatggtttgtgcaatttcctaagtcttttgaaaaggatgagtttgttttattacatttgattttcacccaacttcttaggattgtatgattgagtaaaagcaaggtacaattgtagctagctttgtttgtttgtttttgtttatttctcactgttttaagcgtccttcaccgtggttggttcaaaacttttcttcccataagtgtgtgtgaccataactggtgaattctcgaagtgttgggatacacagaaggaaaggaccgtggacaatttaaaatcgtgctatctgtaaggaaacctaagttgtatgtgtaccattattatttgacaagtgtcatagtcaaggaggtctccagtgaggaagtgtgttttaagaatggggagagacatgcctttgtagacagcatgcagtgcctttttggtagagcaattggcccgctaggactagaagattggttggaactgagagaatcatcttaaacaacatgctgagccaaaacattttttgatgttaataatattcatgtgtaaatagattgtttcaaatctctccgaaaacatagcggtagctttgtacttggacttcctttacttgtttaattttcaatggtgaaagatgggcatgatgaacaccttaaaagtcatgtggattatttttctgagttaaaaatgtatacattcaatcggaaagatataaagtctaaaaggaaagtgagggtcaaataagcagatgaggaattattatccctggaaatacagggaattttcttgttgatacaagtttacttcctaaaataaaagtttctggttttagtacctttcatcaaactttcttaatgtattaggaagcttttagcacagtttacccacgttctctaagaatctgcaggcaaatt

SEQ ID NO: 559661 - DNA, 301 bp, Homo sapiens
agcgatgaatgtgaggatatgcaggagtgtgtgttggtatccacatgacaagacagtccattttatatgttagtgacgtctgcttcaattgatgttcatttctcacttcaggcactcataatctcatctcattttacaacagacgagcagcacactgaaccaccaaaacaaagcaaattcaaacccaagcaatctgatccaaccgggattactttgatttcacagatgtttcttccatggtgaacgaaacaggaagttgcgtcgattctgatgtgtttgcttcggggctctgtgtatcgta

SEQ ID NO: 559662 - DNA, 795 bp, Homo sapiens
ggagataggctgaaaatagagatggctacaccattctatgtgtgttcatgcctgtttcttctccaatcctatgtggacattagagtaaatggatcacaaatctgatgagggatagagttaaaagaggcgattaagtgtcatgtactcattacatgttatgacctatttgcatgttaatataggtctgtgatctctgtcgataggtcataggaatgttgtgattggagttgctgcagagaaacagagtcaggaactggagacttgagatgggaaggccgattggtgagggaagtggggtattattctactcgtaatgttctgagggtaatacaaaacaatttactgtgtgctggctgtacccgctctgtccattgcattgcagtattctgatagtagtaatcttagcaatcatgatgcaatggtgaagaggccaggtttatgtaaatgtggcgttgtgaaggttctgaaaggagtaattgtacaacatataagtagttgatgtgcatgtttgaacagtaaggagtgacattagaacttgtgaatataactagtgatgttgcaatctagtgttataatagagctatagtatgtaatagagaagtaagtaaaatgctagtgaaaagtgtcacgtagaggcacttgaagcgaccaatatgaaaactcgtttcgggctttcaccattattgcatactaggcttgtaggatgtcttagaatcatgtttaacaagaagttaagatatttgcatttctgacatctttatgcagttgggtaagggaggaacttggaaaataaca

SEQ ID NO: 559663 - DNA, 282 bp, Homo sapiens
catgtgaatggacggatacagtatttgtccttgtgtgactggcttatttcactcagtgtgacgtcctcgaggttcagccatgttgtagcatgtgaaagaatcttcttttaaaaaggctgcataatattcctttgtatgtttataccacatcttcatgtactcacctttagatggacgtttttgtggttttcacctcttggatattttgaataatgctgtaatgaacatggatgtgtaaataactttttgaattcttgccccaaaatggaattgctggatcat

SEQ ID NO: 559664 - DNA, 188 bp, Homo sapiens
cgacagttgaaatatagacgctagaccatggtatctagtgtcacgctcatggcatggctatgttatacaagccagtgagagatgctaagaactcactccttgtactagctagtacaaaacctaccacaggccttggaaaagagtaagtgatagggccaggcacagtgactcacgcctgtagtcccagc

SEQ ID NO: 559665 - DNA, 218 bp, Homo sapiens
aaattaaaaaaaaaaaaggggaggaatttcagttgggggggaaattctaaaacaaaagggaaaacagcccttttccttaagagctaaggcccagtctgccttaacaggactcacaaattagctacaaaattagaaattacagtttagggctcctgcaggagtatgtcactgtggaaaaactaaaatcgatgctggaaatgttttgcagagcctgcata

SEQ ID NO: 559666 - DNA, 108 bp, Homo sapiens
aggatcccaagagtagtagctgatcagtggttgttagtggggaaagatggtggttgtagtatctttttctccctcatgtccatgtgaagggagttgtgctaacaacgc

SEQ ID NO: 559667 - DNA, 286 bp, Homo sapiens
gggacagtatctctcacccagtctggagtgcaacagcgtggtctccgctcactgcaacctccacctcccagattcaaatgattcttgtgcctcggcctcctgagtagctgggactacaggcatgtgacactatgcctggctaatttttttgctatttttaagtagagacggggttttgccatgttggcccgaggcaggtggatcacttgaggccagaattcgagaccagcctggccaatgtggtgaaaccctgtatcactcttttaggcccttctgtcgtcttctc

SEQ ID NO: 559668 - DNA, 288 bp, Homo sapiens
  misc_feature (41)..(41): n is a, c, g, or t
tagcacataaggacctggtccaaatattcgtacagcgtagnaaatgatggtcggcctgagagtcagggttttaagaacttctccagtcatgagctatgtctgtgtgatgacatgcttcaatgcactttcctccgtaccaggctgcttcctcctaactccctttgcctactttgtaaataaattatattggcccccactgcctcttcactctgatgataagcatttgcttaacttactttcattcgtttaacacatttatttttcttcaactgatatttttgagccctg

SEQ ID NO: 559669 - DNA, 1177 bp, Homo sapiens
gtctccggtccgtgcctccaatgatgacaaagaaaagaaggaacaatggtcgtgccaaaaatgggccgcggccaacgtgcagcctattcgcatgcactaactggtgcccgatgcgtgcccataggacacaggcctattacagaaattcgctcattcgaaacatagttggcaggccgcagacagctcaggggccactattctgaagccgagcgtcttcgactgccttatgtgctttccccaagcgtgtactgtgaagctacacttactgttgctgaggctgtgcaaaattcaacagcaaaacgtacgctccgagacatacgaatctcgatgaaagccccggcaagggacccggacaaaaccaccgcaagccacgactatccgcacgacgtccttcacaccactggaaacacaaacggtagggccgacgtacacccgaccataacgtcccctacccccacagcccgcaacgcgaagcaaacaccgcacaacacaccgcacacagccaccacgctaacttccctgggggacactcctgaggtcacattgccgccggcgcccgcacccaccccggcgcacataccggaacaacaacacacaaacgaacaggacacacgcgtgacacttgcctgaacgtcacccccccacattggcccgatggcggcacacggcatcaacaccgggattcccggctccaaggaacaagttttaccagcccgttttgcctactcacatctgctgacacataacatatacacactagtgaacgcccacaaatattcacacatttccccagttatcccacccgccgtatgtcgaacattactccggacatatactggggcaatacataacaaaggctcaacagttgggcgttaacgcacacagctggacgaccaacgcacttcaatcttgggataccaataatttacaataacatctagcccacctattacacagcttgtctgagcccacccaccgctactgcgcagaaaccacaacctcatggtcagtttcaccatggtattcagcttgacacgatttataggtaagcagcccaaacaccaccttgtggctttactgggcactgtgacgtaacacacactttcttgcgtcgggagctttctgtagaaacacacaacccagaatcgactcattgtcaactcccatagttttcaca

SEQ ID NO: 559670 - DNA, 707 bp, Homo sapiens
aaataaattatacaatctcctccccttcccttcctgaaaatacatggtatggtggtacatggctactatcctagtaatactgtagcatgcggcacaagctaaggagaagaatgaccgagtgagtcccacgcgtccgacagtatggcagaggaaggaaccagtgatagtaacacatggctcggagagcaacagtgcaacagtggaggagccacaacagatcccatagccagaagatgagaaaaaagaataagtgttgccttgtatgtgtgtgctaaatacttttttgaagtgaaaaaatgttttttggttttaatggtgttacgtggttgtgtattaattattttctttgtccatatcacacaccaaaggctttggaccatttagcatcatgagcctaatggtcagtcagtcacctttcttaagtgtggtgaagatggctcttttctttggcatctgtttctagccctcaactgctgaaagcctcagaatgagattaatgtgagaaaacacccacctcttttagagaattatccttgtgatgctgcagacatctactcttacaatgccttcctacagctcacgtggggtgcttaccaaagccatagctttaaaccttaccagtacccccaacagtagtatcctgaaagtctcctctcttgtttacttctgcaaagggtcagtttcttaaaagtgatcctgtatgagta

SEQ ID NO: 559671 - DNA, 258 bp, Homo sapiens
caccgccaaccttggctgcgtgaccactcacttcctgctaccatctgtgcctcaggtatatcccataacttctctgttgaactccagtgtactctcctcgatgtcctatgggaggtatgataatctatacacaattatggattccttctttaaagcgtgagtgtctcatgtctctagtcagccatttgtgaccccctatctcagttttaggcgcgacttctgtggttggccgtcaattccagtgcgtttatgctagcc

SEQ ID NO: 559672 - DNA, 137 bp, Homo sapiens
ggttaaactatcaagcaatgattatgaattgctgcttgaagaaaaacagttcaaaacagagaaaatggcatttgaaaatcacgatatctgttcttagatctgttcttaggacttgctcatcgttgttcgtagacctc

SEQ ID NO: 559673 - DNA, 761 bp, Homo sapiens
gagttgagctagctgctctccagcaactcaatagtgcatccgcccaggcgcatggctatgcacatatcggccactagcagatcaacacacaatatcagactcgacgcaactccctgcacattaccatgccacccatcagtaagagcacctctccattggtagcaggcacctgcacagtgctgtgctctctgcacagcatatccactagcgtatgcgctcatcacataccattactggtcggtgctcttatccagtaaccagactgacgtgatagtcagcagttatacacttcatactgcgcacgtgtcccagtcacattgcagagactatcacttgtgcagaccatacccaccatcaaaccatcatcatcacataatcctcaatggcaacatacatcattctcccacacagagatgtacttagcacgcacgtcttggccatcatatcacgattaggccgcacagcatcagacacagtcacacttcacacacccaagatccgaagcacacgcactagcgcacacacgaatcgcactatagcacatgcacacatatcacataccgcacactcacatgatctcgtctctataccagttgctcactcgcacacagtccattggccgaaggatctacgagcacaacccatagccaggtgcataatccagcaccttcaagccacatatacctcttccaatcatactccaccctcacaatccagtagcacacacccatatcacatgccgatcacgctcattacaggcc

SEQ ID NO: 559674 - DNA, 360 bp, Homo sapiens
atatacatctaattttttaatactcaatgcacaatcaacatttttgatcaacagtataaaccattttaaagagaattctggttttcatttgtacaaatactgctttcatcattgtaaaatttttaaggttaaaacctcccatatgttgaagctataaacctcttgtttgaaggttcctaaaacgaagttaatgctgtctgttgttaatgggctacattgtgacctctaataccagtcattaaatccataggatcttttaatttccaaaagattgttttgtacactaagattatttttttggccaaaccaggtcataggattcctttttttttaaaaatatgtaaatgcatccagaaatgt

SEQ ID NO: 559675 - DNA, 1686 bp, Homo sapiens
  misc_feature (68)..(68): n is a, c, g, or t
  misc_feature (218)..(218): n is a, c, g, or t
tcttcggtcgacgacagctaccgtagacttagttgcttacatgtgctgtaggtcgtcattgtacatantgtggtacgcccgctcacttcgttcggttattgagcgcttcgctgtggtagttatccctccgggtcgttgttttagtggtctcgtctccttatttatggcagagttgtatctctcttcctgtcggcgcgtcgtgtgggtcctctctcttnaatgggaggggaggcgttcctcttatcttgttctttactgcgtacgagtcaccacttattggggggcgcacaacctctcgtgtttgttttcctctgctggtggccccgctcactcttctctatattaagacggagagatctgtgtggctacgcatcatcttcttatagctactatatttttctcttgacggcacgctcgcagctgggagaatatctcttttttcttgtgtggacgccagttgggtgctccgacattgttggggtgctcatactctgttggtaaaacgcttctggcttggttgtggtgtcccgcaggttgttgtgtttttgtcttcctccgtcctggtgtttgttgtgtcccaaagcgggggggtgtgtgttttgttagtgttgttgctgttgttctcacctactcgttggggtgggctctacttctcctcctctttttttggggtgtgcgtcgtattgtatactccttctcgtgaggactacttcgtttttcttttttcacgcagtgtgttctcgtctgcgacgtctatttttttgcggggggcaccccccgcccgtttttttttgtgtgtgttttgggtgtcgcccccaccccgaggagttgtttccccaccacccacatgtctcttcgcaccgacgggaggagtcttctctctttttgggtgtggctacactcgcactctcctactcacccgttgcttcgctctgctgtggtggtgaccacacacagcagtattttgttttctctctttgctgctcgctttttgtgggcgcgcgcattctctctctctctctctcctactgcctccctccacacacacagagtgggtctctctcctctcctgcgcgggtgttgttagtgtatgtgtggggtagatattgtgtggcgcgcgtggagatatatgtgtgtccgcgacgactgcgtggcgcgcacaccctctctctctcctgtggcacacacaccccgcgcgggaggtatattcacttccttgtgtcttgtagtgttctctcccacagagatatctctctcaagagagagaagatttaataataagaagacaccgcgcacctgtcgctctccgagagaagaacaaccagcctccccccgaaggagttttctcgcgggggaaagaggagctctctctcccccctcgcgcgggttctctctctccttttctctcccccgcgcggggtcctccccgcgggtgtgctgagagagagaggaccccagcgcgccccctctctgccctctttttcccccttccctcttttataaggggggccccccccgcccccccgccataattgttgttttgcgcccccccccccctgccgcgccccccgcgcgaggggggggggacccccccccgcgcggggtttttaagtggttttttcaagagagggttttacccccccgggaaaagagagggggggggaaaaaacacacccccctttttta

SEQ ID NO: 559676 - DNA, 801 bp, Homo sapiens
ggcgtgcgttagtatggccgcgtacccgaatcacctgacttgactgggctggcgttaactgtgcggaggcaggatttccctggggacagtctacactcagagcttcgctgacagccaaggatggcaagcaaggggccctcggcctctgcatctcctgagaactccagtgcaggggggcccagtgtgtgtagcagcactggcgctggcgcagagcggagggcaggacaggacttatcgagtgcaacatctgcttggacacagcacaaggatgccgatcatcagcctgtgtggccacctcttctgttggccgatgtatacatcagtggttggagaccagacctaacagacaggtgtgtcctgttggccaaagctggccatcagccgagacaaggtcatcaccaccatctatggaaggggcagcactggggcaacaggaccccagagagaacgaacccatccatcgatactcaaggacagaggccagagacaggagaatagagggggatctccaacggcattggaacttcggagaagggatgccaaaaccacgaaggacgacgtcggagcaacagagaggcaacttatcccacttcaggggaacaactaacgagccaaaacatagcaaaataaacacatgaatagaaacaggacactcacaaccagaatgaacccacgcagacaaccccagacatcgagagaacgaaggacacaaccaatccacgacgcaaccgagacagcggcgccccgcactggcccacgaacccgacacctcgaagaccaacagacgggaacaaggcaaaa

SEQ ID NO: 559677 - DNA, 874 bp, Homo sapiens
gatgccgccggagcggaggagacgaatgaaactggaccggagaaccggagcgaagccgaagcggaagcccggaatgaggccggactggatagccggatgcggggccaggcgggcctcccctaaaagcctgcccctttcatcccagcggtaaaccgccggcccaggccgagcgcgtgcgtgcgctgcgtattgcagtacgcggcaggtggagtgaagagagactggctccggcagcggtgataccgtctgaggcctggaggatggacaaatcgggccgtggagtcggtgcttggatgggagctggtcttctggcgactgtcgacgaacctgacgatggaccgcgttgactgcggggcgttctgcgatggcccggaagggttcagagcaacgatgaaagactcgggtgacttcagaacgtggagcaatgaaggcaagagggtaatttgcgcatgctcgaaaagaagccagtttgggctggagtgaaggaagatgaagcatgaggaaatggttgacatgatgagcaatcggttgcggacggatatgatgacacaagtgctagtgacagtaaactttcgaagagacaaccttaaaacgagacttacggacgaattccaacatgccatgggaggagtacctgcctgggcagagacttacttaagcggaaaacatcttccgatgatgaacgtgaagaggatgacgatgacttgtgcaaagggactgggaattttccattattccacattcaacttctttccacgggggcctcttgcaccattacgaactggcagcatgcaatgtgaacggtcctactggtggctcggggattttcctctggggccgttcatcccggtgcccgattgctgatggttgctgc

SEQ ID NO: 559678 - DNA, 168 bp, Homo sapiens
tagtgtgtgccgagcttgactttgtgatgttggcaggagaggggagacctgggtggtgactgagattccctttatcaaacccttcaatgggcacaaaattgagtgcttgattttaggttttattttattatgaatgtccaaatctgtgttacccccacagagagacgt

SEQ ID NO: 559679 - DNA, 1143 bp, Homo sapiens
gatgcaatgtccatagtcagtcattcatggcaacaaagatgctaaacgatcaaggtggagaggcctgaggctgggtacctcttcagcgcgcagtacaccatgatgattcaaaatcggacccactgtaatggctgctgcagtaaggacagctcgtccacagattctgctaactataacaccagcccttatccctcgtgagaaaaagatctcgtatacttgaggaaccttcaaaggcgtttcgtggggtctcaggcccgagaattattgcactaatatcagtgcacaggcattatagctaacgctgtcaccggttgctcttaactgagaatcatcgcgtcatgcattgaaggagagacagtggcatcagttccgtggaaggaagatcgaagctgccttgtgctgaattacagcaactgtcatcatttgaacataagaagtttcattaactggcgagaatatggctcaatgttagaaggaatgaagccactggaagactcctgacttgctcgtcagaagaaagcccgaagaactaatagagactcactgtaccttgtccacgtcagatggcgagagcatgcatgctggccgtaactcaagggccatgcaaatttaagcacttgtgtcagcgagcgtaaaatatgacgaggagctcgggaaagctgcccgggtttcctgtgacatcgaagcagctgaaggtccaaatcagtgctctgcggaccaacattaccagtccaagaagcactattctcaagaactccctgcggtccctggtgcctctggtgaaatggcacgcggaaactgcgggaacacaagtaacttttgcccgaaaatttccattcccaaaaagcgcctgaagggacaaggggaaccccaaggtggggcgggtcccaaaaagagaacctttacaaaaacgggggcacaagaacaggggctctcaaacaaagggagaatgacccgagtaaaaacaggggaaaggggggcagaagacagcgaggagaacatcactgtagagaaaggatcaaaaaagcaaaagacgcccaaaagggggaaaacaatagcgaaaacagacgcgcaacaacagacgaggcaaagacacgaagatgaggaacaaaaaacaacagcggagaaaaagcgaaggtacgt

SEQ ID NO: 559680 - DNA, 143 bp, Homo sapiens
gtcccatgctctgccgggcaaagtagccacctaggcaccatcacctccctccaccccccatgaggtcatctgcctgcagacagttctcgtgttccccatgcaacagccaattaagagattaatataccgtgagagtagaggaa

SEQ ID NO: 559681 - DNA, 289 bp, Homo sapiens
tcttgtacccacctcggacacatcctgatccatcatcgacgtcgattacaccctattgctacgatatcggactctaacaataatattgcgctgttctcccttacggtaacttgttccgttgttcccgttattgtatcaactcattctattcttatcagctctagactggtgatatctttccatatcccgctctgaggttgggttctgcctccgatgtcgtcccgaccgcaatttcttatgcatgttcgttactttagcacctgtgtgattgttatctcctatatgcatt

SEQ ID NO: 559682 - DNA, 247 bp, Homo sapiens
  misc_feature (232)..(232): n is a, c, g, or t
aatcccttggaaaaattggcaggggttgaaggggtttccttttctccccttgaaggggctttgttgggtttttggggttttgggtgggactcccaaagcagggggggggagcccccccagcaaaaactcgggggctgggatgaggggggcgggcccgttttatgatttgggttttatggggcccttgaaaacaggggctttccaaaaaacctctcctcttaaataaaaaaanaacccaggttttgga

SEQ ID NO: 559683 - DNA, 401 bp, Homo sapiens
  misc_feature (338)..(338): n is a, c, g, or t
tcggcaaagccgagcttagcaaacgcacccacctccttgggacgttatattctattagattcattcctgtgtagacactgtcaagtgtctgtatgtattgaaagtgtactacatggccaagcatggtggctcacgcgtaatcccagcactttgggaggccgaggcaggcaaatcatgaggtcaggagttcgagaccagcttggccaacatggtaaaaccccatctctactaaaaatacaaaaaattagctgggcatagtggcaggtgcttgtaatcccagctacctaggaggctgaggcaggagaatcgcttgaaccggggaggcggaggttgcagtnagccaagatgcgccactgcactccagcttgggcgacagagtgagactccatctcaaaaaaaaa

SEQ ID NO: 559684 - DNA, 986 bp, Homo sapiens
gggagggtccgcgccgcggttttcaagtgggaacttctgaaatggatcgtgatcgttgcgtcaaatcctgccgctaaggggtgcctcaagtggtcaaggccccgattgggttactgggccgtttctatgtgtcctcaattacaccaaacgtgtcaaatgtacctggggcaaattcctcgactacccaagttttcttctggtgcgagggctcgttttggcgtctttcctgttcgtggctccatgtggacctgtggctgacacacccggggtcaaggttcccattgggattcataggccttgggatctcaccaacgtagttgggacagatactcacgccttgccaaggtcatggggccggttcggtccctggctcggagctctcttcgtcctcgtttggtgtgcaccatacagtcttggccgtcaacgtcccagcttaacctcgagggggcccgtttcacggttgagatggaattgtataacttgtctgacgtctctggcggacgggccttgacattcaccttactcatggatggctctccagggcgaagcccatgccaggcagcagtcaggcatgcagtccgttgcacttctattgaagagtcatatatcaggtttgctggagctgtgtcccagtaatctcagaggctgatcatccacagcctctgctgagtggttgtcaatgcacggttgcttgaagacagctcgcctgatctatgcacaacggtgattgggcctaactgaagatagttgcaactctggagaggactggtaaaatcaggcttcgtcagtaactaagttgaaatttaggtataacaagataagaattgattagtgagggtataaagtgtaaccatcagttaaacctctccgtgtcattcctagcttgccttgcttcagaatgtgaaatggaagtgggggtgtccctagctctgtagaatctgggactgggcaaatgtttgtgtggcattccttcaatctagctgttg

SEQ ID NO: 559685 - DNA, 884 bp, Homo sapiens
cctcaacagggccactcttagggggatctctgtgcttgtcgagctcacctctctgcggaagagactttgctcagtttttcccacgcccggggttttttctgaggacttcagtgccccctgttttctgaggctttgctctcccaccacgtgtgccataatgggactcccgcgctttcctctttctgaacaacggcgtgtatctcggggttcacccccgctagcccccgccttgtgtgacgccactctcgggcggtcctttggtgcttacggtcaattcaactcccccccgtggtggccattcacgacgcgccttgtgtttgccgcggaaatatgcctctggcatctaccgtggggttggtcccccccccggtggactggcgccgttgtcacgcccacctccttcttggacgtctctcgtggcaggggtctactctccgtttccaaggtactcttagccccccttgccggtcaacacccgggtcatccccgcttttgttttgcgcatccaccccccgcaatttgcgggcgcacttttgggcggcccaccccggcttgtccctccctttctccccagggcttgagcagcgagtgatctcattctcaccacagcaggaagcggaggggcacctcgcagcctcagacgcgattcccctgcctcacccctcggtgataacctgagaatcacttgtcaataacaaaccaaacaacaacaacatatattagtggggttaatttggcgacaagacgtcctgaagtcgcacaccactgggggccacccataggtgtgggagagctcatcatacggggcacgcccatgtgcagggccgcggaacatcccaaacccctgtgtcacgcgccaaacccctttttcttaaaacaagaca

SEQ ID NO: 559686 - DNA, 660 bp, Homo sapiens
caaaaaacaaacaaaacaaaaaaaaaaaacaacaataaacaagaaaaaccgaagttaatcgaacgagggtagacaaggcgtgacaagcgaagagagaagagactatcaagatctccactaagggaaatgagaatcatatatagcggaacatagggcagaagcttgccataggctggatggagaaggaggaggcagaatgtctgcatagtaacaccatacagctcaaacttcagaagatttagggttaagcagttatcattagtctgcaaatgatcgtgtatacacctagatcattagaaactaatgaaacacctatttaagtctatatgaattcaaggttacactgtaattccagatgcctatggcagctggtacagggcctctgaaaaatggaaccaaatactctgaggactaaagtcccagctttcttatctagattaggggaaggccacatagaggggaatcagaaagtgtccccgatgtggcacatacaatggaacccggggactgagctgtaagaacaagacatgtggaaccatattccgctacggtgcacgcacgcagcctagtgtagacagctgtcaccatcattacaggctctgatcttcaggtctactcagtgcggcaagagcacggggccctgattaccgatgcttagaa

SEQ ID NO: 559687 - DNA, 700 bp, Homo sapiens
  misc_feature (6)..(6): n is a, c, g, or t
  misc_feature (19)..(19): n is a, c, g, or t
  misc_feature (60)..(60): n is a, c, g, or t
  misc_feature (67)..(67): n is a, c, g, or t
  misc_feature (113)..(113): n is a, c, g, or t
  misc_feature (289)..(289): n is a, c, g, or t
  misc_feature (538)..(538): n is a, c, g, or t
  misc_feature (587)..(587): n is a, c, g, or t
  misc_feature (599)..(599): n is a, c, g, or t
  misc_feature (614)..(614): n is a, c, g, or t
  misc_feature (626)..(626): n is a, c, g, or t
  misc_feature (662)..(662): n is a, c, g, or t
  misc_feature (688)..(688): n is a, c, g, or t
  misc_feature (697)..(697): n is a, c, g, or t
gccccnagttccctcccgnttaaatgaaaccagaaaactttaaaacagccaaaatcagtnaccaggnccagttataaccagagcttttctagttcagccctcaccaagttagnaacaaacagagcttcagcaaggaacagcttcaaacagtggttgggcacttaccatggttccccaggaccagtcccatcaagtgactggtaaccaccagcaggcctcctcaggcagaacactgggatttccacgtaggcaatcaggccctattacaatagtcgtggtgtgtctcgtngagggctcccgtggtgctagaggcttgatgaatggataccggggccctgccaatggattcagaggaggatatgatggttaccgcccttcattctctaacactccaaacagtggttatacacagtctcagttcagtgctccccgggattactctggctatcaacgggatggatatcagcagaatttcaagcgaggctcttggcagagttgaccacggggagccccacgaggtcgtggagggcccccaagnccccacagagggattccgaaattacccttagcaagttatttatttgttncaggttttgttnattgccaaaacaaantgccagtttccntatttttccagagggtttttctttgtttccttaggnacttttttaaggggctttttaccctnagcagggtnaat

SEQ ID NO: 559688 - DNA, 965 bp, Homo sapiens
gatgggaggatgcttgagcccgtgagttgagaccagcgtgggtgacgtggcgagaccctgtctctacgaaaaattaaaaaaaaaaaaaaaacccgggggttgggggctggcagtggagctatgaatggagccactgggactccagcctggggcaacgagggcaagaccctggtctcaaaaaaaaaaaaattttatttggaacccttctggttgggggcagttcctccggtaaatatttacctttctcaaaagggaaaaacgcgttggggcgcggggggtcccacgcttggtgggccccaagccacttgtgggggaggccggaggtgggggtgagacaccccctggattgtccgggatgttagaggggggcagggcttggacccaattttgggaggaacatctggttttttattaaaaacccaaaaaattaagcgcggggggtggggggcgatggcttgttagttcccaagttaattgggagagggttggaggcagaaagatttcggttttgaaccttgggagaggggggagggttgcatgtgatgctggggttttcggacccattgggaccccaagggttgggaaattaaggatggaactttcctttttcaaaaaaaaaaaaaggggggctcttcgacacttttttcggacggaacagtgtgaagtgccaccaatttttttccttttccacaggcgtgattgtggggccagcgggttcattccctcaccagaatgttctagggagttaagggcgcttttcctttaacaaataggggttctggtccctaagggtatggtcttccctttctcaccgagggttaatacttaaagcacgcgcgggggggcaccagtaccaaggtgaagcggggagagctaccggtgccacacgacaaaaaaaaaaatgcgggcaagaatcgggcggaaaagcttaccttgctcagcgctgtgtctgtctcgtctcctgc

SEQ ID NO: 559689 - DNA, 432 bp, Homo sapiens
aggaaggcgacgtccggagttgtaccttctgatgtacagatgtgttgggagtttcttccttctggtgggtcgtgctctcgctggctcaggagtgaagctgcagaccttcgcagtgagtgttacagctcttaaggcagagcgtctggggttgttccttcctctcggtgggctcgtggtctccactcaggaaagaagctgctgatcttcatgtgagtctcacagctcataaaaacagcgtggacccaaagagtgagcagtagcaagattattgcaaacagctaaagaacaaagcacagtgtggaaggggacccgagcgggttgccagtgctgactcaggcagcccgcttttattctcttatctggccccacccacatcctgctgattggtagagccgagtggcctgttttgacaggacgcgccatcgtgcgctt

SEQ ID NO: 559690 - DNA, 287 bp, Homo sapiens
tgagggctttaatcctttaaaacttggagaagctggctgggcgcggtcgcacgcctgtaatcccagcactttgagagaccgaggcgggcggatcacgaggtcaggagatcgagaccatcctggctaacacggtgaaaccccatctctactaaaaatacaaaaaattagctgggcgtgagtgcaggcgcctatggtcccagctactcgggaggctgaggcaggagaatagtgtgaacccaggaggcggagcttgcagtgagccaagaaaagaccactgcacttcagac

SEQ ID NO: 559691 - DNA, 472 bp, Homo sapiens
ataccatggcactccaagggagaatgtgttgaactgactgctaattgacccagtccactagtcttaccggttatcttagttattgggtataaatctacttctcctggtatatgataagtcaatgcaaaacaatcaatgatgatcagcgctacctctcttgaatcgtccacaatgtcattatgtacgtgactaccaataacactctatcgtagtagcctgatacattctggttattcactcacatgtggtgtattctccaacttttatttatagatctgaaccttgcctgagttaaagactctagattctacgaaaagggtgaactccagagatttccctttaatgactcattcctcatatcaacattgggaagttacctggagacttcctgcttcatccagttggcccatgagagaggaccgtttaacactgatattgcttggattggttataagtttaactccaacaataa

SEQ ID NO: 559692 - DNA, 1110 bp, Homo sapiens
cggacgcgtgggcaagatcgcaccattgcactccagcctgggcgacaagagcaaaactccgtctcaaaaaaaaagaacaaagaaacaaaacaaaaaacttcccaaggacccaaggacccattttcctctctatctgcctaaaataatttcttaataactcctacaacattcccccctgtggagatgccacactaactgctgttagggagtttgggcgacagactccttctggctacttctttgttgcaaaagggcgtcgaatggggaagagcagtagggctcctcctggggtcacatctaagggtcctcagaagaatgatgtgtctcatgtgtggttctgtttacagccaccattttggcagtttgattgcgttctagatgagaagaaacccatttgagttaatagtattgcggtactaccagggtcccaatattctactacacagaccaccataaaggcacgagaaggggcttcaactcaacagggggttaacccaattccactaaaagaagaccggaacttttatctacaagaggccatctgtatgccactcgggggatcacactcacatgtctgaactcgagactttacagaaccctgtctcgatattctcctttttcaacctagaagggcattaatcccgaaaagcacgcattgtgttcccatctggaaaacttgcggtcacctaaaaccgcaattacaagagtgcctaagccagattccagtggctaggttacaaccttttatgcttccccttttcacataagtagccctatttaattcctcctgggctattaacagggactacaactgcacgttaaaggccgccaataattgagcaaggcatgtgggaggcactcccccttgtttacaactaatgtccacagcgtatgacaaggggggcgtcaccccccggggtcatatatccctacttgtgccacacatacactaaaagttgaggttatacgccccgtaatcccaccaactaggtggcatggttgggtagcacataattctccactccaaacactcaaccgccggccgcaagtttgaaaagccccctgggggggaccacagcagagcagtgggtgcaaatcctaacgaagaac

SEQ ID NO: 559693 - DNA, 266 bp, Homo sapiens
agcgggaggtcgggcgctggcgggcgaggagcggcggcggtggcggcagtggacatgggaaagcggaaccaccaaaaggagtggtgatcaacgatctcatgataaatctggatgctagttctcatgcctcagcacatccccctgtcgaaacacagctctgggatcagacttcatctataggaccgctgccagaatactaaagccagctctagccacgaatggtacaaaggaaacatgatgaaagattaatccttacataccgaata

SEQ ID NO: 559694 - DNA, 382 bp, Homo sapiens
cttgggtacagaattcagcacaagaatctaccctgcgtcaaagcagtgatctttctgacagaagagggggagaaatgcagccactggagggagaactgggtgttccagaaggttcatgaacttgagaaagcccgaaagagacagctgaagatctcttcacgataagagtggcacaggctgctggcatagcagagcttgtccgatgacttccatatttatgcatctttgaatgatttgtagttttttatttgtaatctaatttactttaaattattgaaatattgtacacaataggtataactggagttatttatttctataaattattattaccgataggtattctgagtaaaatattaataaaaatgactttcactttgga

SEQ ID NO: 559695 - DNA, 105 bp, Homo sapiens
  misc_feature (49)..(49): n is a, c, g, or t
gatcagccggccccgccttaccaactgacatacataggctcatcacagnttggatgcaagcacacaaagatgggcttggcgcttgtctaagaattttggcatggg

SEQ ID NO: 559696 - DNA, 106 bp, Homo sapiens
tcgtattatttggccctatgttcgtaatagaagtcccccacgcccagcatctcagaccaaaatcctttcccagaggccagcggatccacgccaatggttgcacaca

SEQ ID NO: 559697 - DNA, 936 bp, Homo sapiens
cccacgcgtcgggctgggaggctgccccagcgctgctacccacgcagagccagggctggcttcgctgggggctggtgtggctgtgccgagccccgtggctgcagctcgtaaggggagccctgtggctgctgggagctgctgggctgcgtgtgccctgtgtgtgtggtgatgcccatgtggggcttgtaccacaactggactgctggtggcaaccgttgctggcgcccagtgacctcccacgcatgagctgctcagcctgatccaagagtctcccatgatccatgacctggcctgcagctgaccccctgttacccacgtaaacaatgacggttgtcccctatccttgcacgcaaggggtcctgacggcgcgtttcccttcggacggttcaccacattggccaccgttggccccccatcacgcagggtggtgggattgggaggtgttgaaagccccttgttagtcagggccatgcggggacttggaggaattccacacgattatccttaccccttcacgttaccgcatcgaacgacagtggggttggccccccattcccattgggcttgggagcccccacagggacgactggtgaccgcacacgccggcgtccggagcgagaagaaagagcgataaacagagttgacgcgtccccttccttcgttcgtattacaacattccgacgagccgacacgccattcacgagggaagggccgtgaacacaatgtggcttgttaccggagagggaccaagagcgacccccatggtgccacacggccaggtactcccgatacacggcacgttaacgttacacaccccgagccccaattgtgacaggtggctggtgcaaaccggcaagaccagtgtgggccaaccgcgcagcggctgaccccgcgcgagtatcacgcgccaccatacagcttcctgtggcatcaacg

SEQ ID NO: 559698 - DNA, 916 bp, Homo sapiens
gcaggtcggctaggccggcagctcccccttgcccgtcagccagttggacgaaccccccactccctgccaccgtcacacgacgtatttattgttcccacacactggctgagagtggggcccttccagattgggggccctggggttccccagctccctgtccatccccagtcttggggctgcgtaccgccagatttctcccttacggaagttgacttcagtcaggggtgtgacggctcccagtacccaggggcacgtgtgtgtggagacgggcgtgttccaatcagagaacggacctggtctgcatgagccgtccctggtgtcccctccaggttgctggtaggcagactctaagggccgaattgttcctatgttaggccacgcttcctctgttcatgtcgcatgaggtgaaccactcatgtcggcccatgtcaatgggcctcctctgaagctaacctgtgcacgtcacccttgtcagccccaaattagaagcccagaaggcagctgtaaaaaatacaagatcctagatacatccaagacaagccagtgaacaattggaccccaaagtcatgtcaagtgttggccccatgataaccttcaccatctttgcaaccagcgagaccagaggcagtgcatgggacgcagtgtcagggtcgccgtatccatctccattcctaggcccgttggcgcagagcatggtccaacaacgttcggcattcatccatgggcctgccgggcccatgtcctcctatctgctgccacattgtatctgtgttgcgcatgcccaaatgcttgcctagccctcttcagaaggctgtgccaaggctcgcgtggcattgctatcgctaaccacgaagagtgtcctggaatgcccggttccccagggccatccagcctccttgccttcccagatatccca

SEQ ID NO: 559699 - DNA, 583 bp, Homo sapiens
agcaggctattccacgtctgtggactatatattccctatagatttcctaccaaggtgcgctattgttagcagcaacacattgggcttgggtatttagtcctggaatctgccctctgtatcagaaaagctgctgatttttctatccagttccatgctactagtactactgtcccagaccaagtcagtagtggggatggacgtgtgtggtatatgcgactttaaactaaagttaagcagtttttcacaaataaatgcttctcaatttatttctcttcaattgttgtatcaggccctgacatggttgattttgataattttgtccagttttatggttttagggagaaatttgccaacctctgcactttacaatcataaaatctgcttttttaaatatctaatttgttctcttacgaagcttaatggcataacttttctaagaggtaaaactttgaattttaattttgttcttagtcacaaataactatgttcacctcagttaactttcttcttaatttgattcgtgacagaataagcaccggaagccatgatcactgactaataactgatcattgtacaatcatcc

SEQ ID NO: 559700 - DNA, 725 bp, Homo sapiens
gggcgcagtggatcacgcctgtaatcccagcactttggagggccgaggtgggcagatcacttgaggtcgggagttcgagaccagcctggccaacatagtgaaaccccgtctctactgaaaatacaaaaattagctgggcgtggtggtgggcgcctgtagtcccagctacttgggaggctgaggcgggagaatcgcttgaattcaggaggtagaggttgcagtgagccaagatggcgccactacactccagcccaggcaacagagtgagaactccgtctgaaaaaaaaaaaaaattttgcacacacacacacacaggagatatttatgggaaaaagataattggcaaataggcaagttaccagggcagagaaaagtgcttcaaaaaaagggagaggctggggcaggggctcaagggctgttggtcccagacacttggggaggccaaggttggggagaagaggatggctgtgaactcgggagttggagactagctggggcaacttgggttgcaattcccaatctctaagagacgaaagcaaaagaaaaacataaaacccacttgggcgggcaggacagagccccgcaaagaagacggcgcccaacaccacaccgcggtgggccacgaggtgccacaaagagagacagcggacactggcgacacagcggggtcccagaggggaatcggggcaagacacgaagtgagggagacgccaccacaagaaacg

SEQ ID NO: 559701 - DNA, 1060 bp, Homo sapiens
ccaggcgctacgggatttaaacatctccgtactgagatagtactactatatcgatcacgctgcttgatcgttctgaataggcttctaacagacatactcgtatcagctgaccattatttgctacttcgtcatcctaccacgtgcatgtactcacacatacctctgcttgagtcactaaggatatcgtgtctctcatgtgggatcagtatgccttagggggctgctcaagacaccgggtgtggtctgatcacctattgacttcctcgatctacatccgtaaacacatgagtagggtcataaaatctaagttaaaatagacactcaatgtacatgacttcgagtggctagacatacttacctggtggacaactgtgtaggattcccattagtcaaacatgaaatgttgatcttgtccaaggaatggtcgtacgttggcaatcgattgactggtgaccgcagaacttgacctaacaatggtcccactaggattcacttgctcaggtgattatcctgcataatatcccatgtcacgcataagcgcctggcctcatgcaccctgtattggatcgcctcatggttctacattgccatgcaagttaagctgacctgatcggtggggcagattgatcgccgatctggtaatgaagctggaaatcaaggccctaaattcttgcaacgtctggtgatgctgcccatagttgatattgtttctggcaatcccatgtgtgtggagagttctcatgactattcaccttgggtccgttgatgtccgcatagtgtaaacaagacccgttgtggggggtgcatcaaaacggcgtgacacaagggttgtggactatggaaggccccaagtttgcctaaccgtctagaggaaggaatttttccaaactggcccaactatacgggggcaacgcaaattgtggctcggggcctaatggagcacacacgggtgtgtgaacagcgctccgccgaaggacagagggcgtgccctgccggggagaactaaaacgttgacaccacatcaggccccctttgagacaaacaccaaaaaaggcgtcgc

SEQ ID NO: 559702 - DNA, 305 bp, Homo sapiens
tgccgcggccgcgcgcccgtggcttcttgcctttgttcttggtggcaacgactggcgctgcatgcccctgacacggacccggcggggtgacaacgctttaccggtgacaacagacaaccggctaaacgcttcgtttcctgtcatcctggccctgtttgggaggtagggggctttaccccttctgtttcatgaagttgctgcggaacggaacgattgtaatctcacctccagatccataggcttctgctaggagcatgttgctgacaaggaatgcttgtacccaggccaacagcatccttgcctcc

SEQ ID NO: 559703 - DNA, 105 bp, Homo sapiens
tctagaatcctgtgggtgcttctcatagaacaacagagacagttgattcattttgttgagttatcgcgtcagaattccagtttacgtcgaagcacatgaggatga

SEQ ID NO: 559704 - DNA, 234 bp, Homo sapiens
agtcttgatcaggtacatgcattagtaagtactattctcccatgccagtgggcttgtcttctacttttcttaatgaggccgggcgcgtgtggctcacagactgtaatcccagcactattgggaggccaaggcaggtggatcacctgaggtcaggcgttccggaccagcctggccaccctggggacaaccctgtctctactaaaaatacagaacattagctggtgtgtggtggcg

SEQ ID NO: 559705 - DNA, 109 bp, Homo sapiens
tgatccccctcgagttctagcattgtcagctgtcctcccatctcagacctcatgagtagctgggaccagcagacatgtacaagcacagcttgctaattatttaattttt

SEQ ID NO: 559706 - DNA, 137 bp, Homo sapiens
aagacgcagactcgaattcactctggagagaagccctacaaatgcgaaacctgcggagccagatttgtacatgtgtggccacctccgatgcccagtgtgctctatccaccacttggtagagacagccgctatcccct

SEQ ID NO: 559707 - DNA, 356 bp, Homo sapiens
cctatgaggccgatacagtttggatgttgtcccctccaaatcccatgtggaattgtaatccccagttttggaggcagggcctggtgggaggtgattggatcttaggggtagattcctcatggcttggtgctgtcctcacaatagtaagttctcacgagatctggttgtttaaaagtgggtgtcatctcctccccttgctcccactcctgctgtgcgagacgccagttcctgctttgccttttggcatgattgtaagctcctaagtcctcatcagaagccgagcacatgcccgcaccatgatttttgtacaggctgcagaaccatgaaccaattaaacctcttttcattattgatca

SEQ ID NO: 559708 - DNA, 292 bp, Homo sapiens
tcgcggccgcgtcgaccctacgcccagtaccgcaagacccgcaagcctggctggcgacccagggcaatgtcgacaagctggtgaagctctctggcgccaaggcgtctgatattcccctgctgctgcaaggcaacgtctacccgttggcggctgaccaggtcaccgttctcggcaagccgaccgcccaggccatcaccgacaccgccgcgttcctgaaagagcagggcaaggtcgatgccgtgctgccggactacgtcgacgcggccgcgaatttaggagtagtagtagagta

SEQ ID NO: 559709 - DNA, 871 bp, Homo sapiens
  misc_feature (3)..(3): n is a, c, g, or t
  misc_feature (102)..(102): n is a, c, g, or t
  misc_feature (112)..(112): n is a, c, g, or t
  misc_feature (136)..(136): n is a, c, g, or t
  misc_feature (140)..(140): n is a, c, g, or t
  misc_feature (146)..(146): n is a, c, g, or t
  misc_feature (178)..(178): n is a, c, g, or t
  misc_feature (253)..(253): n is a, c, g, or t
  misc_feature (293)..(293): n is a, c, g, or t
  misc_feature (309)..(309): n is a, c, g, or t
  misc_feature (404)..(404): n is a, c, g, or t
  misc_feature (435)..(435): n is a, c, g, or t
  misc_feature (437)..(437): n is a, c, g, or t
  misc_feature (441)..(441): n is a, c, g, or t
  misc_feature (506)..(506): n is a, c, g, or t
  misc_feature (529)..(529): n is a, c, g, or t
  misc_feature (732)..(732): n is a, c, g, or t
  misc_feature (738)..(739): n is a, c, g, or t
  misc_feature (749)..(749): n is a, c, g, or t
  misc_feature (766)..(766): n is a, c, g, or t
  misc_feature (865)..(865): n is a, c, g, or t
gcncaatccattggtgacgttcatctttttccagaggaatataccattctgttaggacttctggtcaaacgttggtcgtcactgcgcctttgcgcgccgggngactttaganctttttccttccaggacaaaaggnatgntgttcngcttgttgtgatgagcgatatagaggggagcnacaagagtgggtgcggtgacaagatatggaaaggggtgggtggtctggggggtgggatttttagaattgttcggntaaaggttatcttttttgctacccgtggaatcggaaagtnttccttcagggttctnactggagggagaaccggacatcttttgtttgtgttctttggggggtgagggtcgtggggtggtgtatcatcatcttcagggtctttgggctccanatcctcagtagggtctgaagagttaacttcntnttgngggggagaaatgaggttagtttcctccccagattcggttttgaaagcatgaggggaaagcttccntttgtgagggaggtggtttgtgncagccttggggagctccttgttatcagaagggttggagatgggcttggaatggtctttccaggaaggctgctctggaaccaccttgttagggctgtcttttgaggtctgctcctccgcacccgacttgctgggcccgtctattgggccctgctcctctgcaccggacttgttagagccgtcttttggagtctgcttctccgcncccganntgatagggangtcttttggggtctgancctccgcacccgacttgctggagccgtcttttggggtctggccgtccgcacccgacttattagggaaatctttttgtggtctgcgcctccgaacctganttgcta

SEQ ID NO: 559710 - DNA, 321 bp, Homo sapiens
gatcgacgaaaatgttggtgaaaagtgagtctcgaagtggtagctcacacttgtaataccagcactttcggaggctgagacggggatcgctcgaggccaggagttcaagaccagcctgggcaacataacgagacccccatctctaccaaaaatttaaaaattagccgggcatggtggcgcaacgtgttgtcccagttactcctgagactaaggcaagaggatcccttgagttcaggagttcaaggctgcagtgagctatgattgagccactgcactccagcctgggtgacagagcaagactcttatctacctgtgggaaaa

SEQ ID NO: 559711 - DNA, 801 bp, Homo sapiens
  misc_feature (333)..(333): n is a, c, g, or t
atagtttgacattcaaagtgacaatgtttagcaatcaaatttacatgtatagatcgtcagggaatagcccaaatgttttaaacgcaaaaaaaaagacaaaaaaaaaccaaaaaaaaaaaacctacaaaaaaaatttggtggctaggataaagggttatcctaattggcttaactctcaggaaagtgttaattaacgcattgggaattcctgtacgtatatcactgtcaatggaattatccaattttacagattagtatgatatactttccatcatttaacgtaagggatcgaaaacttttcaaattggctctatctgggctgatagacatttncgtcattaaagtaaggggatcgaagactttccaatatggctatctccatctggggctgatccaaaatcctgagatggtgggctacctatatttggtggcagcttttcaattgtcctctggaacttccaaaccactttcattccagcctgtagaacaaattattctggatcttttgatcaaagcctgtaatgatagctttaacaaaaaaaaaaaaacaatcaaaaacaaaaaaaaaattgttgtggggccggtcttcggcccctagaaaaagttctttaaacacctcttcgttgggggccggcggccccaagtgtgtttatcaaacctttggcaaaccttggcccccagagaaactctgggctacaaacggcgtggttttccccccaattaaaaaaccccgggggaaccagtcgtttggacaatccagatggggtccgggcgatcggggtttacacgggtcccgagttc

SEQ ID NO: 559712 - DNA, 402 bp, Homo sapiens
tactattataggttttcagaatcgtaagccaggctattgtatcgcaattcggcatttatcgaaaacaaatttgccgtggacactttgttttgtgcttgatcatgtctataatatcattattgaggaatattattatcacagcatgatccccaccctttatcattttgtgcagtgattattttttaaacgtcttctttcatgtaaatagcatacagggctttactatcttttcatctcattaattcaattaaaaccattaccttataatttttttctttcgaagtgtggtgtcttttatatttcaattagtcactgtcttaattcatagattttactttttttcaccttaggtagtaggaagaattacaatttctttaaatcatttatctggatttttatgtt

SEQ ID NO: 559713 - DNA, 253 bp, Homo sapiens
agtacctcatcccctcagtgactaagaatcgcagtatttaagaggtagcaggaatgggctgagagtggtgttagcttatctccaaccccagaagtggccaccacgtattccatcgtcaagtttagtgggctatcgacgtagcagcctgacagcaccacaaggagcaagggggcgcagcacacacaaccttaggcgagaaacccaacccattgcttgcatattagtgcgcacaagcttgtggccaacggaattg

SEQ ID NO: 559714 - DNA, 394 bp, Homo sapiens
acttccacaaggactggcagcgggcgtggccacgtggttcaaccagccggcccgtaagatccgcagatcgtaaggccgcggcagagcctaaggcgcagccgcattcagcctcacgcgccaccgcgtcgcgatcccatccggcccatcgtgcgctgccccacggttcggtaccacacgaaggtgcgcgccggccgggcttcagctggaggagctcagggtggccggcattcacaagaaggtggcccggaccatcggcatttctgttgatccgaggaggcggaacaagtccacggaatccctgcaggccaacgtgcagcggctgaaggagtaccgctccaaactcatcctcttccccaggaagccctcggcccccaagaagggagacagttctgct

SEQ ID NO: 559715 - DNA, 324 bp, Homo sapiens
cttccggcctgcaggatccagtcctgccctgctcacccagcttccaggcccttccctgtgtgcagcctcagtttgcctgctgcagaataagcaccacgctccctcgtgggcagaggcaccggcagactcaccacgcgccctgcaggcatgtcctgtgctgtgccaggcaggccccggccacgtccctgcccccggagctggccttcagcggggacagtggtcagcactgaagacagtcatacctgcccggccggcactgccctgctcagcacggggacaatttgaacttaagctttaacttaattaaaatgaactaaaattaca

SEQ ID NO: 559716 - DNA, 506 bp, Homo sapiens
ttttttttttacagagtctggatctaattaattgggtaactcaaaaaaatcttattccggacgggatccagaactaaaaagtaaaagctcgcagagaggaaagtcggcgtctctccgaaatgggtcccgggggcttctccttagcctccttcatcctcgtgggccaaaagttaagcatatccggcagcctctccttaattttccgtgggaacgcggcttctccagagcaatacgccgccgtgggggcggcaggacacggtggagtaacaagacgctaaactcgtggggtgctggggccctgaggtcctaaccttcttaattaaggggcttcctacacaacatacggggggacatcaatctccttaagaagagatggaaaagttgggggatccggctaacttttggggggcccgagggggcgaggcacggtagtatcagccagcccgggattatccttctctccttttttcacaataacccaagttgaaaagctcggattggcttca

SEQ ID NO: 559717 - DNA, 354 bp, Homo sapiens
  misc_feature (58)..(58): n is a, c, g, or t
  misc_feature (166)..(166): n is a, c, g, or t
  misc_feature (187)..(187): n is a, c, g, or t
  misc_feature (239)..(239): n is a, c, g, or t
  misc_feature (243)..(243): n is a, c, g, or t
  misc_feature (319)..(319): n is a, c, g, or t
atggaatgatctcggttcactgcagcctctgcctcctgggttcaagcaattctcatgnctcagcctccagagtagctgggattacaggcatgcgccaccatgcccagctaatttttttatttttagcagagatggggttttaccatgctgcccaggctggtcttgnaactcttgacctcaggtgagncacccatctctgtctccccaaggttagggttacaggagtgagccaccatgcncggncaaccctttcttaaagtaacaggaatttaacaggcattaacctaaacacgagaatgatgtacatttaatggatttncagaacatgatgaattccactgacccccattaaca

SEQ ID NO: 559718 - DNA, 413 bp, Homo sapiens
cgtcgaccggccgcgggacagtgaaaacaagaagacaagagcaagagagagagtaaggaggggcgagcagcctcttttatagtgagtcaggcaaacctgaccattgccaggtaactgtggggcagagcttagacaaaatgttaacaccatctgtgacttcagcaagcctttattatcatggtttatatttttgctatgagttttttaaatacatttttttaggagaggaagtgttttacctcaagatttgaggtccaacaaaagttctagtctcagaatatgagctcttcatcataatgtatcaccacaaatattttttaaacttttccataaaatagaaaagggaagccataccccccactttctgtgacaccgtcgacgcggccgcgaatttagtagtagtagacggccgc

SEQ ID NO: 559719 - DNA, 379 bp, Homo sapiens
tttcctcccccccaacttttttaaacaaaaaacaaggccttttttttttagagtggggccccctttgccccccccaacagagattttacatggaaaccgggctcagttaaaactgatttcctgcccaatatttgtttttgggctgtttttagtgactaattattaaggaatctagctggttatccagttcaaggctttttttgttgttaatgaccccccaaaatagccgtttagacatgaaatacagcagcgggtttccaatgcgaacaggtagtttgcctttttgttaaacattcaaaaaatgaagttttgaatttgttggaacattcaaagggctttagagcctttttttgtaacttaaaaaaataaatacccctgt

SEQ ID NO: 559720 - DNA, 853 bp, Homo sapiens
ggtcgtggtgcttgggtggtcgccagcaagaagactttggtggggtagtctcggggcagctcagcgtgcccgctgtgcccgttactggcctcgttcgcagtcttgcacgtcgagactcgtaggccgtaccgtagggcgagcgtgcgggtcgccgtcgcggccgcctcgtgggtctgggcccatgccgcatgcctcttctaccgcgtgctggttgggagtcgccgcgagatgcggcctccgggcccgcccccgtgctatgcccccagtaacggggacttcatccttatgtctcctcagcagacgcggaagatctcagtggttcagtagcatccccgagatgtcaaattaaactcttggtggagattttatcaaagaatctacaggctactacatttctgagtacaaagaggttatggctggcttctggaacgtcgagagatgatgcatcctgaagataacaagccactcttggaagacattggacattgatctaagggatatttattacgaaatccgatgtgtgtgatgccaatgccatcacttggttaaaatagacaagtggtgagagacaatcctgactttaggggtcctctggcgtgtagatctttccttttccatgatatcattcatatggacagattagggtggtctcatggattataaccatttgtattatcgggttcagtaacaagatatctgactgtgccagacgtacttggtggacgaaagttgcatatggacaagtcccttcgagttcttgggacaatcctaagttcctctcattgttcatagcccctgagcttttggagggaaggatcattgaagtggggtcaaataataaatgctggggaga

SEQ ID NO: 559721 - DNA, 186 bp, Homo sapiens
tactttccacagggtacagaagacataggatgaagtctttggcatgacaacattcaagatggtgtagtgcaccatgcagagcttagaaaagctggacaaagaaaacaaggaagtattcaaagattagtaaagttatgctaaaagcagataggaactggcttgaaatagctcccccctgtggaaaag

SEQ ID NO: 559722 - DNA, 194 bp, Homo sapiens
gttttttttttttaaaaaattttttaaaaaataggccttgggggttttttttttttccgggggccacctgtttggtttttaaaaaataacccctttagtaaaagggggggggggccttttttttttttccaaaccgggaaaaaagacctgggttttgaaaaatgggcccccaaattaaaactttgggacgggta

SEQ ID NO: 559723 - DNA, 461 bp, Homo sapiens
aagcagtggtatcaacgcagagggcccattacggccggggggaaacactgtgcggctgtggtttggttcagcgcgtcgcggctcatggctctcgttacaggcctccacggtgttccaccttggagtcaggacgcgcgcttgtgccttacagttcggttcacgcaatggtggaaccacctgggcatttacagtcgacgcctgtgtacactcggcttcagagaattcaccgaaacactgtgtcacccggtgggcatgccaggcgcattctccctgggagattcacttcctgcacgagacgttacttaacacgcatgtgtaccctggaacgtggcaggacatccctggggtcggacaattatctttcacacccaactttctctacttatcgacgggcactgacattgccagaaaacacccactagaacttcagcaatcaacggcccgtcttccctgcacccgac

SEQ ID NO: 559724 - DNA, 105 bp, Homo sapiens
atggtcggtgaagagaccccattctataccaacacctattctgatttttctggtcaccctgaagtttatattcttatcctacctggccatgggtacctgagctcg

SEQ ID NO: 559725 - DNA, 1209 bp, Homo sapiens
gtacgcctcgcgtttaggcagggcaccacgaaaatttgtgtgccccacagaaactcgttctggtgccctgtctgtttcgtcgtagaggaccaggaaacattctgcgagagattactcttatagggggttcctcatataatctcttcaataagagagatattgtgttccaacacacattgtgtttgggaataatgaataaattggttcataccgctaaataattggggggaacttttcgccccgtgtgtgtgtttagaaatgaagactttctttgttaaaacgggaaatttccttgtggcttccttttcataaaggggggtgtcgcccttggggcagccacaacaccgagtgggcggcccaagatgttgacgttgccgctccccgctcgtgtttgtaaaaccccctcctttgggtggggtgttattttgtaacacacaaggatttttaatttgagtacatggaagaagcgtgtttatgagtgctcaccaggaagcttggggaggacccccactgtgcgttgagtgcccacgctctttggtgaacccccttggcgcttagtgcacacgcctcgctcttgtaaccaacccctgcttcccgtcacgcacgagtagccctctatgatctcgcctcgtttctcacggatctcacggacaccctgggtccacctggcgcacaagttgccacgcgcccccttgtggccacagggggctccccacattcgcacgccccctgtgtgcctgcacacagggagaggggggtcccccatggagagttcttcgcgtttttggctgtcacatacacacaggagagacagagtgtggaatatggcttgtccacaggcactctgcgttgatatataccctcgctgataaagagggaggggagagttcacctcccacggaaatatagaccacaaacggaagaaggaggagggccactacacaccttctggccttcttccacttcgatacaacacttcctcgtgtcttctggtgttaaaccactagatgcactggaggctaccacacacgccacttcttaggtccccgcagggtgcccacgcactcaccgtaaaaccactcgaataatgctaaagaacgaacccaaaagagcgccccattctctgattgttattgaggctcctgcactgaaactctggacctgcctgcctcagacttctgtgaaagaataaaatttctttttgcccta

SEQ ID NO: 559726 - DNA, 116 bp, Homo sapiens
ctgtgaaactgtgtcggttatctctgtctttgaggatggctgtcctgttgctggttaacattcaccttcctctttgaggagtatttttccattatgtattcataataatgttaatt

SEQ ID NO: 559727 - DNA, 308 bp, Homo sapiens
  misc_feature (33)..(33): n is a, c, g, or t
gccaatgtgtgctatgaccccttctgaacctcncaagatcacagtctttgaagtaagactaaggactggtccttttctaggtgacacaagtaaagtaatagctagaacagaagaaaaaggggtccccaaaaatgtaatcttaaaatttgatgcctgtgctgctattaatagtaaacagcatgggataagatgcagttctctagattggaaaaaaagttacacagcagaaaataagtacatctgtcaaaaatcatatttatgcgaagatgtgtcaagtactggtacttgtgtcattagaagctacttaa

SEQ ID NO: 559728 - DNA, 165 bp, Homo sapiens
agcagcaacctggtataccagcgaaactccttggtgcctgcgctgtgtgtgtagtatgtgcgcggtgtgatcagtgcgctgtgtgtgtgtgaggtgcacgctgcgctgatcatatgctgtgtgagttaggtgcgcgccgcttgatcggccgcattctgttaaggt

SEQ ID NO: 559729 - DNA, 440 bp, Homo sapiens
cccagggactccatgaaggttcaaggccccaggacctctgctccctaatctgccctgagaagctcagagtctgggggcagaacacatgaactgaaggaaggagggcagaggcagtgactgtccacttggtgagcttgtacaagtccacccacctgttctaactcaagaagggaccactggttcgagagagtattgagccaggcctgggagctcagtgcctgctttctgcctagaagccctcctcctgtcccttccagcattcatgctatgtgtctggccagagggccccagcccagcttctgccctctctctgaatgaagatctaccaaaacagtataactgaccaaggtttctttccaaagggtcagtgttaaggcaaagctcttagaacagcccctcacacacagtaaatgctcaataaatgttggccttttaaaaaa

SEQ ID NO: 559730 - DNA, 159 bp, Homo sapiens
atactgggccaacttaaagctgtggttcaagcagaagatcagcaaggaagagttcgaccttgaagcccacaggctcctcactcaggacaatgtccattctcacaatgatttcctgctggccatcctcacacgttgtcagattttcggtttctacaccag

SEQ ID NO: 559731 - DNA, 149 bp, Homo sapiens
tccacgagaagatcgagcagacctccaccaatgtactctggtacggctccgtggacgagtaggaagctgcgcgagctgacgcagcgctacctggaccctgagcgcgcgcctgagagaagctgggctacagccgctgtagtcacgatcgg

SEQ ID NO: 559732 - DNA, 1079 bp, Homo sapiens
taatcgcaatggcattcctaatgcttaccgaacgaagaattctaggctatatacagcttacgctaaggccccaacgttgtaagcccctacgggctactacaactccttcgctgacgccataaaactcttcaccagaagagcccctaaaaaccgccacatctaccatcaccctctacatccaccgccgcgacctttagctctctaccaatcgctcttctgacatatggaacccctccctccaccagatatcctaaccctccctggatcaaccatcaacataaagtccctccttattattttcgtgagccgaacttcttaaccgttggccgaaatgtggtcaaaggcttctgaattcgagaggatgcaccgatcacagaggttggtaaatgacgacactgtatcggaggtgaaagaggcatgtggagatgctacaataagatctcaatatgaatgatgactcatcagggcactattagtaacttactgaataccacaagatgaacttatctaaagatgagaataccctcttaatcctactcgcgtacgcggtatgaacaaaacttcacgtaataaactcctgaataagtgcctgccagtgcatgaccattcctccaattgtatgattttaactccgaagactagcagaggagcattggaaatcgccctttcgaactagggagaatggggagttccgaaatgtatcttgcgaagcttcggacaatgggttccgccggaggtcccctttgctacaatttttcatggccgaatagggaacattctttaatgtcctgctcactctacatcttcgtaagaccaaggattttgggcattttcccgtaatcggcgaaattttagtggcagactactgttagctccggttattaatcgaagagaaaccgaaatccaaacaagtctacccccattgaagaattctacccccgcaggcatatgtatgtatacaaccaaatgacaagacccacgacggaagtacagacgacacaaccataagacacctaaaaaaacaagggcacaccggcacagacaacagaaaaggagacagacgtaccaatatcatcact

SEQ ID NO: 559733 - DNA, 763 bp, Homo sapiens
tgatgtatctggacaaaggttagtgaagctcatcacagcgaaccaggtctctcaaaagaaaggacagatagaccaccctcatcaatgaaaggaagttctcaaacacatccttggaacttactatgtttcccagttttagttttgtgtttcgttatcagttttcggtcattttctgtcacaccagcaggcactcatccctcagtctgccatgtcaacttttcatgcatcagttcattcccaacattccaagcaagcaagcagtaattaacatccaattgcatcggacacaaagttacatcttatataaatattaaattcgatctatttccacaatgctagatcgtactatcaggtcatatccgcactataaacgcatgttgcacaaggtgatataactgcatatgcatactaacaggtgaatgtagttgagacaaacgtggcatgggctttacacagcaagggaaaagtgcctctaaacacgacgtatgtaaaaaaagcatttaaaaaccaagagttcattaacaaacaaccagctatcgcgcctgccatttatctactaaactcatcaacacacatgcccacgccaccattcaacctaattctctacaaacactcgcggcgcgaaccctatccgacagcttatccagagggtccctccggatactccaactggttcgccataagtgccacttagggacaaacttacgtttttcgacacgctgggacctggtcgcacaccacccccaaagtccacggccacgta

SEQ ID NO: 559734 - DNA, 147 bp, Homo sapiens
tgaaggtccactcaggagccatggacggcaggccggaaggggtctggatggaggccagggctgctgctcaaaatggccaggacagaagcgaggagtcctgaactggagatgaacagcgttagagctaccttctagagcctcattgac

SEQ ID NO: 559735 - DNA, 1598 bp, Homo sapiens
  misc_feature (248)..(248): n is a, c, g, or t
  misc_feature (351)..(351): n is a, c, g, or t
  misc_feature (698)..(698): n is a, c, g, or t
cttgatctgtaatagctagaatgagaccttatctgcaagggcatttgaggcgcaaactacaagtaatacgagcagtagttatcagaattgggatgatccatgagcagctaaggtcaatactagttagatcacctcgtacacggtgcatgacgagtggagcccatccatatcctccataggactgtatattctagtgccaaagtgatgtcatagctctcaatacgcgtatcactcgccagtgacagttnatgattcacacaatcatcataacttcaccttctgggaataggcaagacgaccgaagccgcgtataggaaacctcacccgagagagcacagaagcgcgatgcantagctcgtataggacacgatgcgtaatcaaagggaggctactagacctgattctaactgatcacgctgccacttagtggaagtggatccagactttgagtcataggatacagattggacagacacatagcctcgaatcgcggaagcgctggggttttatttacagctctggtgtgagtcacacaagaattaggatattcctcttacgatgtccaccccgttatcccaacttgtctttgctgccacgaccggacgttatggcgccctttccttaaaaagtaagcgcgcgtgtgaatagacatagtgttgagacctgggttctgaagtatcccaaacacaggcagaggnataccaaagggtcgtgtcaggtccaccgaagctatagagcagaaaggattataccattgtgagttgagaagaggatggaagggttaaaaacccatgggctgtggtacatcggatcactccgaattagacttaagggccccccgttacaaattggggccagtgcgtgaaacccctaaattgttaagagagaacacatgggcgtggtctctgaagaggcccatgccgaaactacacagccccaatgcggtaatcccattacccgatgaaaaactttttccccaacaatttaacaaattatcacacaaaaagcaggacaaagttgcacacgaggagggccgccactgggagtattggcggaggaccattttaaaaccaaaagtggggttggtgccgaggagcccgtgtcatcttggcacaccccacgaaagttgtaacatcttggcaccgcgggtgaggagccgttcgcgaaggaggcggttacacgacagaaaagagccctatacattgttggtgtgggtcaccatggggccaacaattggtaccccagtgtgggagaacccacgaaaagacgcccatttcctccggcttggtttaccaaaagcgtcgggggatcccgcctttaggtacatgtgggtttccaagacgcagaagttacggtcccaacagggggggaattttggcccccgaaatgagaaactttacaattggaggggggagcgattgtgggcggagaaggcaacaccacagggggggactattggtttgcgcgttgtaacgagacattccttatattgaggacgcagttgtaacattggggttggacacacacatgggggagggaacagtgtgaggcaggaatttgtggggcgtggaaaaaacacaggcagctcatcatagggg

SEQ ID NO: 559736 - DNA, 373 bp, Homo sapiens
atttagtttttttttttaaaaaataatgccccccgaaaggggtcctttatgaaaacccatctgaagtcttttcataaaaaaaattaataaactttagttggccctttagcccgggttttttgaaggatggaccttttaaaaaattaagggtcttggatgattaaaaaatgggaaagaggaaccttttttgtatcaggaaagttttggggctgggttttccccccaacccctggcttaacaaaaactgctgggtaaaacatggactaaaaattcccggtattgggcaaaacaaattgttccttttatatttggggggaaaccggccattcatgttttaatgtaaaaaaaaacccttttcccgtttgttttttta

SEQ ID NO: 559737 - DNA, 410 bp, Homo sapiens
ctcgtacccctttaccctataatggctatgcttagagatttcacatacactcggagggaactgctggtagaccaacttatttagagcgaattggacatggatcagaaccccagtgggagaaagttcataggcgattagattaataatttaatagaggatgagtgacctctgatttactgctagaatgaacttgtcaatgatggatgggcaatcttcatggaagttatacaagtgatgactgaagaccctagcttttacacctgtcagtagacctgctactaccactgaacctcattgtccctacccctgcttgtaactctattgctggattctgttcactgtatataagtgtgtatgtgctaagattgcatcgctgtgacaattggtcccctagagatttagtggttggc

SEQ ID NO: 559738 - DNA, 219 bp, Homo sapiens
gccaaccttctatcagagttaaacttttgacaagggggccaatctccaactgatccatcagtcatgtaagctagctgtagagctttcaacttaatagcagcaactgcccaatgccatgtgaagtaaccaactggtttttggtttttttttccccctcagtgggtaatgttatgtgtaatgtaattaaacccttatttaaatgaaacttgttttcagaaa

SEQ ID NO: 559739 - DNA, 779 bp, Homo sapiens
gaacaggaagtcacttgggctgtgcagataggggccaaggtgaacgaacacgtgtagaggaggaagagttcaacctcaagttaaactggtaatgagcttgatcttcgtatcattagaagaaccccagagatagcatgcctctattggattttactttcttgggatgcactgatgtgtcgtgggaagtgacactttatctggcaaagtaactgagagttgggtaaaggaatattttcttctctgaataataattattttcacaggtgaaaatttcgagtagtttatatcactaatgtatgagcaagatctatatcgaatttcaaggcgacgtgaaaaaaattgtgagtatgtgcaatttaatatagaaagatttctgcctgttgggacaagaggtttggggtagtacagattaggataagtaagcttatatatgcacagagattattgtattagctgtaaattgatttacaagtacttaaaagcgtggtccccagtgaggcaagaaagtttccggttaagttctttaataataatcctacagttgatcttaagacagaagagaaaaaggttggggataaaacactttaagtgaaggggtccgaggtcgagggtggaaaaaggatgtcaggcaaatatttcagatatttgcaaaaacgcaggtaataggttacttattaaatagtgatatgggttactattaagggtccgataattagttgacctggggtaaaataaagtgttcgctagtaaatttagcatatttgcatttggttatcggc

SEQ ID NO: 559740 - DNA, 398 bp, Homo sapiens
aacaggagtccgcgccggcaaagtcccacgctgaggcatcacatccgtggaccatgccaccggaggacaaagagccctctgacggggagggcatgggctgccgcatggcactgtagctacctccagagaataccctctataatgcgctagccattctgtgcggataacctatgcagacaagccaatgttagcactcatggagcggcctggctcagtgcgggactttggtgatagatggaatactgactgagccactgaatacttgtccgattattcctgaggcccgaggtttcagtggacagagcgcagagacggtgaatattcagggtttatggcatccggagagggacatttttcagcagaattaaacagtcatgtgatagatgtgttcaaagttg

SEQ ID NO: 559741 - DNA, 408 bp, Homo sapiens
taaaaccaagtctttgcaacatattgaaaaatttaatattccacagtagaatatgtaagaaaaaaacccctctatttgtaattaatgacacataaatttaagaacataattaaaattacactaaatatctttctatccacatagacatagataaatatctatccggtataacagatctatataatatatatcacataatagacctatatatctagatagatagatttatatcacaaattcaccgttgatgacctggaatacctgagcttttagttgttggttttccagacagtgcaaaaatcatttgtcatcctctttgtaaagggcacagccaaatcccagaaaaaaaaaataactttgggttgatggatgctgtctctcaaagatcaaacaggagtcttcccacgg

SEQ ID NO: 559742 - DNA, 118 bp, Homo sapiens
cagaagtgaatgcagctttcttcttcatgcacactcattgtcactctggatacttcatccttattagataagagtgctgcagagctcgaaggcagagattcgcttgtgtgggttaaaa

SEQ ID NO: 559743 - DNA, 365 bp, Homo sapiens
  misc_feature (201)..(201): n is a, c, g, or t
tttgtttccttttgggtttttttttttgtttaaagggtttttttttgcagggttttgtaaccggaaaatttccgttccgctcccaaggggtccagggtaaattccccttccccctggggaaaagcacaacctttttttggggggtttaagggggtttttttttttcaagtgttttggttttttggttttttttttttcccnggccctttttcccctttatttggaggggaaggggagaaagtgggaacagggaggggggagggggattttttttttttttttagttcttttccaggggggggaattttttttaaaatgggttataaaaaaagttgttttttaaaaaaaaaattttttggccttta

SEQ ID NO: 559744 - DNA, 953 bp, Homo sapiens
tgcgtacccgcgtgtgtgcgcctaatctcaggtggtccacccgatgatcccgttgagcaccaaccgctatgtcgccctcgcgcggcccttattcgctcgcgacaagatgatagaaagaatcatgaaccaggaaaaactcgccaaactgcaggcacaaggtgcgcattggtgggaaagggaactgcttgcgcaagaacgtaagaaaggtggtgtcataggaacacgccacagcagatgacagaaaagcttcatggtctccttatcagaaggtaaggggtaacacgaatatctgctggtagttgaacgatggtgaactctgtttacaagaccaaaggaacggggatccactattctcaaccctaaggtacaggcatgctctgtgggagcgaaacgactttcaccattacaggccatgctgagacaaagcagctgacagaaatgctacccagcatgttaaaccagctgggatgcggagtagtcatgacgtacgtgttcccggagactggtcgagagctctgaccatacaatctgtggtggaaaaagacactagctacgtggagaggatgatggtgatgaaattgccagatctgtgaggaattgggggagggtccaggaatgagggcactggattggtcagtctcgaagataaactgaagacgtggggagcggatcttttatgacggcttgagaacattgtgtggttcgaagcacgattggtatttaagccagacatgaacgaacattcggtaggtacacacactgcgatacgcgaccggaacgcgacagaaccttcgtccaaaagcacagcgcgtcaatcgccgttcgcctccctcgccctccccctcccttctcccgcctccctcctcctcacacgcaagaaaacacagaaagagacaacaaccgagacgacaacagcaaaacagaagacacacggcagaaaacagaagacatac

SEQ ID NO: 559745 - DNA, 356 bp, Homo sapiens
aacatgctacttctctccatttatttaggggttctttaaccctttttcccatttgtcctgagaatactcaccggcagtgcttacagctgcagcgtttaccccgagataactttgccacgaaatatctcgcttttatgattattttcacatcgctctagtatatcgactttagaaacaaaagacatcattctatttatagcattctgtctttagtagtggtatttccatttacaaaacatagtaattctcgatcgctgaaaatgtcaaatcctggaaaatgtagtattcctacacgtgatgttaacatcgttctcaacagttagccgaagattcattcgatgagtccgatttttctg

SEQ ID NO: 559746 - DNA, 425 bp, Homo sapiens
atatcacctcgcattgccgaggagatctgctgaccgacgtacgccttcgtggcgtcggtataggccataggctcaccgatcttggcggacttcatctcgccggcaagggcctcggcggccttcttcatctgcggatcggagatgacggaggtaaaggagtctgtgttctcgttggcttccttagttcccggcaggaagccctgggcaagcttgacgaagtcaacctggttggcgttattggtgacatattgggcgaatgctagggccagattagggttcttcgagtctgcggagacgcagatgccctgcacaaacaggggaggaacgccgatgcgtgtggtcatggcgacgtgggggaggagcttcggtgcgctcttcttgaggtcgacgcggccgcgaatttagtagtagtagtaggcggccgc

SEQ ID NO: 559747 - DNA, 786 bp, Homo sapiens
ggaaacatcagtgttttgaagctttggccccaaaaccaggagcagagaaaaaaacagatgtttcttattacgtcccagccatgaataccaagagagaggaacactggggccatttcagaaactgcttaccacaggccccatgtgggctcaggggagagaggccctggcctggaggaggaagagtgaacggggagtgtgagtgacattaagtgtttgctaacgtgagactagctggaccctctctcttctagtggtccctgaatcagagccttagcactacatattggagtctggattgcctgtttcaggaatctggtctctcaacaatcattagatttctgaatgaagatttagcataaacaccctgtatatgataaaacaaaattttaaagattatatttaatttgtttcgaggccttcacgaaaaatttaaagaaattataccaccacaacccatattgacatctactgacccctggaaaccagtagaggaatatgttaggaacaaaatattctgccaggggacccatctgatgttggcctgaccacctgagcgcaggcactggtcccactcattaacagatctaagaaacatgaggtaccagccctactacccaaagacctgagtgctataggctcagacaaaaaggcaaagttctagctaagaaaatattaagaacattgcctggcgcggtggctcaggcctgtaatcccagcacttagggaggccgaggtgggcggatcacgaggtcaggaaatcgagaccaactaacacggtgaaacctg

SEQ ID NO: 559748 - DNA, 169 bp, Homo sapiens
tcacaagcctacctaaacaagccttgaacagccagcacgaggactgaagcagcttaagtcactatcatctgggatctcctgtttcagcagtcttagtctgtatcctcttcaatacagtgtatctaagaaagttaaaaacctgtgctttactctccataggctatgaatc

SEQ ID NO: 559749 - DNA, 562 bp, Homo sapiens
attctaggggcgttgggtattggagttatggagaggaggtttatatagataattgtggtgatgaaattgatggccctaagatagaggagacaccgtgcatagggtgtaaggagaagatggttaggatctacggaggagtgggggaagtgactagattccccataataagtcggtgaccacgggtatggcgctaacaccacgacaatacaaacgaaacagtaaagacatacacatgaacactcacgtaaccataccacagcatccccactaactccaggccctcgaaaataggggaacactcaaagaaacgagaacgagacagcgaaagaaaaccaaaggcgcaaggacaacgcgactcccacccccggggcccgaacaccacgcacgcggcacgcgagcacatccccacgcccccgacaaagccgacggccgcctccccgacgccaacccacccacaaccgggcaccagaacacaccacatcaacacgcgggtgacccgcaccgcagagccgcaacataccccgcgcacaaagcacccccacacgccgcgcacgcccaaaca

SEQ ID NO: 559750 - DNA, 256 bp, Homo sapiens
cgcagttagcttcattctcttgtcccttcgtcacaggtagcaatttgcagcagatagaaagcgagctggattactccggtctgaactcagatcacgtaggactttaatcgttgaacaaacgaacctttcatagcggctgcaccatcgggatgtcctgatccaccatcgagatcgtcaaaccctaattgttgcatatggactctagcaataggcattgcgctgttctccctagggtaacttgttcaacgattaaagt

SEQ ID NO: 559751 - DNA, 220 bp, Homo sapiens
ccgcgattgactgagcccaggaaatcagctgcagtgggccgagattgagccactgcacttcagcgtgggcacaacagaagtgagaacttgtctcaagaaaaaaaaaaaaaaaaaattggaaaaaacacgggaaattctaattcctctattttccggcgggggcgggttaaaaaaccgggttttgcaccaattttttataggcaattttgggaggtatact

SEQ ID NO: 559752 - DNA, 285 bp, Homo sapiens
cccgttatttacctttccagggggcaaaacgacagaggtgtggacccatccgatatatagttagttttaacaactcttgcaaaactgtgtcatcagctgttatagatatctctccctttgccctgtattgttgaacactttatttttcttgggaacggaatcttgctctgtcgcccaagcatggagtgcggtggcttaatctaagctcagtgcaaactctgcctcccgggttcaatcaattctcctgcctacagactccatgagcagctgggacctacaggcgca

SEQ ID NO: 559753 - DNA, 185 bp, Homo sapiens
ctttaatcaaaacactcaatattaaaatgttaattctcagtcaggcgcgggggctcacacccgtaatctcagcactttgggaggctgaggtaggaagatcacgagcccgggaggttgatgctacagtgaaccatgattgtaccactgcactcaggctgggtgacagagcaaggctttatcttaaa

SEQ ID NO: 559754 - DNA, 157 bp, Homo sapiens
acctctaaactgacgcgatacaaatgatagccatacacaacactttttgacgaacctgatctctcatactcagatcgggaattatttttattgccacaactcccctgctgggactcctgcctcactcatttacaccaaccacccaactatctataaa

SEQ ID NO: 559755 - DNA, 227 bp, Homo sapiens
ctcatgagtacagttggactttggggtgccagagatggaaacgcagagcctgcaggtggcacatccctctgccttctgggtcttggcacctcatcctcgtggatggtggtgatgcagcccgagggccgaaagctggtggacccctccaggagcaggaactcccccttgctctgaagctctgcgtccagctgctcacaggggtcatcgtcgaggtcagtgacagctgg

SEQ ID NO: 559756 - DNA, 1549 bp, Homo sapiens
  misc_feature (233)..(233): n is a, c, g, or t
  misc_feature (408)..(408): n is a, c, g, or t
  misc_feature (520)..(520): n is a, c, g, or t
  misc_feature (637)..(637): n is a, c, g, or t
  misc_feature (1549)..(1549): n is a, c, g, or t
aacctttactgtatataagaaattctcaaacacagatccaaatgatcacctctgcattagtatgcacgcattgctggaaggatgctaattcattgagtgaactaacaagggaagttgctcgtcatgatatccaagcaattagatagaacagggtgatagtgccagtagatgaccgacgttactataacatcagtacatacgacatgcgcagctaagctggaaatgacaatagncacgtagggcactctccagtagattacgaaatcccgagacataacggtgactgactgatgttcaccatgggcgacgactgctcggcactaccacaagagatggcaccatacataacatattacgcactcattcggctgtatttcacatgtacacatccattgcgcattactgaanctccgtgcgccacggttacacagcggcaatctgcaacacgtggcaaaatctttcaccgagagagttctacccggcgcgcgagcgccagagttcgcgccaatgcttcacatangatgcgcatacgcattcgcgtagcatatggacaccttgctacgaggtaaatgcggtacgtactgtgtgcacgtaactggagaaacgtgccatccccttatttgcgaaaggcggagancttctatccaggttacgcatcctacgaatgaaaatcgcctttattccattacaattaggtccctcttatacgaaaaatctcccgttatttccaactaggaataccctcattgcctttccaagtcgcactaagatcttacaatcaagcctacatggccaaaacggcctaaaagtcgcaaccggtggcttttcaacagccaacaaggcaagtcaaattgtaggagttcttcaaactctgtggctgaattaatacgaacggtccgtggctcgatttgggtccacacccttatccgccatggttccggcgttcgagtgtccaaaggtctccaaccccatgtacattcctctgtacagtggtgaccccgtggcaccgttgcaagacttgtaccactgaagaaatgcaagcttggttggcacagtgaggtggacatcccccactcccctcaattcattgatggaagagggaaaaacacattacaaacaaggttgcccggaggaaggtgccaagcggtggcgcaaacttccaaacacaaggtatttttccacacagggtgttttttaactaacaagggattacaaaatgcttcgacgtgaagaaaaaaaacggcatctccacctacgaatgggttgcgacttacatggcgtaatggcaaccacatatgggccatggcacgtgccctaagtacaccgtaacggacttccaccaggaaacacagttccaactctaagcagcgagagaagttcccgcgtccatttcaccgacaggaaagccgcaaggtgagaacaccaacagggacacattatcacctgcgcgtgcgcgcagaacggggacaaagagagagaaccttcggagacgggtacaaacaacaaggggcacccggcgatggataaacgtgcaaggggtgcacacaan

SEQ ID NO: 559757 - DNA, 148 bp, Homo sapiens
gtgtgaggtgattagaggatcccgatttttaattgcttatcactgacgaatagctacgtttggggtccagtttcctaaaacgtagctattcgtcagtgataagcaattaaaaatctcaagatccagtgtggatccagtgtggagagag

SEQ ID NO: 559758 - DNA, 207 bp, Homo sapiens
gtcacagctgcccaacttcaagcacagttgttatgcagatgtcagtttaagatatcagcctgtctgactacaaggaatatgttgtgtcttcttttaaccctcttgacttcacctttggttgttgccccacggaggatcattgctatcaagtgataggggcagaaagacttttaagaaaactcaacgtgccagttgatttgtgtgctt

SEQ ID NO: 559759 - DNA, 126 bp, Homo sapiens
atcgagctcggtacctgccagaagttgcgcgcgctcttcatctagctgccaatacatgtcgcggatagcgacggaggtcgcgggagcctcttgcgcgacctggccgaggcggcgcccgcgggcgta

SEQ ID NO: 559760 - DNA, 619 bp, Homo sapiens
  misc_feature (7)..(7): n is a, c, g, or t
  misc_feature (32)..(32): n is a, c, g, or t
  misc_feature (38)..(38): n is a, c, g, or t
  misc_feature (45)..(46): n is a, c, g, or t
  misc_feature (52)..(52): n is a, c, g, or t
  misc_feature (56)..(56): n is a, c, g, or t
  misc_feature (58)..(58): n is a, c, g, or t
  misc_feature (66)..(66): n is a, c, g, or t
  misc_feature (69)..(69): n is a, c, g, or t
  misc_feature (74)..(74): n is a, c, g, or t
  misc_feature (79)..(79): n is a, c, g, or t
  misc_feature (95)..(95): n is a, c, g, or t
  misc_feature (97)..(97): n is a, c, g, or t
  misc_feature (110)..(110): n is a, c, g, or t
  misc_feature (113)..(113): n is a, c, g, or t
  misc_feature (116)..(117): n is a, c, g, or t
  misc_feature (119)..(119): n is a, c, g, or t
  misc_feature (131)..(131): n is a, c, g, or t
  misc_feature (136)..(136): n is a, c, g, or t
  misc_feature (152)..(152): n is a, c, g, or t
  misc_feature (169)..(169): n is a, c, g, or t
  misc_feature (174)..(174): n is a, c, g, or t
  misc_feature (176)..(177): n is a, c, g, or t
  misc_feature (195)..(195): n is a, c, g, or t
  misc_feature (202)..(202): n is a, c, g, or t
  misc_feature (210)..(210): n is a, c, g, or t
  misc_feature (213)..(213): n is a, c, g, or t
  misc_feature (217)..(217): n is a, c, g, or t
  misc_feature (223)..(223): n is a, c, g, or t
  misc_feature (225)..(225): n is a, c, g, or t
  misc_feature (231)..(231): n is a, c, g, or t
  misc_feature (239)..(239): n is a, c, g, or t
  misc_feature (255)..(255): n is a, c, g, or t
  misc_feature (273)..(273): n is a, c, g, or t
  misc_feature (276)..(276): n is a, c, g, or t
  misc_feature (295)..(296): n is a, c, g, or t
  misc_feature (299)..(299): n is a, c, g, or t
  misc_feature (303)..(303): n is a, c, g, or t
  misc_feature (305)..(305): n is a, c, g, or t
  misc_feature (310)..(310): n is a, c, g, or t
  misc_feature (313)..(313): n is a, c, g, or t
  misc_feature (322)..(322): n is a, c, g, or t
  misc_feature (328)..(328): n is a, c, g, or t
  misc_feature (334)..(334): n is a, c, g, or t
  misc_feature (421)..(421): n is a, c, g, or t
  misc_feature (475)..(475): n is a, c, g, or t
  misc_feature (544)..(544): n is a, c, g, or t
  misc_feature (612)..(612): n is a, c, g, or t
ggcggangcgtcccgcagccggctggtccctntcgctnttccttnnctcgtnccantncacccgcncgntgcgnagtcnctatggcggttaccgncntggagcgcttttngantgnngnttcagagccccngagtnttttcttggtcggttntttgggttttgatagcntcccngnncagtttgtcagcaagttngttactnagggcttnagntttnacattntntttttnggggagancggcattggcaaattnacactgatgaatacactnttnaacattacttttgagattnnggnagcnanttacnatnatgtatgtntgctcntttttntccagatctatgacttccatgagagtaacgtgcagctcaagctgaccattgtggatgccgtgggctttttggatcatattaataatnatgagagttacatgtccatagttgactacatctatgtgcagtttgaaaattatnttcaggaggagcttaatattcgccgctcgtctcttcgattactatgacacataggatcctacgtttgtntctacttcatcacgcccacagggcactccctttagtctctatatctagtgaccatgaagaaactaganagcaagg

SEQ ID NO: 559761 - DNA, 1707 bp, Homo sapiens
  misc_feature (1099)..(1099): n is a, c, g, or t
  misc_feature (1704)..(1704): n is a, c, g, or t
  misc_feature (1707)..(1707): n is a, c, g, or t
tctctttgggagatttaaatggaagcaatccaaatttttttaaactctcttttttaagcaccaaattttaaattatctctataagttcaatttgtgggggaaaaaaacaccactcaaaacttttcccctccagcaaaacaagcgagtgttcactctcctgctccaaattatctccaaattgtgaaaactcataccaaaaacaaaaaacaaaaaacaaagagcccacaacgagaagaaaaataaagagagagaaccaaacatctcacattctcatagaggggggggggtctcagggccattttagccagctctcgcgcgcgtggggcgtgtcttatacccatctccttctcaggcgtgatccttatcacaaaagaatacaaaaacaccagcctctaaagagctctcgcttatcacaaaatataaatgaccatatgtttcaccatgtgggcgcttctgtctcaacaatagttcacaaaatatctatatctctatgtcacacaaagagcggggcaaacatatctttaaagagagaatatttcacacacaagccacaaatgtgcgccgctgaaaagcacaacactataacagaggacagtggcaacagtgtagtcacaacacacgcatatataggggagcaggtcgtcacgacgcagaccacggcgccaaaatctgcgagccaccacaccacactctgtggtgcgcactaccaacgggaggggaacacaacggagcatccctcaccaagggaggggtaaaaaaagacatatctaactaccaccaaaaaacagcggtgtgcaaaaaatatcaccccgacaaaaattgtgcacaacggtgcttacttagcaaggggggccacaccaacagcacggagaaccctccccttagtagaggaaaaaaatgtctccccagacagcggcgcaaaccaaaaactaacgcaggggagcgcggccccccacaaagagggggtccttactacaaaatacggacagcggcgaccacaacggaggcggcccacatcctgcgtagaccagacgacttttgaacgacgacacacgggattacccgcccggtggtgggtgtagcaaacaaacgaatgttntccacccccaactcaccccgttgggttcgaccaaacaccaacactactttacaatgatggaggaggacggggctctcacagacaatactacgaccgctttggagaaacaaacccgccaatgtagtgcgagacaccctactcttgggggacacacacgtggcagacatatggcgacaccaccgcgcgtccaactaccgtagaaatgacaacaattacgcaacaaaacttccgccgccactatcgtgggggggaaccccctaacagacagcggggcaaacacgcctcatatataaacccgtgtaaatgaacagcactctcttatcaaagtggcgtcagagcatagccgccacagttatttacggtagtgtatgtatattcactgcccataaaacacacgtgggtgcacagtccccacagacgcaccttgcgcgaattgtgatcatctacacacggcgcgcgccaccccaccagaagcattctgccgcgagcatatcacgcgccgtagctatatgcaggcgatcactagcgcgcacgctacgatgatacgtatcatgacgcaccaatcgtgttatatgtttctcttttattcgtagtccgttgggggnggn

SEQ ID NO: 559762 - DNA, 439 bp, Homo sapiens
caggagaaaaatgcagatgtatacagatcactaattacattaaatggaaagagtgtaaatactacaattattagcagagaaggtcagactagactttaaaaaggcaagagctcctaagctacaagagatgataaagacaggttaaaaagaaaggttgggaagccatattccatgtacacactaatgaaaaaaggctaggtggctctcagtataagacaaagtttgcttcacaacaaggattagtaacaacaaagagggggatgctgatgctgatgatgatggtggtggcattaattcaacaattagaaataacagtgctaaatggtaaataacaacagagctcaaaatacctaaagtagaaattgaaataaatataccaatccatagttacatttagaagtttcggccgggcgcggtggctcaagccttaacccaagca

SEQ ID NO: 559763 - DNA, 244 bp, Homo sapiens
attatagaagtgcatagtgtggcccggcacaatggctcacggctataatcccagcactttgggaggccaaggcaggcgaatcactcgaagtcaggagttcaagaccagcctggcctcaagtgcctacctcggcctcccacagtgctgggattacaggcgcgagccaccatgcccggatacgctatataatatctattaacctcctaaagagggtcttcttaatggtaagttggggaaattttgc

SEQ ID NO: 559764 - DNA, 245 bp, Homo sapiens
ctgtacaatgctgcctccatgatacttccaagtggtgagactccatgagggagctgcctctaccgtataatgctgcctccatggtacttccaagtggtgagaccccatgagggagacgcctctactgtacaatgctgcctccatgatacttccaagtggtgagaccccatgagggagccacctctaccatacaatgctgcctccatgataattccaagtgctgagactccatgagggagccgcct

SEQ ID NO: 559765 - DNA, 192 bp, Homo sapiens
agacgtgagaccgtctcaaaaaaaacgaggtggactatgaggatggaacatcttcagtattacgtatctggcatatctatttagccttagtctactcggaaaaatccttattttccacaccataaaactatgtcatatacgcggggggaacggagttaacctcacaactctcaaagggatcgaagaaaaata

SEQ ID NO: 559766 - DNA, 143 bp, Homo sapiens
cgggatcggcccacacagcggaccgcccgcccgcccgcgcgcccaatggatcccggcacgcggaggacgcgggctaactgggacgccgacgctcgccccagggccccgcgcgctcctcccaccccctgggcgcatggcggccg

SEQ ID NO: 559767 - DNA, 282 bp, Homo sapiens
cggttatctcttgaatgaccatacaggtatcccaactttctgtttttaagagcctgggtgacagaacgagaccctgtctcaaaacaaaaaaagaaataacagaaaatctgaattgcttcaataatcccaaactttttgcttttcattgtgacatctcaagggaactgctcacgggcggcacttcagattttcagattatgggattacctcagctattgttacgttatattgcaaatttttgcaaaattctgaaattctgaaaccacctgctggttcccacag

SEQ ID NO: 559768 - DNA, 786 bp, Homo sapiens
  misc_feature (768)..(768): n is a, c, g, or t
gccatcatggctcctcccactaccttcgtccagaactcgtcatccagtacagcacatacctttcagctgggaagcatacgaagtccctctttaacatttttccatgtgccgtcctcattcccaggcttctctgtgcaatatatgacgtcatgtgttctggctccatcccacatgcctgatactccacctggcttacatctcgagcatcggtcagatgataagacttctcccttagttaaggactttcctcactgaacgttcagctctgtacattctcttgatttcacttgacagttgcaaaagataccatttaggatattgagttcttgcagaaggtaaaatataacaacgattgtacaggaaattcgaatacttgaacttaagtaggagtaatggattacgtgcagaagatagtactgtggttatctagtttaatcatatgatgtaacataatttatagagtagatataggaggtaagcataagttgcaaaggagcttcatctcttttatatgaagactgatctcgttaaataatcaaggactcgaaaaaagtcagcacaaagctactggaaaattattctgatgagattctgaagtgtttatctgtctaagaagattactcagaaggtaaagaacaatattttacaagctcttactaagagaatacactaatccaagaaaacttattttgaactagagaatcaaacaaagttctagttttgcatcgtgcatatgtgatactaatgctgatattaaccggggggggnaatcaattatcactcatt

SEQ ID NO: 559769 - DNA, 449 bp, Homo sapiens
tgtccacagacagcgctgacaacgctgcctcaccgccccacacctgcagggttctgacgaagcccccgagacaaggtggcaggagggcgagtctgggtacagaccggcatacaacagatccagaggtaggccagaagggaagcagggaagggggacctccgtggactctctttcctcctcttcttactgtctgtcccttcttttgacccgtaggagtctctctcaacaaactgaccctcaatgtcaagagtgaaaaggattacaatcgaccatggggtccccatctcagtcacaggcattgcccaggtgaagcttccacagcctttaccccacagtccacttccccatcaccctctctcccagacattaagacatcttctggccacagtcttctcaacccttgcctgcagagaagttcctctgctagtctcatctttaccaggcacccc

SEQ ID NO: 559770 - DNA, 236 bp, Homo sapiens
ttgatctacggatcctttgctttggtcaggaattcgagaccagcctatccaacaggcgaaagcccatctctattaaacaatacataacttagctgtgcatggtggtgcacacctataattccagctacttggcaaggcagtgggagaatcacttgaacccaggaggtggaggttgcagtgagccaagactactgccacttgctttcccacctgggccaccagagtgagaccttcct

SEQ ID NO: 559771 - DNA, 234 bp, Homo sapiens
catgactcgtactgacgaaggtgcatgcgctgaatgatgtcacggcagtcgttgaacacacggtgtgatgttctctaatatgagggtacgcatgtagtgacgctctacgtgggtctctcgagctcgggaatagcatcgctcaggagtagtgttagcgagcaaattctggaaaagtagtcctcaatcttcgatttccccagcaagactttctcagcgagcagatttggttgttgc

SEQ ID NO: 559772 - DNA, 1651 bp, Homo sapiens
  misc_feature (362)..(362): n is a, c, g, or t
  misc_feature (488)..(488): n is a, c, g, or t
  misc_feature (530)..(530): n is a, c, g, or t
  misc_feature (608)..(608): n is a, c, g, or t
  misc_feature (611)..(611): n is a, c, g, or t
  misc_feature (1009)..(1009): n is a, c, g, or t
  misc_feature (1034)..(1034): n is a, c, g, or t
  misc_feature (1087)..(1087): n is a, c, g, or t
acgcgtgctgtttgctgctgcccggtcacagtgcggccctggcgaggcgccgcactcctccccagcgtgtgtgtggccgcgccccatgtagtagccgcccgccggggggggctgaagtgtggcgccgcttcgctgggtgtagtttacccgcttggggccgccgggggggcgccgggttagccatccgtgtctggtcgtgcagccgcacgggcgagaccaccgacgtgttcttgcgcccgccgcgtgttggtcccgagcatgtttgtagtggggcggcgccccccctgatgttggagggcccagccggagtgtgtgtgtaccaccacgaagaagcccactgggggttgggtgagtcccgcggntgttcgcacgggggagttttgctccgccccgcgggagtgatttttctgctgtcttggagaagcgctccactaccctcgccgtttctcctcccgcgagagaaggcttggtgcgcgccgcccacactntggccaggacagttctcaacagagcgaacttgtggggggcgncacaacccacacgaggtgttgatgggaaacccgcttctctaattgggttgctctactacaaagaaaaaaaaggagagngtnttgttgtgctgccgcacaaaaaggggggggttagaaagacacgatagtagggaagtgtgtggccgccgacatagtgtgcagcaaggctgtaggccccccacatgttgcgcacaccaccacccttattggagacacatttcttagtattccgcacataatagagagagaggtggtgagagcccccaccataatataggagggcgccacgacaaccacccaacaagtggtggaggacgacacaacgcgacacagcagggtggttcgacgtgagacgcacgcgccctgtatatgttcactctaattatgcccgcccgcccatatatcttatggagagatatatgggcgcccacacacctatgggccgcagcttcgtcgcagcatctcgtgggggagatatngagagaatatatacccacgccgcanatctgtgtgatatatagtgttgtaatatacacaccacgtcgtgagaatatatntactctcccgcgcgctcactcttaaagtagagagaaaatatagagagtgatcttctgagagacacacacggctgacacacacacacagcggtgtgagagcacctctctgagagaacacacctctgtgatgcccacacactctctcacaagagaaccccactctctcgccacacaaagcgcgctctctacagagatgtgttatatgacactttggtgttctcacatgtataaaatgcgctccccacaagaagagagaaaatctctctccagagagaccgcgagaacacacacgagattatatctcttttctcctgtgcgccctcgggagagtgtgagagtatagggtggtagaagagcatctgagcctgatataatgggcgccactttctccttgttggagtgcaccaagaaaatgtttttataaaattaagaatatgtgaatgaatggcgtgccagaccctgcgcccaatataaatggagaaatgcccccgagcgtggaccacattttaaaccaaatggattttctggcccaataaattgttttccaaaaaacccttttttata

SEQ ID NO: 559773 - DNA, 766 bp, Homo sapiens
  misc_feature (659)..(659): n is a, c, g, or t
ttaaaacgccgagcgcgaggacccctaacaggggccctctcagcccttctaaagacctccggcctagccatgtgattgaacttacagtccataacgctcctgatactaggcctactaaccaacacactaaccatataccagcgatggggcgatgtcacacgtgtattcgcatacgaaggccaccacacaccagctgtccaaaaaggccttcgatacgggataatcctatttatgaccttagaagttgtcttctgcgcaggatatgtctgagcctgtgaccactccagcctagcccctaccccccaatgaggaggcgactggcccccaacaggcatcaccccgctgaatccgctagaagacccactcgtaaacacattcagattactcgcatcaagagtatcaatcacctgagctcaccatagtctaatagaaaacatccgaaaccaagtaattcaagcactgcttattacaattttactgggtctatatatgaccctcctacaagcctcagagcactttgaggctccctttaccatttgcgacggtatgtacggctcaacatttgtgtgagccacaggcttccacggacttaacgacattattggctcaactctgctcactatatgctctatacggcaactaatatttcactgtacatncaaacatcactttgggttcgcagccggcggctgatctggaattatgtagacgtgaatggaccattcctgaatgtatccgcctattgatgagggtctaaaaagaagca

SEQ ID NO: 559774 - DNA, 117 bp, Homo sapiens
aaaaaaccccaaaaaaaaacaaccaaaaaaaaaccttatttatgtaaccaaataccacctacctgttccccaacatcatactgaaaattaaaaaaaaatagtatctaagaccaattt

SEQ ID NO: 559775 - DNA, 353 bp, Homo sapiens
tgagaaagcgggtggtgtcttaagagtactgagatgactcagtgtgtgactaaggctgcaaaggaagtagagtgttcagataacacagacgagaggttacatcattcttagtttgtagtgttatataaacacccccagtttttagttttatataaccagataaatatggttcacttttatttaaattcaaatgggtgctatactgtcacgtgcctaatccccactttacaacttcatgctggatgctggtagcaaactaagatatttttctcttttatgtattaaattccacttgtgcttcatgaaacagactataagaacaacaattcaccataatccccctttgccatgag

SEQ ID NO: 559776 - DNA, 306 bp, Homo sapiens
ctgacccagaacctggatgttgacgggcccacctctgatcttgtgagcaactagtcggcgagcaattgctgaagctgcaaaagaggtgaggtcccactatgttgcccgggctggtcttgaactgctgggcacaagcgatcctcctgcttcagcctcccaaagtgctcagattacaggtgtgagccaccatggctggcctacttctgtagttgctgagagaagaggccttagcaccttcagcttgccagcaccttcagcttggattcccagtgttcagaactgcaagaaataaatttctgttcttta

SEQ ID NO: 559777 - DNA, 780 bp, Homo sapiens
ctcccaaatcgtcacgcagatgtatgacctgatccgggcgttcctagcaaaactgtgcctctgggagactcatttgacgaggaataatctggcccactttcccaccctgaaattggtttccagaaatgaaagcgatggcctgaactacattcccaaaatcgcggaactcaagaccgaattccagaaaaggctgtctgatttcaaactctacgaaagcgaactgactctgttcagctccccgttctccacgaagatcgacagtgtgcacagaggagctccagatggaggttatcgacctgcaatgcaacacggtcctgaagacgaaatacgacaaggtgggaataccagaattctacaagtacctctggggtagctacccgaaatacaagcaccattgcgcaaagattctttccatgttcgggagcacctacatctgcgaacagctgttctccattatgaaactgagcaacacacaaaaatactgctcccagttcaccggattcccagtgggcattctgtactccacaatcgcaacgtgatggagagacaaactcctggcagggccctatggtggcgaccggctggcgctcttctagatcccaacgggcatggcgcacgcatgaccactctgcaattgcctcgcctcgcctcttctggccatggcaggtcttggctctgctcgccccacggttggccgttgcagccgccgctgaccctcggcttcactggcacttccagatccctgggtccgaaccgactctcctggcctcccgcctccgg

SEQ ID NO: 559778 - DNA, 370 bp, Homo sapiens
tggttgtcatatgtaatcactgagggccattatgttacagacaacgtggagagggttcattcctgtggatcgcttcgtccttggataagttcttgaattgcaaaactcttcgtggcctggaggcgctcttcacggcgcttgcgtgcttccttggtcttagacctgcgggcctcagcctggtcagccaggagcttcttgcgggccttgtctgccttcagcttgcggatgtgttccatgagaatccgcttgtttttgaacacattccccttcaccttcaggtacaggctgtgatacatgtggcgatcgatcttcttagattcacggtatcttctgagcagccggcgcaaaatcctcattctcctcatccatg

SEQ ID NO: 559779 - DNA, 176 bp, Homo sapiens
agaagaaggaggcaggcgcggcggcagggcggcccccccgagccggccggaggcgagggtgggaagatgcggacgttcttagcgtcctcgacagtacaacattcagagaggagatttttgttaagggagacgagttatttttgggagttttcttgccagaattttagaccaacttt

SEQ ID NO: 559780 - DNA, 178 bp, Homo sapiens
tatatagacaaacttcattatgagtaaacaaagaactaataagtaaacttagtgagataactggatacaaagtcatcattttttttttggaaaaggttgaatcgcctttgggttttgggccagtccggttggtcaaagataaaaactaagttggagagatgaatggcagggaaaaaaa

SEQ ID NO: 559781 - DNA, 387 bp, Homo sapiens
  misc_feature (25)..(25): n is a, c, g, or t
  misc_feature (31)..(31): n is a, c, g, or t
  misc_feature (55)..(55): n is a, c, g, or t
  misc_feature (111)..(111): n is a, c, g, or t
  misc_feature (121)..(121): n is a, c, g, or t
  misc_feature (124)..(124): n is a, c, g, or t
  misc_feature (255)..(255): n is a, c, g, or t
  misc_feature (384)..(384): n is a, c, g, or t
gcggtgtagctgcgcagttcgcgcngcttanccgcacccaggttcggcccgtagngttctggcagcccggcgccatcttcatcgagcgccatggccgcagcctgcggccgnggagcgcggngtnactgcttgctcctcggcttgcatttgtttctgctgaccgcgggccctgcctggggctgggaacgaccctgacagaatgttgctgcgggatgtaaaagctcttaccctccactatgaccgctataccacctnccgcaggctgggatcccatcccacagttgaaatgtgttgggaggcacagctgggttgtgattcttataaccccaaaagtcattacagtgtcagaacaaagggttgggatggggtattgatgttacagtnggg

SEQ ID NO: 559782 - DNA, 244 bp, Homo sapiens
cgaccactcacacacacacacacacacgcacacacaaacacatctcttctcttcaccgctagtctccgctcctcacacacaccacaccccacacacacaccacatatacaaacaccacacaccacacacacaaaacacacacaccacagataccacatacaccacacacacatccacacaccatacacacaccccacatcacacacgccacacacatacaacacatcacagtcgacgcggccgc

SEQ ID NO: 559783 - DNA, 474 bp, Homo sapiens
  misc_feature (44)..(44): n is a, c, g, or t
  misc_feature (399)..(399): n is a, c, g, or t
agaaatataaatcattctattataaagatacatgcacatgtatnttcactgcagcactattcacaatagcaaagacatggaatcaacctaagtgcccatcaatggtagactggatacagaaattgtggcacatatacaccgtggaatactatgcagccataaaaaatgaataagatgatgtcctttgcaggaacatggatggaacaggaagccatatcctcagcaaactaatgcaggaacagaaaaccaaacactgcatgttctcactttacaagtgaggagctggaacaatggaggaacagatggaatctttgatctttctacttgctcctgcttctgggaacatgttggttttatccaggggatggcctcggggttattgtctggtgggtgtgtctnatctggcacaggcctgatgcccttgaagctgcctgctaccccaaaggacaacttccaaccttggtaacggtttgg

SEQ ID NO: 559784 - DNA, 235 bp, Homo sapiens
actaagacctgcattgtactcgatgtgtgtagtggggccctatagtccccgtatgaggtctcactatagactttcgtcgagcgaagtctcaatcatgaaatattatatactgtgtagagaattgatgacctacagatgataggatatatcatgtggtgtactgcatcgggggtagtccgagtaacgtcggggcatccggatagcgagaagtgtttatatgtatcggttactctaa

SEQ ID NO: 559785 - DNA, 378 bp, Homo sapiens
  misc_feature (247)..(247): n is a, c, g, or t
  misc_feature (317)..(317): n is a, c, g, or t
cggtctacggggatcaccatccggcgaaaactggcagcgctggccagcctctttgatcacctcctggaaagcaatgcgctttccggcggcaatcccgtgcacggcgtgaaacgacccaggatagaaagcaacgaaggtaagacgccggcattaggtgaccatcaggccaaagctctgctcgaggagcccgatgaaaccacttttggaagggaatggcgggatcggggcgaatatgggctgtccttcntactatcagcggcctgcggcctgtgaagacagcggcgctgcttgcaggtaacgcgacattccaggaacgnccgtgggatccaaacaccttgaaagattcacgggcaaaagggcggcaagggtgccggtacc

SEQ ID NO: 559786 - DNA, 696 bp, Homo sapiens
gcggggttcagcccagagagaccccccgagcccgcggcacaggccgaggctgcgctaagcgggctcgaccagccgatcgagcggtggaccacggctactcctcgaacggagccagcagacagtgccccgcgactgaactaggccagccaagacccgacttctgaccgtacgccgggctagtgagggacgcgccgagccgggcggcctagagtggcggtagctgagagcgcatgcggctccggcactaaagagcatgcggcacaccgacaagcgtgatgtgcatactagccatgatctaaaccatggagctactcattcaaccatatagccctgggcgtacccgtaaccgatcacattactgccggcgatctactcatgcacttaataggaagcgccagcctagcaatatcaaccattaaccttcactctacaatcatgatattggcaattcgaattctactggctatcctagaaattgctgacgccttaatccaagcctacggttacacactactagtaagtctctaactgcacgacaacacatcgagggataataatagaatctgagggggggccggcgaccgaattagccctattgggagccgcttaaactacactgctccgacggttacaccttcagaactgtgacaaccctggccttacccacacttatcgacgtatggggacatttcgcct

SEQ ID NO: 559787 - DNA, 88 bp, Homo sapiens
gagggttgggctcgctacctctgcacacgagcgaccgcggctccgtctctcaggtgagctgctctccggtggctctctggggaccgtc

SEQ ID NO: 559788 - DNA, 228 bp, Homo sapiens
ttcctgagcacacaggagtagtatattgcgcagcctgctctaccccaatctctccttgtagtacagtgggccagtggaaaatctggatcatgagacaaacccgtatcacatgcttgcacaactcgtcccacgtcttcaggctctggactgaaccccagatatgcacatccaacatctgcttcagcggtccctgtttctcctgttccacaatcgccaataactccctta

SEQ ID NO: 559789 - DNA, 870 bp, Homo sapiens
tagcaagcgagaaggatagtcaaagaacagagagaggaggaaaactcacagggtccgagcggcgaaaatcgcgggacgctgttaagtgccccgtccgccctgggaaccacagtcggttaacgcgtatcgattgtaaacgcgggtacgcgaagcccactacgaccagggttctccccgatgcaaaagatatgggtcactctctagtaaaaaagaagcggttcttgaaaaaggacgcttgtggggtgaacatccaaggcagtttccaggcaatttgggggaccaaccctttcaaacagtgcggctcgtgccctggtcgccacaacgggtgggcggttcacaaaaaggccattcacaccggcgataattcgacggtggatcccggcaagtgggaagagagtgccccatgctgtggtacaggaagagggccccgagagattgctgtgtggcacaaaagaggtggcccgcgcggccgcaggcctttgggaacccccccgtgggggagacgccaacgaggacaaacccacgggggtgaacaaccacgaaccaccacaagttgagcattgcgtacgcccacgcgaacatcacggtcttccatcaaggcaccagaggtaatctgacacgaaggagatggagcactggggagcaccacattagcgccactgggaacgccgaattgggttttgacgagtaccgttaaattttatttctgggatagcaccatggggcgaacaaacggcgttttacgtcttaaacatctttgtcttccgcattatatattcgttgcgattatcccagaagacgcaagtttatgacttttaaaacggggttactttttgtgaaaataattcccccgatcccgcccccaagaca

SEQ ID NO: 559790 - DNA, 776 bp, Homo sapiens
agtgcgcagagattgcaccattgcgctccagcttgggcgacaaagtgagactccatctcaaaaaaaaaaaaaaaaaaaaagggaggtctcctcgttgttccctttaaaactttctcgtgttttttttctaaaaccccatttcggaaaattttttttctgagcctgttgaagggctggtgtgtgctgtggactcctgagcttttggctgggggattgctcagctcggactaggggcttgggtccagctgggcagatttgttgggggccccagggttccatgagcgaaacccctcccatagcaattgttctggggcccctggcagatcactggattctgtgcagaaaccctgggcgagggggaactccccggggggccttgaagccacattgaacgcttggcccttttccttcccttcaacctgtggaaagctcccgagggacaagacttcgaaggttcgtttttagctccactttcacagcactttaagggaagccaccccactgtgttgccaacttcaagttcacagcttcaagcccagttaagccactgcaaagcccccgaggacttgttgctgggtttctgcgaaattttggaggggaacaactctagttggggattgcattgcagctcagcaggaaaggaaagtgtgctataggttaaatacgctctgggatggcctgagcaacacaccggggagggggccccgcttccggtaacccctctcccaaaatgccactttagaaagaggcagggaccggtgatccgtcccctcaga

SEQ ID NO: 559791 - DNA, 205 bp, Homo sapiens
gaaacctctgcgccatgagagccaagtggaggaagaagcgaattcccaggcttgaagcgcaaaagaaggaagatgaggcagaggtccaagtaaaccgtagcttgttgcaccgttgaggcacaagagcaaaacattggatgtcagacgcttggatgctcgtacaagttgttggacttcatgctactcgtctagagctctctcaatg

SEQ ID NO: 559792 - DNA, 190 bp, Homo sapiens
cttcaccgtttctcatgtgcctttagagagaccgtccacctctctcctttcaactaccaaacttctggaaagaataaatttagattatatttttcaccatccatttattccctcaaagttggcttatgcttccaatcattcaactctaaagggcatttactataacgcgtcaccgaatgttctttcctct

SEQ ID NO: 559793 - DNA, 313 bp, Homo sapiens
caatctaagacgggatctgttaaccattaatctctatccactcttaaaatttcatgactaattcagcaaatatttattctacgcttcaggcactctacataaagaaaaacagatataaggtgatacttttatgtgtaaaactaacagattaattagtgttatgagtatcttggtagagaatgtggtggagagggatatttggacttgaatcctaatttcccagcaagccctgtctcaaccgtattctctaggcacaactattttagttctaaatgcatagctccaaattaatgcataagcccgtatcttgctc

SEQ ID NO: 559794 - DNA, 492 bp, Homo sapiens
cagagatgctatggacagtacttttgtcaaggactgggagtggagaaaatgacttatagtggtctttccaacatgaagtttgtattaatccgttttcacactgtgaggaagaaatacctgatactgggcaattataaagaaaagaggtttaattggctccccagccgtgtggaactgtgagtcaatgaaggcttttttcctttaaaaattacccagtcttggccaggcgcggtggctcatgcctgtaatcccaacagcttgggaggccgaggcgggtggatcacttggggtcaggagtttgagaccaccctggccaacatggtgaaactgtctgtagtaaaaataaaaaattagtcagacgtggggccaggtatggtggctcacacctgtaatcccaacactttgggaggccgaggcgggcggatcacgaggtcaggagatcgagaccatcctggctaaaacggtgaaaacttgtctctactaaaaaaaaag

SEQ ID NO: 559795 - DNA, 1161 bp, Homo sapiens
gcaaccagccagaacgcctgaacgcaggcacatacttcctattctaacacacctagtaggctcccttccccgtagtccatcgcacataatgtacgactcaacgagacacgcctaggctcgacgtaaacattctactactcacatctgcgactgcccacagaactatcaaagctacctgagcccagacaaggcttagatactgacctagcttaaatcaactacgacttaggactacgctacacacgactaccctcctttaccgtgactcccacgttatgaacttccctacaagaccacattgtcgtaaggccccacattcgactggtgtcaatttaggtaacattgaccgccaagatacatcgtatacaaatctagagctgtgcataatggctcatcaatacagccctctagcaacatacgcattcctcaaacacaccgcgtggaacaaagaagcaaaagtaaggcactaatccacacattaccatatggtacatattcaccgtaatgcagggcaagtagacttaataagacagaggcatcaccatcctgtcgcttaccgtaacaaaaacaggaaccttaaacagagttcggcgtcaatttggcaattaccttcatgtcagagtcaaagacgccacattacgcaccgtcgggttaggataacaccaagtcgcaaatgtcgttccaagcccccagaaagcccaccgcactttggtctcatggccgtttatcctaacaccagggggagcatggacgaaacggattcacagatgttccgttccgaaagtaagactatccgtgtgccagccgaagctggtggtggcccctgtttcatcccaaagattcccatttcgtagttctaaaacccttaacacttgtcccgataggttaccccacttaaaaggagccccaaaccagatacacatggttttacaaaacgtcagccacacccgatttacatcacgggtgaacagtatcacgtgctccacatattcatttgctcacattccacagtgagactgtcgtggtgcccacatacttccgccacagttttcaccagacgtttcccacgtttcccgattagcctcattgcccaaccaaggtgggtctacaacccgtcttttgccccactagaacgctgcattttccccttatcagaccttc

SEQ ID NO: 559796 - DNA, 151 bp, Homo sapiens
  misc_feature (1)..(1): n is a, c, g, or t
ntcggtgatctagtaggatccccgtcgctcttggccggtcatcgctcttggggttcacaggtgaggctaagatatccttattctccctggggtttaagtgtggatggtgatgtaggggatgggcagcttcgggaggagattcccaagagcg

SEQ ID NO: 559797 - DNA, 380 bp, Homo sapiens
ctacagagaaacagatcatacattttgagtggaaaaccctgctagccttttaccacagaaaacaccgtatattacacttgttatgaggtaaaaacctcatggaggtatgtgccacaactaacgattattgcctagatggataaaagacctcatgagaaatcatatattaactaaatccatttatgctgctataacagaatacctgagactgggtaatttataattaacaaaaaatatatttttgaacataactggggcctgggaagtccaaaattgagaggccagcatcttgcaaatgtcttcttgctacatcatcgcatggcagaaggcaaaaggactcaataaggacaagacaaaaagaaaagctgtagctgtagtaa

SEQ ID NO: 559798 - DNA, 325 bp, Homo sapiens
ctctccttgatgactttatccctttaccactctctaacgacctctctctcctcttttcatctgtcgtggtttaaagtctgttttatcaaaaactaaggtttcaaccccaaagcatggaaaatttttaaaaatcgtatggtccaaagtaagaataccgaagttcttttaagagtctgaatatataatattaagcattaagaacattgtctatgggatgaagaagggatgactctacaatataactctggctccaatatttgctaatatgtaaattttgctcagctactcttaatcttggttttctcatgtgtatattggagacatt

SEQ ID NO: 559799 - DNA, 472 bp, Homo sapiens
cacgaggatgatttctgtgaaaaatcactctcacaaggacttctatttctggtagtatggtatatgagagaacctgaaaatctatctcaactgaacatctgacaatgccagattttcaaaaagtgccagatagaatatataaaactgtgcatgagtctgcaggatagtgagtctataaaccaggcgagggttgaagtcaaatgaggtagttctgtgctcaagatactctatggcctgtgtccccatggacccagatgacctaaaaatttgaggaaagtttggggagcagtctggagaagccttgggcccagggaggggcagtaacaaagtggatacccccatataaggctggtctcacagagggatacagcagacactaccaggaaatgatgaagtgggcaaactactactctaaacttgactgcagaaacagtatctcacttggccatggatgtggaaggtacatctttaa

SEQ ID NO: 559800 - DNA, 149 bp, Homo sapiens
  misc_feature (55)..(55): n is a, c, g, or t
  misc_feature (77)..(77): n is a, c, g, or t
gaacaaaagccggtattgggcccggcctcgaaagcccaggcccttaaggccgganccgcggccgcaacaataataancccccccccccccgacctccaggccgagccgggccggcggaagaggcacgtgcgccgcagaaaggagcaggc

SEQ ID NO: 559801 - DNA, 590 bp, Homo sapiens
cgtggttcgatcagcgccctgttgtgcagcaacgagacggggaagccggaacagcaactacggcaatgcatagacctgaccaggaaatagctgtgaactgctctcaagtatgacacagatcctcggaagacagggcactgctgtaatacaaattcagttaaaggaagatcagcaggctctttcaagctagccctagatggaaagtgtgtcctgagacaggtttctctactgggttacagcacggggctttaccatccttcagatcttttctaaagacaaaaatgacaaagtctatagaaggaagagggggtaatgaagcagggaaggggaaaaagatgctgatttgtttacttttattatcattttttaaatgtggtcaggggttttatagtatttttagtttaatctttttggttattgacaaagatagaacagtccactgtccagcagaggctgcttcaactctattgctcgcagggctcattctgcaatggatctgtgtttcaggatgctgcaggacaactctgcgggcaggacggccccttacccaacgctgtagcataggtctactctgtggtggggaaagcagg

SEQ ID NO: 559802 - DNA, 218 bp, Homo sapiens
tgaagcaagaaaagccatatggtcgcctcctgatacagccggggcccagattccactgaggttagagtccattaacaaagctgccaggaaaccggccacttatagtaaaccacgtcgtgcctcactgggtcctcaccccctcatttctgaatgtgcatttccagccttcttgctctcagagatattgttcaagcagaaaacaagctgcttttcttcca

SEQ ID NO: 559803 - DNA, 231 bp, Homo sapiens
  misc_feature (220)..(220): n is a, c, g, or t
ggtagtaattgaatcatgggggcagtattccctcatgctatctcatgatagtgagctttcatgagcatctgatggttttatcagtgcctggcatttcccctactggctctcattctcactcttaccgccctgtgaagaggtgccttccaccgtgcttatctctatccggcgctaccgaggctccaacttcgataatcactcggtcatcgcttcgtttccntgttgtgaaaa

SEQ ID NO: 559804 - DNA, 252 bp, Homo sapiens
tgccacacggctggtctggtgcgtttccgaagcctgtggactccattttactgaggttctgtctgctgcctgcttagtttttgtgtcgatgattcactttgctcccagtacttttgtaactggatgaaagtattcatatattatgcagatgtgtttgagcctgtgtgctttccttttgtgattctgggtaacttgtttgacttttgcgtacggctggtgtctactgttgtagccctagcttggtgctgggac

SEQ ID NO: 559805 - DNA, 242 bp, Homo sapiens
ttcgaccgaagcaagaagaacagagtgagacagagaagatgtaaggatggaagcataggtcagagagaggtgaagatgctaggcattctggttctgaagatggaggaagaggtcatgagcagcctcctgaaggcagaagaggcaaggaatggattttcctatggcgcttccagaaagaacctgccctgttgacagctcgattttagccccttaagactaatgttgtacttctgacctatgct

SEQ ID NO: 559806 - DNA, 501 bp, Homo sapiens
ctaaaatagtacatataataagaaacagagcagaaagaaatccgtggtgacaggtacaatagaggtctttaaatattagagatctaaattcatatacatataagttggctagcatacaatataagggtgatagttttaactctgacaatagtgtagtaatataagaagttgtggaacgttaggaaaataaagaataactgtacatataagagctggtcaaaacctcaggccacatctagacatgaccctcaggtttaaaggtgaggagactgagaactgagacagtgatgtgacttctcccaggtcacatgaagctataaattatggtgaatcataacctcactgctgtttcttctgatgcagaacccgggattcttaagtctccatctgaagcctcttcgagggcctcacattcgctcttagacctggctggtcccacatcaacgtggcccacattgtgacttagattctttaataatgtttacgcgtgattgtatgtct

SEQ ID NO: 559807 - DNA, 463 bp, Homo sapiens
tgaaggagatgttgacacgggtagggatgctgttgttggtgaatggacggaaggcctttctgtcaaacactgcttggaagacagcagggtcaaccccatgctggtcaaagcctgagcaattgatggtaaaagcgtcgcctcttcctatagagagcagagactccgtgagagagggactctatttccagggctggagtctctctgcagagagataaaataggggacgtactgagaggagcaggtgagcccctccttcccatgccaagactccccaaggccatggttggggaggatgggctgggctggtaggcaaatggtggaagtggatgtggtgagctgaggtcagggctctattctcattcccattgcttcatcctcatgcaaagtttgcccaaatctgtatgaaaacttggcctaagtgcaatggcagctacttccaggagtcctttaatgtacccatcaa

SEQ ID NO: 559808 - DNA, 199 bp, Homo sapiens
caggcagcaagctgtggttgacagtgagggtaataatgacttgttggttattgtatgatattcgggctgttaatttgtcatgttcagtgttttaattctgatcgcagagctatattgcgccaacgcttgactgccgtgcctaagcttgtcatgccgtgcctacgcttcgcatgcctgggtgtaccgatgctcgcaattt

SEQ ID NO: 559809 - DNA, 1258 bp, Homo sapiens
tggacaaatctacaaaccctttttttaccaaaaggattaattgcaccttggaaaaaaaaggggcttcctctttcccctcaaaggctctcatgtgccccttctcccagaggggcgaggccagccgagggaaacaagagaggaaccccgagggtttgcaacccgaggcgtggaatctcagaacaaagaggtgtgactccggtgtctccgggaaagcctttgacctgtgccagaacatttgagcctccctcaattttctcactccagagagagaccgcgcctgtgtgacacactgtgtgcgcggggtgtgttataacgccccagcgagagaatcacacacagacggcgtctgtgctctctgtgtcgctctcagagagagaaacaccggggagacaacacttctgggcggcccccccctgtgagagacaccagagttctcacagcgagagacgcgggtgtgcggcaaaaaattttatctcacacaatgttctgctggtggtgaggctctcctctatgagaggatctcccctaataagacgtgtgtctcttgtggccgccccctgttgtgttgttctctcctctataatgaaagagagaagagaagtctctcctttgtgtgaaacaaacttcctcctcccatatattaacgcccctgtagtagtgtggggcgttcgatcatttctccacactatcctctctcttctgtttctcctcttcccaacaccaccacaacaattctcacacccacaaattttctctcctacagaagaagcgcgtgttgtccaccaaagaaggcacaacgtgtagaagaaaccaggggtgggctcgaccaacaggagaatataatcgccccagaagaagaaggtgggggtctccccggcggggggtgacaaaaagaaaaagtgattatattcaggacgggggtggggagggaatcctcccccttcttattaaactaattaatcggccccccacaaaaaaggaggccggctttcttcttcttgcggcgccgcctcttcctaatttttctccttccccccgacacggcggtgatttattgttgctcgcggttggtccggttggtggtgaccaagttggttaataaggaccttccagggcgcctccgaaggaggaagaagaaatcttctttgctgtttgtggggagcacccacccccccgatggttgggtgaggggcgctggtggaaggtattcttcctcttccccaccaaggaggagggctgatgtttgctggtccccaca

SEQ ID NO: 559810 - DNA, 112 bp, Homo sapiens
gaaggcctcatatccaattacctcactcattacatgtgagaacaccgcagacatccgacgagggccagcgtcaccagaccagctgcgggacaataccccagggcgtgtagcc

SEQ ID NO: 559811 - DNA, 374 bp, Homo sapiens
cgggcagatcacctgaggtcatgagttccaggtcagcctggccaacatggtgaaaccccatctctactaaaaatacaaaaattagccaggcatggtggcaggcgcctgtaatcccagctagttgggaggctgaggcaagagaatcgcttgaacctgggaggcggagtttgcagtgagctgatatcccgccattgcactcccacctgggggacaagagcaagactttgtcttttaaaaaaaaaaaaaaaaattttttttggttctggtctggagggccctgcttctcttctagccttttctgtggttactctgccactgtttgcattgtgtgtactccctctggtgacctgtttaaactccaagggttccactac

SEQ ID NO: 559812 - DNA, 1243 bp, Homo sapiens
gaggcatgaggcagccagcgcaggggcttctgctgcagggggccaggcggcagcttgcaggcaacaccgccagcatccagctttttcttctcctttgcacacagcatagcagcattcacatcaccacactcacgttcacacacacacatcatcagatccacatcagtgcttcacgtcacagcatcattagcgttcacgcgtctccacagctctctctctcacaccgctcacatctcttcacatcagcctctcaagcatcctttcacagcagcacaccatcatgcacagcactgtcagcacacgcagtcagccatgcagcgcaccaggcaacacagcatcacaccaggttctctccacacaccatgcaccgcgcaggctttgcagcatgcacagctatctgtccataggccaggtaaacaacacaatggtccttttaatcacagccaccacatctggagcagtacacaggcactcacgagcagcgccccgcacattccaatcaccgcaattcagcacaagggccgagatgctagtttcaaagacaatggaaaatccacggcacagggcagcagcatcggaaacagcacgaccccacaccagatacaccacatcacacaaacagcacaaccacaagccggggcacggagagaatacccacacaggtacacgatgcggcaaccgggccgcacacgctgcgtacagagacaggacgcacttcaagcacccggcaccgggcgcgacatctacaccacacaagcaacccttcttgccacaaaatgccccattggaaccgacatgcagggaacgcaaatttctggccgttcccaatttgtcacaacgggccactacacttagcacactggcactttcacacctccaaccccgcccagcaacgacaatcattggcgcatacagcatctcacatttggtgtgaaagttggggaacgggacttgcacaaccaaactttgcgcgagcaaagcaataccgcacaggctctggcccgttgggcaccaaccacctggggaacacaacaacacgacacacctacacgggccacgcggccgcaacgacaacaggcacatctgcccacacagactaggcggcacacccagcaacaccacatgaaatcacacaccccctcaagtcacgcaacaacaatccacaacaaccgaacgcccaggaaccactcactcggaccagcccgcacctacatcaaacgagccacactaggacaacacaaca

SEQ ID NO: 559813 - DNA, 264 bp, Homo sapiens
aatcagctcggcccttatcaaaagggaatatagaaggatgttaaacattcttgttaaaataaacaggctgggcacagtggctcacccctgcaatcccagcactttgggaggccgaggtgggaggatcacctgaggtcaggagttcaagaccagcctgaccaacatggagaaaccccgtctctactaaaaatacaaaattagccaggcatggtggcgcatgcctgtaatcccagctactcaagaggccgaggcaggagaattgct

SEQ ID NO: 559814 - DNA, 732 bp, Homo sapiens
  misc_feature (128)..(128): n is a, c, g, or t
ctctcaggcagtggctcgccgccctgatattcatatcctgggcctgctgatcctggcctgtctagcacactgcgaacttgacaggccacacacccgtgtagcttatgcacactgtggcagagcgtgcncatttgacatgctcgctagtccctggtgaccctccagagctcagttgaggtcctctagagacatatctcgccctggaccacagtacccctgacgttccccctccctcatcacctcctcgggccaggaggacatcaggtgacaccttacatgggcaatgaccttctcatgtcgctggttttgacacgacacccgctggtctgaaccacggagcactgcacaattacatgcctcattctagcatccttccctgcgtccccttgacctcaccctttggtccgttgcccgagacagccacctcagcagccccagtagaacgtggggttagtagactcttctgccgtgaccccccttcaatgcgttctacatccacaccacccattttcaggggtcactgcccaccattacaaccttgaacaccggggtgtccccccactcccatttcctggcctctgccataatttggtgtctcgaaatgctccctccttcctgaggggcctcagggcttttggggggtaggctgagacacccaccacccaaggttaactgaggtccccttgattgaggacttcaccccttgattaaagcaacgtctggttcagtgga

SEQ ID NO: 559815 - DNA, 241 bp, Homo sapiens
ggagttaataattgatcatctattattagcctccatgaaaacttcaggaactacagaatttggagagcttccaggttggtgaacacatctgtgtgctggatgaggtgatggtgcacccctattccacagggacagacgccccttgccctagacccttccagacctctccctgagctcttcctctgactgtctatttgtatctttttttttgagaaagagtctcactgtgttacgtctaggt

SEQ ID NO: 559816 - DNA, 217 bp, Homo sapiens
gacataatcaggcactctgagtcagagcacgtgcgcaatgacattcaggcgagtataactcaatccagacctggccccttcacatctgcacctccagcccccacatcctgtagttttcatgtatcaaattcagtaattggtctgaacttggttattgtactttccaaacctttttaggcaggatattgaactacatctggttggccccttatccgag

SEQ ID NO: 559817 - DNA, 1105 bp, Homo sapiens
  misc_feature (1105)..(1105): n is a, c, g, or t
ctgttgcgcgtgttccttttctcgtctgtcccttttctgtcatgttgtgttttttcttgtctgtttcttgtgtggcctttcggttcattccgtgttttcctggttcctcggggtccatttgggttattgtccgtccttttctcctgtatccggttgtccatgtccggtgcacttgtccctatgggctggatacttcttatgctggtttctctttgcttgtctgtcgctattctattcttttgctgttctttggtattcctttggtcccttgcctgctatttcttcggggcgcattgcagtaggtttctactttttctctgcacccttcattcggatactttgtaggcctgtctcactgcttctgtggcttctcgcattgcaccgggccgccctgcccgcccttctctatttggtgccatttactttattgccactcctcacgatggcctatttaaagggcgacctccggcggatgtggtctgagcctttccacttccatagtcctagcagctcccgattcctggaagtatgatggatcacgtggtatagtgtacctagttggccgtcatagtccttttctctcaactcatggtttgtttcctcttagagctggcctggtactcagaaatgtacctgtgtttaaggaactgccgtgtgactggatttggcatttaaagggagctcgtttgcaggtagagtaggtgtctggtagtccctgtttcggttccttctcttcctgcggatgtagaggtggggccccttccaagtagggactaggcctctccccagcgcgccttcctcccacgtttttatggatctgcaccagaactgttaccttactgggggagatggagaatttagaacatagatattaaaaaacatgaacaaacagacgaggaagtcatattacataagaaactatattgaacactaaaaaggatgaaaaaaaattagcaaaccgaagtcttcattcaaatgacccctcgagaactttgggacctagtttcctataggggactcagtttcagagaaattgagactagaagctcttctgtcgttatattttacacccaggtctgactaagtaccggcgcccccccccccn

SEQ ID NO: 559818 - DNA, 239 bp, Homo sapiens
ccatttttccaagccctgtgactagcaggagcatgagaaagcacctcaggtatgagtatgcactcacctacagtagcgtattggtggagtatcccgagattcatgacagcctctagcaagaatgaatgaaaacagagatgtgagcttcctttacatttatgtcccttccctgcaacccaaacactttgctgttgtccttctgggctctgagcaggaccaacaaattggatctcttaata

SEQ ID NO: 559819 - DNA, 324 bp, Homo sapiens
agactgtcgacaggttgggtgcatgtgtaatgattttctgtacttttgtatcaactcagaattttcagagatgctcttcctggctgaaaagatcttcaaggatcatctccggaatggaagaggtgaggcctgttagacttgtgggctgcccaatccatcctacccttggcattgggatcaatgtttatgaggactagaccttcaacagtgtccagggtggttaagagcatatctcgccaggatgttcgctccagctccaacacacgacactccaattattgtagagaaatttagagtactgcaggacgcaaggggtcatgtctg

SEQ ID NO: 559820 - DNA, 569 bp, Homo sapiens
  misc_feature (218)..(218): n is a, c, g, or t
  misc_feature (467)..(467): n is a, c, g, or t
gccagttagggactagtccgagtctggaaggcaggataacgttgtgggtgatgcagttaatagtgttcccatgatgcccgggtcaagtgccagggatacatattctccctgcagacagctctaggcgagccaagggctgcatgggtctgtacgaacgtcaagaatcgggagttttagtcactgttgctgctagtggatgtagtcgtaatcttttaacntaggcaacgtagtcttcgtcatcgtcctctaatgtgctcttgtgtcgtatccttggagagctgtcctctctataggggaatagcggggactgtatgggtctctcaactgtagtgcgttgggctgcttccgctgtactggcattggtttggacatagttcgcatgggacgatcgctgggtctcaaggttgggcatacagattatgatgtgacctctctagtgacgagtaaacctatcatatgagcatcgngaatagcatagcgctagcctttatcttcagggaacggagccccttaggcgcagagcgtgtcagcatgattcatctaacaagggaacgcagaacctaatcagt

SEQ ID NO: 559821 - DNA, 302 bp, Homo sapiens
ttaaaagcccccccatttttttttaaggagaagggcccagtcttttcccaagtccccccagggggggggaaagcatggctttggggtaaattatgtaaggcaaaatttttttaattttcgccttaaaactttttttttttgtttttttttgaatgatgggccttggggcccccccttcccccttttttgtcccccaacttgaaaggtatgaaggcttttggtttccctgggggggggggggggcagccagggttttcctgtaccttgatttgggcccggttgaataaaggggccccccttta

SEQ ID NO: 559822 - DNA, 298 bp, Homo sapiens
tcctgggtgtgagcagactgcgcacaccagtaagcccatgagaaggaaacagtggtttgatgtgggagtcattaagggcaccaatgtactggtgacacactattttcctggcacagattattgtgtcccataagacgatgatttgggcaccgtccctgactataaccagctgaagaaagcggagcttggggcagggccacgcctaataagtttcgtgttgccggaatcaatgcctggtggcggggggcccctccagggaaatctcagcctttaagacgtgcctgcctggtttcccagg

SEQ ID NO: 559823 - DNA, 191 bp, Homo sapiens
taggcgaatctcctcctcccctgctctattatgggggttagaatgatgttaaggtgtggttggcctgtgttattcttctgaacttttgggggaggttatatgggtttcatagttttgtactttatttagggggaatgatggctgtctttggctatactacagcgatggctcttgaggagtatcctgaggca

SEQ ID NO: 559824 - DNA, 210 bp, Homo sapiens
ggccatgtccttctggttctttgtgaaggcagctagttctgtattcatgaagtataggaactctgtctatggagagagtgtagttataaccatcctttccagcatacttactggaagacagcaatcaggggactcgatgcaccgatcagatctctgatagggctggaagatttttagccatgttaggagactgagacgacaggggtaccg

SEQ ID NO: 559825 - DNA, 216 bp, Homo sapiens
gccctgtctccatccttgcacagagataactataaaccgtaaaaaatactcacaaatatgtaagttacaacggtggaacctttgatcgctcataatgtttaacataacaacatttatttcaaatcactgaattcatggagatgtgaacacgcttggtttgctctatttttgtttatgtgtgatagtggttctgtcatcatcattcatgtttattaa

SEQ ID NO: 559826 - DNA, 623 bp, Homo sapiens
gtttttctccttctttattccatttatttccttagttcatccaacggtatccaggccatcaccaatcattctatacgacaaactgtttcttcttacaaccccactatatcaccccttaccacaagacctcccttcagcttaatctctcccactctaggttcccacgccgcccctaatcccgcttgaagcacccctgagaaacatcgcccattctctctccataccaccccccaaaattttcgccgccccaacacttcaacactattttgttttatttttcttattaatataagaaggcaggaatgtcaggcctctgagcccaagccaagccatcgcatcccctgtgacttgcatgtatacgctcagatggcctgaagtaactgaagaatcacaaaagaagtgaaaaggccctgccccgccttaactgatgacattccaccattgtgatttgttcctgccccaccttaactgagtgattaaccctgtgtatttccttctcctggctcagaagctcccccactgagcacgcttgtgaccccgcccctgcccaccagagaacaaccccctttgactaattttccattaccttcccaaatcctataagatggccccacccttatctc

SEQ ID NO: 559827 - DNA, 504 bp, Homo sapiens
ttgctgggactgtaaataaatgacctttttttgagatagtgtcttgctctgtttcccaggctggagtgccacggggcgaccacagttcacagcagccttgacctctcaggctcaagcaatcttcctgcctcagcctcccgggtagctgggactacaggcgcccaccaccacgcccggctaattttttgtatttttagtagagatgaggtttcaccgtgttagccaggatggtctcgatctcctgacctcgtgatccgcccgtctcggcctcccaaggtgctgggattgcaggcatgagctactgcgcctggcctcaaaccttttttttatatctgttatggggctctgtgatctgcgatctttaatgttgctattgtaattgtttcaagggcaccatgaactctgcctgtatgagacggtgagcttaatcgatgagtgttggctgtcctgacccactgatcagccattccctacctccctctctctctcctaggcctccatatt

SEQ ID NO: 559828 - DNA, 1007 bp, Homo sapiens
atctaatgcttgcatcttattgccacgcttgtactcataccttattctggccatgtgtactgtcattacctaagatattctcaacttcataaatagttacaacacctgaatcacccgttggggatgtcgccactaatttctccagtgtttctctaactgactcgtgagtgctcacttgttacctattaatcctcagttactaattggtttcaataactcgtgcatgtacaaacatatattcaaatcgaccgagacataaactcaatgaccgctatcagtgaagaaaactaaattcccaagtgtatcatttctttcactatgcaagactgcataaccaaatttattcttataagttgccaagaactctatgtactgacaattaggttgacattggaaaaaccgcttccaaattgggggagacaacccatgctacttcggtttagttgaaaacaaaccaccaattcgcgtaaaacttataggcattttagcctaattttcatccaagcgcgccatagaattcttgaggcgcaaacccgttttcgtcacaaagtaaccttactcccaataggggttggggggcgacaaccttaaaacaaagccgggctcctttaacgttacggtttcgactttttttgtaacctaggaactgtggcgctacgagttgtggcttatcatgcgccaaaaagcattacacctatgcggttgccttctccaagagaaaatccatggaaacaactttgaaacctttccaaggtgccacccaaatatttaagagacgctgttgagaaaatattggctcgcgcctacattggcaatgcaattggttatctctggtccatatcgggatttagacccaacatggcggaaaacaaaaaccttatattctcaaacccttctgttataatgtgtccgaggcatcgtggggcagcaaagttaaccaatagccttacctctgtggagacaagcttttttccaagttcgtatatcttaccacttccttgggcagc

SEQ ID NO: 559829 - DNA, 752 bp, Homo sapiens
  misc_feature (70)..(70): n is a, c, g, or t
gagacgttcttcgccgagagtcgtcggggtttcctgcttcaacagtgcttggacggaacccggcgctcgnttccccaccccggccggcgcccatagccagcctccgtcacctctctcaccgcaccctcggactgccccaaggcccccgccgccgtccagcgccggcaagcaaccgccgcgccgcggctctccttagtcgccgccatgagaccgcgtcacctcgcaggtgcgcccagaaataccaacaggactcagaaggcccgcatcaaccgccagatcaacctggagctctacgcctcctaacgttacctggtccatgtcttactacttttgaccgcgatgatgtggctttgaagaacttgtgccaaatattttcttcaccaaatctcatgaggcagagggaacatgctgagaaactgatggaagctgcagaaaccaaacgagtgtggccggaattcttcccttcccgggactatcaaaggaacgcaaagaacgttgtgaatgaatgggagaaaacgcgggcttgaactgccatgggagtgggtgccctctaccatttgtggacacacacactctggtggacttccacgtcacctactgggaacgtggcacaacgctgggcactgacaaaaaagtgacccccttgtgtgttggccttcatggcgacacatacctggaaggagcaggtggaagcctcaaagatatgggtgacccgtgaccacttggcaagatgggagcggccgaatctggtg

SEQ ID NO: 559830 - DNA, 350 bp, Homo sapiens
cttgatgctcgtgcaatctgcaatccgcgtcgccacacgaggcttcattcgttatggctggcgcttggggttggagaactgcagtgttttcctgactatattcaacacagtgaacactagtctgaatgtataccgacataaagatgccttaagccattttgtaattgcaggagctgtcacgggaagtctttttaggataaacgtaggcctccgtgctggttgctggtggcataattgagccttgctgggcactcctgaggagccctgctgatggcatttcaaagtactctggtgagactgttcaggaaagaaacagagggatcgaaggccctccatgagctaaaccttga

SEQ ID NO: 559831 - DNA, 721 bp, Homo sapiens
ttactgagaatcaggtatcccctgccctacccatcccataggcccctagatcaggtatgctgcgcggggccggccacgcagactttctttccccataccctaccccagggcagagcccggcaggcgtcatggttccagaggctgggatggaatggtatcacccaagtcctctcttgtcagtccttcatcactcaccgacccatcattgggtacctacgatatgccaggcccattcctgaatccgtcagagatgtggcaaccttctggaggtgcccatcagtgacagggcccaatacgcataggtaggccaggtggaaggcagatgcagagggctgaatccctgggcccctatggcctctcctacccacctcagtcctagaatacgctgggtgtagtcaggctctgcctttgacttgggccttatgttcccagctcaaattggacaggtcccagggtctctggggcccagcttcaccaggccacccatacaggtacccattttctgattccctgagatacgaggctctgctgtctctgtgccgctaaggtgcaacatgctggagtatatgatatggccagtctcaacccagcaccaagcttggctaaccctcctggtgcggacccgcaggctagcataacagtgccatatctaaccccttatccacctggcaaaatgccacagttctagcctgggcctgcagcctgtgccgatgacacgcaa

SEQ ID NO: 559832 - DNA, 371 bp, Homo sapiens
  misc_feature (4)..(4): n is a, c, g, or t
  misc_feature (26)..(26): n is a, c, g, or t
  misc_feature (40)..(40): n is a, c, g, or t
  misc_feature (136)..(136): n is a, c, g, or t
  misc_feature (165)..(165): n is a, c, g, or t
  misc_feature (362)..(362): n is a, c, g, or t
gganccatcgtgccccattagaaganaaagaagatcttgnactcttgcccccaggctggagtgcaagtggtgcggatcacaagttcactgcatccctcgaactccctgggctcaagggattctcctgcctcagcancccgagtagctgggactacaggcatgcanccaccacaccctggctaattttttaaattaatttttttgtaaagaccagggctcaccatcttgcccgggctggtcttgaactccagggttcaagcaatcctcctgcctcagcctcccaaaatgttggtattacatatgtgagccactgtgcctggcctccgttaaattttctaattggttgttgctgattaaaaacncggctaatg

SEQ ID NO: 559833 - DNA, 184 bp, Homo sapiens
  misc_feature (11)..(11): n is a, c, g, or t
tttggacaaantgggtcccttcctcttcccatccccccccccttgtaagttttaaattggatttattttttcgtgaggggggggctttggggtccttgacacacataaaggggccccccccccttcccccttttagcactgggggccccaaaaatgaaaccatcaataaagattgagttgccca

SEQ ID NO: 559834 - DNA, 193 bp, Homo sapiens
atcgagccggcctgttatgggcacagaaatttcagggtatgacagctaagggtgtttttgaagaaaagagtttttgaaggaaagagaaagtctaaaatttatcaggtgatagttgcacaattttgtgaataaactaaaaaccactgacttgtacactttaagtgaattgtatggtacaggaattatatctcaa

SEQ ID NO: 559835 - DNA, 227 bp, Homo sapiens
ttctaggttatattttcctttaaaatcccttagggtaaggttaagccttttaaaagttagttttgagaattgagaccccatactaatactgtaggaattggtgaggccctgacttaaaaccttctttggactgtgatttccctttggggggattttgctaagtgaaacctggtaaattttttgttaactaaatttttttcttaaaataaagactttttccccatgga

SEQ ID NO: 559836 - DNA, 408 bp, Homo sapiens
cgtattgcacgcccgactctgcgagtgttaactcctgggcgtcctcgagcaggcaccgtgtgctccggtcgtctctgtcagagtctagtaccgtggatgaggcatgggattaaatctagcgttcagtccttccgagggtgactctgtcccctaaattcggcagtagctgtaagggattcatgttctgtgattgagaacacaagaagaaaccgcttccccactccgaacgtagttattctcgaatggctgcttagtcctcttgcccagcggtgtccagaatatctatctaaacttcttccccatcaagaaccactttctttctatacactgtcagctattggtagggttcataagtcttctacaaagtcagtcatcgagagaaccagaattaggtaaccgagactcggc

SEQ ID NO: 559837 - DNA, 100 bp, Homo sapiens
aaccttataatttttttttaaaaattgtaattttttttgccttttggaaggggccgctgctgttttaatatttttttaaaattaataattagttagttga

SEQ ID NO: 559838 - DNA, 205 bp, Homo sapiens
ttgctgcggtgctctacgacggctccctcgccgctggcggttggggtctgttacgtacttcgtgctgcccgccgctacggctggggcgacgactcggacgaccgtcggactgctgtgacttacggacggactccgaccgaccgacggggcgttgggtactggggttactggcacgggggtttcgttttggacgggtcccgacgct

SEQ ID NO: 559839 - DNA, 169 bp, Homo sapiens
gtgactagagtggtcgcatgtagtggatacctatctggggctagtaaattttcaagactagatatataaatgcacggtaatatgtacacaagttagaaaccaaattacaagtattcagttccaatacttcattagtttcaatcaaccaaagttagttcagatagcttat

SEQ ID NO: 559840 - DNA, 764 bp, Homo sapiens
tatttatagcctattgactgcacaaacaggactatcttaaggcacatgtgcaatggcatgaataaatgacgtggcatatgtccatggaatactgtaaaacagtgagcatgtatgaactagaagtccgggtaataacgcagctgaatttaaccaaccttgctgaatgcaagactccagacactaaagcccaacattgctgtatgattcactctgatataatacttatcactagtacgggcaattacttgtatatcgtcggtttacaaattaggatacgcagttagccttgcctaagagctgaaagagtggcatttatctggtgctgggaataatctgtttctaaacctaggtgctaagtatttgagtgtgttctgagctgtgcacttaagatatgtgtatttttctgcatcgtgtgttacactttccataaaagttttctaaaatcacacaatggcataacatttcgtgtcgctcatcactctaatcgatatgtttctctagatgtgtatgaatgatgcgtgcacaacaggaattaaatggcagattttgcataattctgtgcaggaaatacatatttatagtaattttgatggcaactactaagatttcctaccctgtccttaaagcttagcataatgtatattttaagtgaaatatttgagaaggttaaagaatcattacatactttgtcatcctatacttttgcatatataaataggtctgagctgcctattaccctaagaagctaatgtacatcatgctcg

SEQ ID NO: 559841 - DNA, 337 bp, Homo sapiens
  misc_feature (25)..(25): n is a, c, g, or t
  misc_feature (33)..(33): n is a, c, g, or t
  misc_feature (190)..(190): n is a, c, g, or t
  misc_feature (230)..(230): n is a, c, g, or t
  misc_feature (236)..(236): n is a, c, g, or t
  misc_feature (277)..(277): n is a, c, g, or t
  misc_feature (295)..(295): n is a, c, g, or t
  misc_feature (317)..(317): n is a, c, g, or t
  misc_feature (326)..(326): n is a, c, g, or t
agagagagaggacaagagcgcgcanaggcatantggaagggcgggactcgactttgttgtcgcctgcccggagagtcgagactggtaccggagagctgtctcaccaggagacacgtcctggaagtgtccgggactcgcgggacctgtggctgcagacccgcccggcacgcaggccagagctggcgcactncctgaggatgagactctgggggccctagccggggttcacnggaggnctgtcctttgggactcctaggattgcttcgttctggcccgngtcacttctggaactgtnagacccaagacaaaaagggctnagggatttntcaattgcaaa

SEQ ID NO: 559842 - DNA, 444 bp, Homo sapiens
tggtttttcttcttggttcagggaaaaggactttatggggatgtagttgggaaccttgaaagggtgaatcccaggaaataaaccctaggaccaaggggggggccccttaaaaagccataaataactcttaaaaaataatttagggtgaggaggtcccccgtgtggggaggctgcgtgggcaactatcgtgggacattcctatagggagtggaatttggagaattgggcaacgggggacactaaaaatttcccagccgctcctcacaacagggggtgttgaaatgtgatccacttcacaagaacctcccggacgtgcccatagtgcgtggaagatggggagccgggggcctccaggacaaagggagcggccgtgggccccggcgtaaagggggtgaaggggcccgggctcacggcctccgccccccagggaagccggacagctgg

SEQ ID NO: 559843 - DNA, 143 bp, Homo sapiens
tctaacagtgggttaaacagtgtctttaatgtggcccagttaatagacttaaggcagataaggtccaaggtcttccaagggctggtatatacctatctaagtcaaatccgggtgtcctccatcattcacttccacttaagagt

SEQ ID NO: 559844 - DNA, 761 bp, Homo sapiens
tgttgatccgtctgcgattttatctgttaaccaaataaaagataatagaatttcctaatgagatatatctttatacttaaacagctttttgagaggtgagttttaagcgaagtctcttgagttactgatgctaggttgtgtttaaaaccactatgcgaagaactcaccagaagccaccttttgtagtgttctccactaatactggttatcctgtgctacagagaaaatcaacagcagtcataagctccagtttgtgcgtattgcaaataagactcttacctacaagcatgagattcatgtcgaactaactttggtttgttactcaagccaaattaagaaaagtttgattgtaagggaagaattagcaggttgggtctatgtgcagaatcaaacgctttttatattttatactgcactttagtgtattttctgtcactgtaggtatagaagatctgcgctcccctgtggaaattggggtctggttggtgggcttgcccctgaagcctggctctgggttgaagaagtgttcccgccctaaggccttggtgccctgaacctctgatgcctaccgggttctcctgattcgagttgcctttaaatactcccttgtagagtaactttgctcgatgggagcaacagtagcagtcatcatctccttggtgtgcaggctgtgctcatttatttgcaggccatggtcgtttcattcattgagtgtacatatcaaccgggtgtcatgtcaaagtgaaagacatttcaaatcg

SEQ ID NO: 559845 - DNA, 193 bp, Homo sapiens
gttctgcatggcatcctcttcctccttcctctcagaggacacagaacggtgctgtcgctatgatggtactttctgagtccctggctggccagagacgattcctggtggcagcaactgatacacctggtagggctcagcaagcatccatgcgggccctctcaggaacctccttaaattcagaactctggtggag

SEQ ID NO: 559846 - DNA, 330 bp, Homo sapiens
cttttttaaacccccccccccttgggggggggttttttgttttttccccccccccccctttttttttggggcccccccggggcccgcgtttttttcccccggggggggggcctttttttttgggccccccggggttccagggaaccccttaattgttttcccccttttccccccgggggggggggtttttaacccccccgggcccttccagttttttttaccccccggggggggggggggggggccccacccccggccccccccccctttttaaggggttcccctgggggggggtttcccccccctggttaaacccatttttttttttta

SEQ ID NO: 559847 - DNA, 202 bp, Homo sapiens
attaaatacatcctagccacaaactgttcagggaaccaggtacatcccagcccattgtcttgcacctggtaggcactccacagaatgctcacagggctactgcccatgccactcaccctccaagcctgcctccttctaagtgcagaagtaaaaattcatctctcgccctggtgcacacctggagtccccaggtgcacttaac

SEQ ID NO: 559848 - DNA, 174 bp, Homo sapiens
ggtgtggccataaaaagaaaaaaaaattattgcttctttctccctgtttcatgcccacattgagccagtcaccaagttcttaatttctcacctcctctccttagtgctacagccattgtttgaacactgatcctgtctgatctactgtaataatatcctagccagtctctatgt

SEQ ID NO: 559849 - DNA, 661 bp, Homo sapiens
cggtctccagttgcctcctgactgatatccatggaagagaaaagttgtgacttgggcccccaagttgtgagagaactgggcttgcggcgcggggggacagaggaggctcgtggggagcttgccccatggagcttacccagccgtgcagaagacctcatccagacccagcaggacccctggctcagaacttggggaccctgaagaccccggagaggaggctgcagatggctcagacactgtggtcctcagtcgtctttcccgtgcacccctgagcctgtgaatcctgaaccggatgccagtgtttccgtctccatcagggcagctccctgaaagcactccaccgactcgtcgaccaaccggacagaggagggaacgaggtgtcagcgtcgtgccgggccaaccctagactccctgtccaatccaccagctcgcgagcacagggggagctggaccagctgaaggagcatgtggctggaaaggtgacaacctcggcaacaagccagacgagcgcggcttcaggctcgcctctcatctgggtcctccgggctatgggagacgattgaggaccgttgcgcttcctagctggagtggggtgccgaacgcccacatcctggcgaaaagagcgagagagcgccctgggcggtggggcagcacgaggcgg

SEQ ID NO: 559850 - DNA, 439 bp, Homo sapiens
  misc_feature (8)..(8): n is a, c, g, or t
cctttgangtctttcagagcatgctcttgcgtgcccggatgaaagactgagctgggctgctttgccaatccgcatcactcccagagcaggcgttgagcagaatgggaaccgatgccataatacctgtcgaccagctccggtttgctctgggtctctaccagataaccggggctgacatatttgttccaggcctcttgaaatgtcgcgacccttttttgatctgcccagtagatttggcaccggatgatacgaactcacccgtggttcgaggcgaccggccagatattttttaaaaaataagcgctcggtctcctcatcggggtccggcggcagaggaaattcgtactttgggattatgaaaggctggccagccaccggggccaatacctcgctcatagcctggttaaaggtcttgttgtcgtcttgggagccgttttct

SEQ ID NO: 559851 - DNA, 342 bp, Homo sapiens
aggaggccaaggcgggtggatcacctgaggtcaggagttcgagaccagcctgggcaacgtggtggggcctcgtctctactaaaaatacaaaaaattagccgggcctggtggcgggcgcctgtggtctcagctactcgggaggctgaagcaggagagtcgattgaacccaggaggtggaggttgcagtgagcggaagtcacgccactgcattccagcctgggtgacagaacgagactccatctcaaaaaaaaaaaaggagggaaaacctagggtaattttcttcggtttaacccccccttggggaggctggcctaatgagggggaagggcggtttttgaaatt

SEQ ID NO: 559852 - DNA, 487 bp, Homo sapiens
tccctttttccccgggcacccgccttggccctgctttcgccttttatcggcccccccttggggggctttggccccgggggcccggctttgggccgggggcccccctttttgcgggtgcccctggggctgtcccccacccccctctgcccccaggcccgcgtggggcccgggggttttttggggcttgcttgcggtccgcgtcttcccttccggggggcccccctttcttccttggggggtttggtgtgggcgctggtttccgcccggggcccccccctgggggggggttcttgccgggtgggcctttttcccggggcccttcctggcctggggggggccttttccccccccccccccccttcccccccccccccccccccccctttcccggttttcccccggcccctgctgccttctctgtccctctgtctgtttcttttttttggggtttgttggtctggtcccctttccccttccgttttataga

SEQ ID NO: 559853 - DNA, 399 bp, Homo sapiens
ggagtgtctagaggatcccgggcaggtgctatgatgctgctcaggctaaccaggtccggggcctgttgcccaccccctgtctttcatgtcacgtcgaggaagttgccctgaactctcggtgacactgctgtcagggcctgacttaccaggagagcatgaataattaaaagctgtagctgaggcttgttccgatttaaactgtattagtgtggccaacggtcctgacccatttaatattcatgccattcttggctcctttaaagagaggggagtttgctacctgatttaaatggtgcctgtcagtttcgatactgctcaggcctaacccaggtcccggggccctgttgcccccagccccttgtctttcatgtcacgtcgaggaagttgcctgaactctcg

SEQ ID NO: 559854 - DNA, 320 bp, Homo sapiens
  misc_feature (17)..(17): n is a, c, g, or t
  misc_feature (25)..(25): n is a, c, g, or t
  misc_feature (308)..(308): n is a, c, g, or t
cctctagcctgggcaanagagtganagtgtctcaaaaaacaaagaaaaaaaaactccctgggtcccaggtccggtactcacacctgtaatcccagtgcttcaggaggctaaagcgggaggattacttgaggcaaggagttcgagaccaggctgggcaatatagcaagaccttgtttctacaaatatttaaaaagtagccaggcatgggggtgcatgcctgtagtcccagctactctggaagctgaggcaggaagagcgcttgagcctaggagtttgggctgcagttagctctaattgcaccactgcanctggaccctggg

SEQ ID NO: 559855 - DNA, 955 bp, Homo sapiens
gcgcaacccacagatgtgggggtttcccgctggggaccaccgaaatatgtttttttctagagaggtgtgctaaaagttgggcccccaaagagaccccccatatagttttggtcgggccgctttccaacgagggtttattgcaaatagcagcttctctcggggggggacaaatctcttgttagatatacacacctttctttcgcggtggacaaatcgcggttgttggggggcgacgtctgactcacttggggcgcagaatacataagaaagatgtgtgggtggccacccactctgtgcccgagatatgtcgtgaggcacgctctgtggtccgcacatgtagcacaaccaacactagcttttctctctcacgagagttttatatagagcaggagatctttggtgcacgaacaaacaggacttaataatgtttttgccggcccgacagatagtctctttcactgcaaaacccctccttggcccctaaattaatagtcctgtgtgggtcacaggcacacaaccccctcttcggttgcacacctccgtgtgtggcgtagacaacacaaagaccgccatctccgcctctcgtgggtgcacagctcacggcaacgtgcttgcaggggcgccccgagcgcaaacacactctgcaaggggtgccctggattaatgttatgggcccccctccccgctggaggtttggtcggcggttcctttaaaggactttttatcacagaaatccacagtcttccctcggagaaccctgtgtggcacgctctaagctttgcacgagttgggtgtataatatggcccaacaaggactactgcttttttttcccccacatttcccccacaggttttagagtcatgggggccttgcggttattctccgggggggccccaggggagattcccccggggtttttgggtccaaaataaaagcctccgggaccccagagga

SEQ ID NO: 559856 - DNA, 702 bp, Homo sapiens
  misc_feature (244)..(244): n is a, c, g, or t
gtttggtgaatttcgtggttggcccacgcacgatcaaggttcaatggtggttcggaatgggtaaggaaggcccccggtgacacgaggccctacgccaagaacggccgtttttaaagcaacattgaccgctccctgctcaagacctagagcaggtgttggagaacctgaattaaaaggttccagctggtggatcaaggttcaagggcggttcctgggcaccagccggagccggatgcagtaggantggactcgggccatatccgtggtgccgtcaacatgcctttcatggacttcctgactgaggatggcttcgagaagggcccaaaagagctccgtgctttgttccagaccaagaaggtggattttttgcagcctttcattgccacgtgccgcaagggagtccccgcctgccacgtggccttgggtgcctacctttgcggcaagcctaatgtggccgtgtacaatggctcctggtccgagtggttttgccgggcccccccaaaaaaccgtgtgtcccagggaaagtttaaaaaggcctaacccgtgaccttttttgcttactgtaactgcggccggtttagtgaccccatgacttacagccggtttttaccttttaggtgaaggaaatgacatgtttttaaaattgctgggcaaggctccccctttttttgtcaacactggaataaactttgccttttttga

SEQ ID NO: 559857 - DNA, 1194 bp, Homo sapiens
gggagagacaagtaaactctcagagtaactgtcccctctgactaccatttctaaggatgccccggaggcccagctagccccagacttcggccccatgcggctcacccgctgccatggctgccctggctggcgcacatacaccctcaaacttcttggtcctcattctatgtctcgtggctgcagcaccatgcctaggaattacccgggcccggtgggacccgatcgtgcctctgactgcctggaccccgtgtcaccgtcctggtgcgggagttcgaggcataggacaactgctggtgccctgagctggatagactccttcctgcaggcaagacccagcaccagccacgtggtggtggcagccgacacgctcccctacgccgaaccctggccctgccccgaatcccacaacagtgcgtcatggcagcatgatccagaagccgacctgtgaccggcacagccgcagactcgaagcccggaagacctacgtggacaccgagattagtggaccctagtacctgactggcggcgcggggactgagagaaacctgggcacatgaactaaagcagacactgcgtcggagagcagctccagagcccacgcaaacagacaagatcaatgaatgacacgcccccgggatggacacgggcacaaacccatgcaagcgcagccctgggccacaagacaaagggccagcacctgcgccagcagtgaggacccagacccgactattgggcagcaaagaccaccggcacgagcaccagagatcaagagacgacacgagacaggcagacacggtgagagcgggaccctggcacacgcacagcgagccgcaacaaacacaccaacaggacgcacacccaaagggcacaggcgaggaagagaacaccacgaactaaaacatgaaggagaacgccaacagaggatggcacgagcgcagaaccgagaggatcgagagcaatgaccgacgcaggagcaccaacacaccacgacctggccgcacgcacccaccgaccgacacaaaccgcagaaaccacacgcgacacaacagcaaagacaggaaacaagaaacacacaaaagagacaaaggaccacaacagaagaaacaacggcaccagcgcgagcccacaacgcacagctagcaacacaaccacccccaagccaacacacgcaacgacgcagcaacctccccaagg

SEQ ID NO: 559858 - DNA, 376 bp, Homo sapiens
ttccgggggggggcccccccaaaagggggctccccctttgtcccccaaagggggggggcaacccaaacccccccatgttgaatgtggtggccgaaccccaacagggccccccggcgggggggttccttccctggatgggggggcaaaaagcccccgtttgttttttcccttgggaggggcccccctgggggccccccacccctagaccgggtaaatttccctcccggggccccttttgaatttttggaggggtttttttttttccccccctggggggaagatgtttttcccaagcccttggggggccctccccctttttttcccccccccccggccccctggggggggccattaaataaagggatttttttttcca

SEQ ID NO: 559859 - DNA, 140 bp, Homo sapiens
  misc_feature (132)..(132): n is a, c, g, or t
gatctctatgtctcgacgttagtaagtagcatgaactacataagtgacgctctagaacgtggtagtgcatgaggaaggattttatcttatgtgattttaattggcttaaactttaaacaagcgcatgtggtntactgtat

SEQ ID NO: 559860 - DNA, 114 bp, Homo sapiens
atcgcgcaagttgcattacggcgctactccactgccctggactcaacgttgctttgccgggcagttggggccacggcttgtctcaacagaataaggccagcatcgatacatgca

SEQ ID NO: 559861 - DNA, 322 bp, Homo sapiens
attttaggtagaagagttttgaggctgggcgcaatcgtcacgcctgtaatcctagcattttgggtgactgaggcgggtggattgcttgagcccagaagttgaagaccagcctgagaaataaggtgaaaccctgtctacaaaaaatacaaaaagttagctgggtgtggtggcgtgtgcctgtagtgctagctactcagaaggctgaggtgggaggattgtttgagcccaggaggttgaggctgcagtgagttctaattgcgccactgcactccagcctgagcgacagagtgagacactgtcttaaaaaaaattaaaaattgta

SEQ ID NO: 559862 - DNA, 320 bp, Homo sapiens
attgtcattcagggggatgaaacgaatgcattggccatgtcctacagagtccagattgtaacagtgccctgatggatgaagaagacatggacgacgtggtaggatgtcgacaattacgctcatcccacagcgagggcttcttcagcagcccctccacgtcacggactcccctcctgagctctctgagtgcaaccagcaacaattccaccgtggcttgcattgatagaaatgggctgcaaagctgtcccatcaaggaagacagcttcttgcagcgatacagctcagaccccacaggcgccttgactgaggacagcatagac

SEQ ID NO: 559863 - DNA, 230 bp, Homo sapiens
agcggcccgcctttttttggaaacaggtctcactttatcatccaggctggaggcagtggtgcgatttcggctcactgcaacttcaacctcccgagttcaagcaattctcctgtctcaccccccaagtatctgggactataggtggcgtctggctacagtatgtttccttcttttttttttatttgagacagagtctcgctctgtcacccaggcgggaggggtacggagct

SEQ ID NO: 559864 - DNA, 272 bp, Homo sapiens
  misc_feature (33)..(33): n is a, c, g, or t
ggatgacatgatagaatcgagctcggtaccagnacgtccattcttgctagttgtagaatcataggtaagtcatgaacctctctatgctgccgtttccttactttttaaaattagaaatggagtctcactatatgtctagtctcgatctcctgacctcgtgatccacccacctcatcctcccaaagtgctgggattacaggcgtgagccaccacgcccggccctaaatcatggttaaagctttcaaatgtatctggcaattccttcaatgagt

SEQ ID NO: 559865 - DNA, 343 bp, Homo sapiens
tgtgttacccaggctagagtgcagtggcacgatcccggctcactgcgagctccgcctccctggttcaagtgattctcatgccttaacctcctgagtagctgagattacaggcgtgcatcaccaagctcagctaattttggtattttttagtagacacgggatttcaccatgttggtcaggctggtctcgaactcccgacctcaggggatctgcctgcctaggcctcctgaagtgctgggattacaagtgtggaccaccgtgcccagctggttttctgtttcatacatcagagtcaacttgtgaatacatttaaagattatttcatttggatatcacgaagaaa

SEQ ID NO: 559866 - DNA, 178 bp, Homo sapiens
ctctgaggatccccgcggcctgctgctcctggatgatatctttgccacttatccagcggcacctggaccacgttggccgcgctgtttcccggcgatgtgaaccgcctgcgcaggatgtctgtgatcgaggagggggactgcaagcggatcatgattgcctcctacgggtgattgggag

SEQ ID NO: 559867 - DNA, 188 bp, Homo sapiens
ccggcggagaggtacgccgtatagcagacggttcggcttgatcgacggcacggccgacgtgctgcgagctgaacaaggccttcaactggagctgtccggtcaacgtaggcgcgcaccgtctaacggcatgctgctcgaagagctggaagagatccccgaaatcggcacccggttgcgtatcggccatt

SEQ ID NO: 559868 - DNA, 181 bp, Homo sapiens
atcattgattagacagaataatagggtatagtagtgcatttgtttggttattgccatattccaagatactgagacaaagtgcttgctctatatttctctcatggtcatacacttgggagatcctcataaagttcgaccgtgcaggctatgcaacgcttggacacgtggcctgtctgtttta

SEQ ID NO: 559869 - DNA, 907 bp, Homo sapiens
  misc_feature (90)..(90): n is a, c, g, or t
  misc_feature (842)..(842): n is a, c, g, or t
attatccaccttctcggtcttagcgtggctctccgtgtctccctctctatctccatctttatttctgtctctctctctatctctctccangctcccctctcttatctctgccccaccccaccccgtctctatttttctttctttcctggcgttagccctctccctctccctgctctccttttctctctcttgctctctctctctctctctctctctctctatttctctcccttctctgtcctggcagtgcttggtttcctgtgtgtgcctctgtctcttttttctcactctcattttcacccttcgcttctcctttgtgtctctctcttcctctctgtagtgtaaaggatctctctcccctttctctgtttctctctctgtctctttctccctcctgtgtctccgtctgtctctgtcacacacacctctctctccttctctctctctgtgtctctctggcctctctcttacattcagtctctgtctgtctctatccctttccctctgtctcccctcaaggtaaaggagagagaaagagaaagagagagagagaaagagagtatgtgtgtgtgtgtttacattcacccaggtgcgggctgttccacagtctgagggggctgtcaggccttgaagggctgaaagggagcccaccaaccccatttctgctcagcccgctgccctagcactttctacagtactagtggggcctcctgtcatgggctctgagatctcagcgctgccattaaaaagctggtcgggcgcagggctcatacctgtatcccaacacattctggaggccacgcgggcgactcatctcggcgtaccagttggaaccacgctgntagcatcacaaaccccgctctttctaaaaccacaattacccggtgggggggggcgagaaaaccga

SEQ ID NO: 559870 - DNA, 210 bp, Homo sapiens
ccaggtaactgaaaagcatcaagacaagctgttgtgtatggagtagatgacaatcaggattatactaggcctgtaatcaacgaaaaacataaagatctaataaaagatcgggctctcagttctgctgcagcagaaatggaagaaagaaaaccactgactacatctggatatcaccactcagaggtatacatctctatctgtgtacctact

SEQ ID NO: 559871 - DNA, 191 bp, Homo sapiens
ctctttcttcacacctccagtcctccacccaccctcgcttcccagtcgcgtacgtgtgcagttcacaccaacccccaccctgatcggccgcatctgcatcgggagcgtgaaggaagaaaaaataggaggccatgacgctgctgtgtgtgccgctggtggggcggacggtcgaggagatgaagatcgacgcg

SEQ ID NO: 559872 - DNA, 414 bp, Homo sapiens
ttataatacttcacagcgttcttcgaacgtcttatcatgcgccacccctagagatgctcgctgcacaaatgctttcctattcagacctctaaaacaacgccagaccccacgtctctccacccttgggaggcgcctggaagcaaaagatctaccgtcgttacatagagatcctctccacatgcatcttcccccccacacaagcaccacgctctgccgcacccttctcacaacatggcaaagaaccatgttttgggctaaaaccttttgactttcctccttgtcacatgtcacgcccgagtcagaccggaaagcaagtcacccctatatagggttaaataaaactcatctcatcacactttatcgtttgttgggcctcactccccaggccccttagctaggaatttgggccagatt

SEQ ID NO: 559873 - DNA, 108 bp, Homo sapiens
gttattcccagcccctggccccccccctaatattattgcccaaagtcaggatctcccatttccccccaggctcaactgaggatgtggcttattaaacccggaagtgca

SEQ ID NO: 559874 - DNA, 128 bp, Homo sapiens
aatcatgatggaacttcacattgtgactacttgccttgatcagagtctctctttgtccgtggatggtgggaccccaaaatcatcactaacttgtcaaagcagtccactctgaattttgactttccact

SEQ ID NO: 559875 - DNA, 221 bp, Homo sapiens
cctgttgggaccccgcttgggctttggtattgactgaggggctgacagttttcttccacccccaactggcttgggggcaggccaagggttaggcttaatggtggccaggcttgcctgctccccccctgggatgcccctgctttggccctctcattttttttcattggtttatttttcaaggcatctttaatttgtaaagaaataaaataaattaagatgta

SEQ ID NO: 559876 - DNA, 259 bp, Homo sapiens
tgccgcgtcattactagaggatccccaagcagttcatacagattcattttcatggtttggtagagcttcaatttggtctaagcctccacattcttcaatcattatactaagtttctcaggtttcacctagtttctcagcagcctgaagggatatttggaaagggcatccagggataaccagaaataatctgggtatctattggcagtataagaggttcatcaagcggttctatatatgccacagctgaacaaggtacac

SEQ ID NO: 559877 - DNA, 360 bp, Homo sapiens
ctactccccgcggagaggaggacagcatgccccccatcagcactccccgccgttccgactccgccatcctcgttatcaatagcctgtgcccatgcccgtacccgtgcaatttcaattgtattagtaagtcttaaataataccttgcatagtctatcactgagctagtatgttgtactgagccacaaccaagtacttactatattctctagcagcagtggaagaatgagtattgttaaaaagtcgatactcccaaaatgattctgcagagtgagtcaatgcaatagctatcaaaatagcaatgaattctttacagaaatagaaaaattagggatcctataatttttatggaatcacaaaag

SEQ ID NO: 559878 - DNA, 602 bp, Homo sapiens
gggtttagcacagtgtgtggtacacgataagcactaagtgaatgattgttattattattatcaatggtaaagtagctaccatttctgagcacctatactaggctagacactacaaatcagttatgttatggtgtctgtaccatactaaagctgttggttagcaccaaactaaagctgaagcctcggtgaagtattttgtttctgaagactgactctgatttcagtttgggacccactctggaacctgaggaagtggtaaacaggctgatgcatgggattctgactgagcagaagatgatttttattccatcttctatagcttttttaacaacattggaaaggtaagtgacagttaagaaaccttagaaatgaaaggtaaaataacaattatctattgcattttttactgacatttaaatcaggcagttgataaagtacagttaaatggaattgacttaataaaaataacaggctcaataacattgaggcaagattgatacagctcttgggtaaatgaaccgagtaatttccacacatttttactttttgtaaagaaagaaatttgtatatttctgcaagtcttgtcttataaatgaatgact

SEQ ID NO: 559879 - DNA, 571 bp, Homo sapiens
tctcccacttgggccgaattcggcacggaggctcttcagagtgatccaaccagaactgctgggaccccagaagttcgtatccagagaaatgaaccagaaaggtactcacaagatgctctcaacgcttctgtctgacacaaagcaacactgtccttaaagtggtgatcacttgatattatttatgggataacaacttccggttccccttttcctgccagctgtgcatgctgtggtaaattccttagggaaaagagggcccattccaagccaaagattttagagcatgaatttcaaagctttagttttaaaacaaaatggtatatcctcagaatgacaatggtgcattttattgagactatttttagttcaggtctggaaatggctgggtgggcaaagcacttgtcacacaactgtacagatctgagttcagatgcaccgacatatataaagccagatgtagtagtggcagtttccacagtctcagcactcctgtagtgaggtggaaggcagaggcaggagaagctcacgggtagctagcctggagcaccagaggtgagatggcaactgagac

SEQ ID NO: 559880 - DNA, 368 bp, Homo sapiens
  misc_feature (17)..(17): n is a, c, g, or t
  misc_feature (31)..(31): n is a, c, g, or t
  misc_feature (53)..(53): n is a, c, g, or t
  misc_feature (195)..(195): n is a, c, g, or t
  misc_feature (197)..(197): n is a, c, g, or t
  misc_feature (204)..(204): n is a, c, g, or t
  misc_feature (331)..(331): n is a, c, g, or t
  misc_feature (344)..(344): n is a, c, g, or t
cagggctgcaggaattnggcacgagggagcntaccccagcttggtaaagcacntgtagccagacatgcctctctagattcctcctctgtgggcagggcatctccgaaagaaaggaagcggccctagtaaggcacttactacatagataaaactcccatttccctgggacagagcacctgggggaaggggcagctntnggcgcanttcaacagacttaaacattcctgcctgctggctctgaagagagcagcggacctcctagcacagcactggagctctgctaagggacagactgtctcctcaagtgggtccctgatccccatgcctcctnactgggaggacanctcccagcaggggtcaacaggcac

SEQ ID NO: 559881 - DNA, 961 bp, Homo sapiens
  misc_feature (22)..(22): n is a, c, g, or t
  misc_feature (24)..(24): n is a, c, g, or t
  misc_feature (32)..(32): n is a, c, g, or t
  misc_feature (45)..(45): n is a, c, g, or t
  misc_feature (49)..(49): n is a, c, g, or t
  misc_feature (54)..(56): n is a, c, g, or t
  misc_feature (63)..(63): n is a, c, g, or t
  misc_feature (65)..(65): n is a, c, g, or t
  misc_feature (70)..(72): n is a, c, g, or t
  misc_feature (78)..(79): n is a, c, g, or t
  misc_feature (82)..(82): n is a, c, g, or t
  misc_feature (92)..(93): n is a, c, g, or t
  misc_feature (112)..(112): n is a, c, g, or t
  misc_feature (116)..(117): n is a, c, g, or t
  misc_feature (168)..(171): n is a, c, g, or t
  misc_feature (173)..(173): n is a, c, g, or t
  misc_feature (176)..(176): n is a, c, g, or t
  misc_feature (178)..(178): n is a, c, g, or t
  misc_feature (180)..(180): n is a, c, g, or t
  misc_feature (185)..(186): n is a, c, g, or t
  misc_feature (348)..(349): n is a, c, g, or t
  misc_feature (392)..(392): n is a, c, g, or t
  misc_feature (398)..(399): n is a, c, g, or t
  misc_feature (405)..(405): n is a, c, g, or t
  misc_feature (407)..(407): n is a, c, g, or t
  misc_feature (409)..(409): n is a, c, g, or t
  misc_feature (436)..(436): n is a, c, g, or t
  misc_feature (514)..(514): n is a, c, g, or t
  misc_feature (525)..(525): n is a, c, g, or t
  misc_feature (574)..(574): n is a, c, g, or t
  misc_feature (646)..(646): n is a, c, g, or t
  misc_feature (694)..(694): n is a, c, g, or t
  misc_feature (702)..(702): n is a, c, g, or t
  misc_feature (706)..(706): n is a, c, g, or t
  misc_feature (720)..(720): n is a, c, g, or t
  misc_feature (774)..(774): n is a, c, g, or t
  misc_feature (802)..(802): n is a, c, g, or t
  misc_feature (811)..(811): n is a, c, g, or t
  misc_feature (841)..(841): n is a, c, g, or t
  misc_feature (862)..(862): n is a, c, g, or t
  misc_feature (893)..(893): n is a, c, g, or t
  misc_feature (896)..(896): n is a, c, g, or t
  misc_feature (930)..(930): n is a, c, g, or t
gagaggagcgtggctgtctccncnctccgccntggcgtgtgcccncccnctgcnnncggtgtncnccgannngggggnntcntctggcaaanntgtcactttgcctgctgtnttcnnggctcctattcgaccagatattgtgaactttgttcacaccaacttgcgccnnnncnccngncngcccnntgctgtcagtgaattagcaggtcatcagactagtgctgagtcttggggtactggcagagctgtggctcgaattcccagagttcgaggtggtagggactcaccgctctggccagggtgcttttggaaacatgtgtcgtggaggccgaatgtttgcaccaaccnncccctggacgccgttggcatcgtagagtgaacacaaacccccncccgcnncgcccncngntctgccctggctgcctcagccctcccngcactggtcatgtctaaaggtcatcgtattgagagaagttcctgaacttcctttgagtagttagaagataaagttganggctaccagangccccaggaagctgttttgctccttaagaaacttaaagcctggaatganatcaaaaaggtctatgcctctcagcgaatgagagctggcaaaggcaaaatgagaaaccgtcgccgtatccancgcaggggcccgtgcatcatctataatgaggataatggtatcatcaangccttcanaaanatccctggaattantctgcttaatgtaagcaagctgaacattttgaagcttgctcctggtgggcatgngggacgtttctgcatttggactgaaagngctttccgnaagttagatgaattgtacggcacttggcgnaaagcgcttccctcaagagtnactacaatcttcccatgcacaagatgattantanagatcttagcagaatcttgaaaagcccagagatncaaaaagccttcgagcccacgcaagagaatc

SEQ ID NO: 559882 - DNA, 156 bp, Homo sapiens
gtgtgtgtggtgtctctgtgtatgtggggtgtgtgcgtgtgatatgtagtgtgtgtgtggggtgtgtatgatgtgtgtgtgatgtgtgtatgatgtgtgtgtgatgtagtgtagtggagtggtctgtgtgtggtatctgtttgtggaggtagcact

SEQ ID NO: 559883 - DNA, 752 bp, Homo sapiens
ggttgagagctaaggcagacatcaggactaccagctgcagagaggagctacccacggtgggcttcgtctctgctgagagctgaacactcacgtgggacgccctgcctatggaaaccaggtgttcactctgggtctcctactgagctgttctgtcgctcagtaaaggtcttcttctgcttactcgccctccattggtctgccttacctcattcatcctggacacaggacaagaacttgggacttgccggtagtggtggagctaacatagctgtaacagaaacaggattgaaagcatgccccttgctcgccaacattgtgtgatgagcaacgagggagggaagaaaggagagaagatctgcgacccgtatacggtaaagccagacttaggaagatcggagacggcaagactgtgacagccttgtctggggctctgtggttcctggcgtctccaagcttctgggcaccgtacggcttgccccggtgccagtccgtgaagactgttgtcgcggagtcttgcttagtcaaccgaggctggagtacagtggcgtgatcacagttactgaaaacgtctccggtatcaaggttcaagcggattttgctgactccaggctctggtgtaagctgggaattaccaggttagcagtccagctgagtgcttcacaacatgagaagactgggacatcccatcagattagaacaggctgcaccaaagggtctaaactactaagtgagcgggttggaccatgaaccca

SEQ ID NO: 559884 - DNA, 448 bp, Homo sapiens
cagatataatcctatccgtttcctatctctggtaaaacttttcttattctaattattttctttgctgtactggaacagcttgtgccttcaggtcttgcctgggcacctgggtagcttgcggcccacaagataggatatattgcgttgaactgtaatttatgttgattgctgagtgattagcgggaaaggggtgagcaccccctgaaattctgccctagaggagtggcctcaccctaaccctggccatggctggtaatagggcccacctcttagggccgtggagtgagataagttttccaggtagtgcgcagtggagccctcagccctccgctgaagttgcgtagcgatcggaggaagggagaggtgaatgctgagcccgcggcgacaggtctgtgcctcggagagaaactttatcccaaccttgctgggggccttgacgcccaccttg

SEQ ID NO: 559885 - DNA, 139 bp, Homo sapiens
  misc_feature (65)..(65): n is a, c, g, or t
ctgggcgcgggggagaggcgggtctgtcctcgaggaactgcaaggccctggtgagcgggaggacntgggatccctgtgccagcgtgctgctgtgtagagcgttcggaagcgttcacgcgtgcggtccgctggtactaac

SEQ ID NO: 559886 - DNA, 482 bp, Homo sapiens
acatcttctgaatcctagaatgctataatatctgggctttcaaaaactcctccagaatcaccaatcagtctattgtttagatatcaatcctcattcattatataattccctcattctaagccttatcttctaccactttcaaccatatcatcctctatcattatatagagcgtcattatatctgtactccaactctttaggaacatagggcatctaatatcttgtccatccatgaatccatcactattgacatcatgtcattagtaaaatgtcttgtggtctaagtcattaggatccaatccatacagtctcttactccataacctacttatatgttgatactatggcttcctgaggtgattaactttagggtgcttttcatgctttatgttcattttcttcaatacagacgcttcttctttgtactcttttcttgcattccatgtttttaaatatatctctcctatttcatgtatccttca

SEQ ID NO: 559887 - DNA, 143 bp, Homo sapiens
ttgtcgaccacgaaacaggatcacattggtcgccggactcgatcaccgtgtcgtcgtgggcgatcagacctgttcgtcgcggatgatggcgccgatggtggtgctcggtggcagggcgatgtcttcgatggcgcggcggatca

SEQ ID NO: 559888 - DNA, 885 bp, Homo sapiens
tccaagttttgccattagggcccctagcggtcgcgggcaagtccaccctgggccgcggtttttgaggcctgtctcgcccgtatcgtgttgacgacaccacgccaccagagaacatgttgcgccttctcccctcctgtcggaatgcaagtgcccgcccctctttggcgtgcccccccttggtgggggcccccctctatgcttctatcccgtgcaagtggccccacctgtgaccagggtcaggccacccacccttgcgtgcagccaccccagggcgaccacaagcacgtgctcttactgcttcccccagctggggccccccagcgccccccccatctgagggtggcagcaaaaaaagcccccgcccctcgggcggatttcccccaaaagggaacaagcagcgttctcccacgagatcctctctctgcgtggcgccatacacaagcacaggccccccactgccccagggtaacacagtcttcaacacgggtggccccccacggggagcaccgcacgaccccatacaaaggaagcggcaccacgccagacaccaacatcagcgcagctacactgcaccacctggatcggcacccagtcggtctttttcgaggcccattctgggggactcgagtgtggtctcaacgcaccgcgggacacctccgcgccctggctccgcctccaccactcacacaaggccatccaccctttcacaggccccccctgttgggtgcgatttcgtgtatgatgcaccccccctccggtgtctattgggcgcctccccccccacccagcccgccttctccctcgcccccgcccgccccgcccccagggagccccccccggccgtgctccccccaaaataaaaaccaaatccccccccacaaaaca

SEQ ID NO: 559889 - DNA, 1500 bp, Homo sapiens
  misc_feature (924)..(924): n is a, c, g, or t
  misc_feature (948)..(950): n is a, c, g, or t
  misc_feature (956)..(956): n is a, c, g, or t
caagcctggcccggaacatggaccggctctcactggatgaggagcactacaaccggcaggaggagtggcggcggcagctccccgagagcctgggcgaggggcttcgacagggcctgtcccggctgggcatcagcctgcttggtgcaattgctggtatagttgatcagccgatgcagaacttccagaaaacatctgaggcacaggcttcagcaggacacaaggccaagggtgtcatctcgggtgtggggaaaggaatcatgggggtgttcacaaagcccatcggaggagctgctgagctgtgtcacagactggctatggttaagcgacttctcagcttcccaaacagcgccatcagccaagtgatctacatgctgaccaggctccaaacagccatgtcaaatatgtctggaaaatgcttcagtctctgggcagaccagaagtccacatggccctggacgtggttctggtgaggggctcaggccaggagcatgaagggtgcttgctgctgacatcagaagtgctcttcgtggtgagtgtcagtgaggacacacagcagcaggccttccccgtcacagaaatcgactgtgcacaggacagcaagcagaacaacttactcacagtgcagctcaagcagccaagagtggcctgtgatgtggaggtagatggagtccgagagagactgtcagagcaacagtacaacagactggtggactacatcacaaagacatcttgtcacctggcccccagctgttcttccatgcaaataccatgccctgtggtggctgcagaacctcccccctccactgttaaaacataccattacctggttgatccacattttgctcaggtcttccttagtaaatttaccatggtgaaaaataaagccctgaggaaagggtttccttgagtcccctctgaggtgtnattcctgcttgtgtgatttagttnnngggttnctttgagacagggtctcactgcattgccctttgctgagctcaaatgctggggttcaaagcaatcctcccagctcaaaccagaagtagctacgactgcaagcacctgccaccatagagggctgcatatttgccagccatagagggctgcatgtttaaacaagcctagggaagtctaacattcatctgactatggaccacaaggcaagcaagtacccgtgatttacatccttagcttctaaaagaatcgtccaaagttgcacacaaacgtgttcctatccccagttagagacacaggcacttaccagggccgtagatgtgttcttaacgagtacagaagggatgcaattaataaagggctcagctggacgcgttgccaagacgatgtctagcgtgagtgaaatctgggtctaattgtgcacctcctgttgcatcattaaattgtgccaccgccatcaacatgggaagccgggtgtgagaccgtgcaattgtactcgaggaatgaaggaggcagacaatggcagaggcactatgtcgagaagtctag

SEQ ID NO: 559890 - DNA, 787 bp, Homo sapiens
  misc_feature (18)..(18): n is a, c, g, or t
  misc_feature (102)..(103): n is a, c, g, or t
  misc_feature (107)..(107): n is a, c, g, or t
  misc_feature (114)..(114): n is a, c, g, or t
  misc_feature (127)..(128): n is a, c, g, or t
  misc_feature (137)..(137): n is a, c, g, or t
  misc_feature (157)..(157): n is a, c, g, or t
  misc_feature (169)..(169): n is a, c, g, or t
  misc_feature (174)..(174): n is a, c, g, or t
  misc_feature (176)..(176): n is a, c, g, or t
  misc_feature (178)..(179): n is a, c, g, or t
  misc_feature (189)..(189): n is a, c, g, or t
  misc_feature (192)..(192): n is a, c, g, or t
  misc_feature (194)..(194): n is a, c, g, or t
  misc_feature (196)..(196): n is a, c, g, or t
  misc_feature (200)..(200): n is a, c, g, or t
  misc_feature (286)..(286): n is a, c, g, or t
  misc_feature (289)..(289): n is a, c, g, or t
  misc_feature (305)..(305): n is a, c, g, or t
  misc_feature (308)..(308): n is a, c, g, or t
  misc_feature (323)..(323): n is a, c, g, or t
  misc_feature (392)..(392): n is a, c, g, or t
  misc_feature (394)..(394): n is a, c, g, or t
  misc_feature (430)..(430): n is a, c, g, or t
  misc_feature (439)..(439): n is a, c, g, or t
  misc_feature (515)..(515): n is a, c, g, or t
  misc_feature (577)..(577): n is a, c, g, or t
  misc_feature (596)..(596): n is a, c, g, or t
cactgtaagcctgcccantaggcagtgttttgcagactttggggagtggtctatgtggccaaatattgtgtgtatagacagaatttgaaatcaagtcctgcnncatntacaagnattttggtgggcnncgaatcctncataatgaaaaagaaaaacngcccatttaaanacccngncnngattatatgnaananantaantactaaaaaggcacaagattacactgaacatattagctactaaaaaggcactgctaagacattcaagcaaatagccattacacacnacngcagattttacaggtnccnaattctaacatatgntggaaaaacccgggagtatcccaaaatatatttaataatggaatatctgcattaatataccacccatgngnttttaccatttgccctaatattgaatatactgtttncctcacacnaaaaagaaaaccagaagccttatttgtgattttgggagtggaagcttccatttttgtgtcaaaaatgaatcctgantcttatggaaatctctgttattaagatatttcaagatgagacaacactgaagatcaaattgngtttagtatcactatcttntctcctcgtttctctcttactcctcagtactccgggaatctaccagtttatggtagaaagatgggaaccttaattgaatgtgtatttttaaaacatgatgtccaaatttgtaaaagaaaaggatttgaataaaattatagaataaatttaggtagaaaatataattacaaatttaaataaaataatgtttt

SEQ ID NO: 559891 - DNA, 822 bp, Homo sapiens
caagcctggcccggaacatggaccggctctcactggatgaggagcactacaaccggcaggaggagtggcggcggcagctccccgagagcctgggcgaggggcttcgacagggcctgtcccggctgggcatcagcctgcttggtgcaattgctggtatagttgatcagccgatgcagaacttccagaaaacatctgaggcacaggcttcagcaggacacaaggccaagggtgtcatctcgggtgtggggaaaggaatcatgggggtgttcacaaagcccatcggaggagctgctgagctgtgtcacagactggctatggttaagcgacttctcagcttcccaaacagcgccatcagccaagtgatctacatgctgaccaggctccaaacagccatgtcaaatatgtctggaaaatgcttcagtctctgggcagaccagaagtccacatggccctggacgtggttctggtgaggggctcaggccaggagcatgaagggtgcttgctgctgacatcagaagtgctcttcgtggtgagtgtcagtgaggacacacagcagcaggccttccccgtcacagaaatcgactgtgcacaggacagcaagcagaacaacttactcacagtgcagctcaagcagccaagagtggcctgtgatgtggaggtacgtttcagaaaacagggcaaccaagattagctggccagggaggttgaggagcaggctggtcactggtacctaggcatttctgagcttcagcctctggatgtggctgctggagaccatggagatctgctactcagaggaggtagtgtagaggccggatgttt

SEQ ID NO: 559892 - DNA, 430 bp, Homo sapiens
  misc_feature (35)..(36): n is a, c, g, or t
ccaaaatgatgaacattctagttttaaaagttganngggggggagtgtggactgtattctttgaaaatgttcatgtcatgaataataaagaaggctgtgggaatgtttcaggttaaagaaggctaaggagacctgacagctaaatccaacacctggcccctgtactcagtccagtgctggagggaacaaattctacaaagggcatcattgggtcaagtgataaagtcagaatatgaacggatagattagttaaaaagtattacggtgttaatgtaaatgttactgaaattggtaattgtactgtgtttatgtaagagaatgtccctattattaggaaatgcaccctgaaatatttaggagtaaagtgatagaggcaggaagaagagaaattctaggcagacaggggtgggtccctgggcaaaaccccacc

SEQ ID NO: 559893 - DNA, 158 bp, Homo sapiens
ttcccgcccccccttttttccccttgaacttggataaaaactcgtgtttcctgagtgagggagggccccccatttggtccccaatttttgattttttccccccccccccccctccccagttttggatactaataaaaaataagccttttggttttcca

SEQ ID NO: 559894 - DNA, 394 bp, Homo sapiens
atgacacccaggctgatggggcaccccacagtgcccgtagctgggcggctctgccagccagcgaggtggtgagaggcgacacgtagcatggggatacccagcggctggtcacaggaggagttgatcatgttgcgcaaggcctgcttggcgttctggatgctgccacgctcggggttgcggttgcgcaggaacacccagctaccatgactgctgcccacaggacgcgcacgcactcccggttcaccttgatgtctactgttaccaggttttacaatgcaaattttcactaatacctgggtttaatacagctcacatcactgaatgttacacatgagtttaaatgggtaatatacaggttttgttataataaagttactgattaaattaaaaaaaa

SEQ ID NO: 559895 - DNA, 517 bp, Homo sapiens
taactcccaaaggcctaaaggtaagtacgacaaacctggagccttcctgtggcaggagagacaacaaagcgctataatcctaaggtcaagagtagagtcagcctcacctgattataattagtaatgaggacttgcctcaactccctctttctggagtgaagcatccgaaggaatgcttgaagtacccctgggcttctcttaacatttaagcaagctgtttaaatagcagctcttaataataaagcccaaatctcaagcggtgctagaaggggagggaaagggggaaagcgggcaaccacttttccctagcttatccagaagcctgttaaaagcaaggtctccccacaaagaacttctctgccacatcgccaccccgtgccttttgatctagcacagacccttcaccactcacctagatgcagccaggaacttggatccttgtgggcatagatacataatcggtttcaaggtaacgaaattgtcgagatctaaaatgagggttaattgggcggggtta

SEQ ID NO: 559896 - DNA, 1635 bp, Homo sapiens
  misc_feature (924)..(924): n is a, c, g, or t
  misc_feature (948)..(950): n is a, c, g, or t
  misc_feature (956)..(956): n is a, c, g, or t
caagcctggcccggaacatggaccggctctcactggatgaggagcactacaaccggcaggaggagtggcggcggcagctccccgagagcctgggcgaggggcttcgacagggcctgtcccggctgggcatcagcctgcttggtgcaattgctggtatagttgatcagccgatgcagaacttccagaaaacatctgaggcacaggcttcagcaggacacaaggccaagggtgtcatctcgggtgtggggaaaggaatcatgggggtgttcacaaagcccatcggaggagctgctgagctgtgtcacagactggctatggttaagcgacttctcagcttcccaaacagcgccatcagccaagtgatctacatgctgaccaggctccaaacagccatgtcaaatatgtctggaaaatgcttcagtctctgggcagaccagaagtccacatggccctggacgtggttctggtgaggggctcaggccaggagcatgaagggtgcttgctgctgacatcagaagtgctcttcgtggtgagtgtcagtgaggacacacagcagcaggccttccccgtcacagaaatcgactgtgcacaggacagcaagcagaacaacttactcacagtgcagctcaagcagccaagagtggcctgtgatgtggaggtagatggagtccgagagagactgtcagagcaacagtacaacagactggtggactacatcacaaagacatcttgtcacctggcccccagctgttcttccatgcaaataccatgccctgtggtggctgcagaacctcccccctccactgttaaaacataccattacctggttgatccacattttgctcaggtcttccttagtaaatttaccatggtgaaaaataaagccctgaggaaagggtttccttgagtcccctctgaggtgtnattcctgcttgtgtgatttagttnnngggttnctttgagacagggtctcactgcagcttaagctcactgcctgggctcaagtgattttactccagcctcccaagcagctgggactacaccaccacaggtatgcaccaccatacctggctgatttttaaaattttttctagagatgaggtctcactatgttgcccagctggtctcatactcctcagttcacgcattcctcccacctccacctcccaaactgctgggattacaggtgtgagccaccatgcccaacacccactgatctttaactctcacatgttgggcataagaagtcactatataattgttactggaaagcaagacttaacgaacaattctgactatgaaaaatgtctctttcagtttgttctgtaaatatttagaaaagtgacagctgtcaacctcagagtaactatttctaaaaatgtaaatatgtattaatccttgtatcttttatggtaattttgcatattgatatgaattatataaaattgtttaaaataaaaggtgtccttgaattactgaccacccatagatgtctactgttaccaggttttacaatgcaaattttcactaatacctgggtttaatacagctcacatcactgaatgttacacatgagtttaaatgggtaatatacaggttttgttataataaagttactgattaaattaaaaaaaa

SEQ ID NO: 559897 - DNA, 1030 bp, Homo sapiens
  misc_feature (81)..(81): n is a, c, g, or t
  misc_feature (90)..(90): n is a, c, g, or t
  misc_feature (121)..(121): n is a, c, g, or t
  misc_feature (130)..(130): n is a, c, g, or t
  misc_feature (133)..(133): n is a, c, g, or t
agcgggctcgcccctaggtgttcccgcccctccccctcccgtgtcgctcgctttctgtcagcctctctccctctccctctnccctctccntcctctcgcttcctctctcgcacctgagcgntacgcaccntgncccgtggcccggctcccgtccgtcctcgtcctctcccctctttcgcccgccccggtccgccggggagcctcgtggcttgcgtcacgcggcgccctgcccagagcaagatggagcaccgtggaagaaggccatatgtagagtgtgatcaggctcagaaaggaacacctgaagaaaagcgatatcatccatccctgtgtggtctggtactcggcatgccaaaagagtgtaaattcattcaaggaagtgcttacgttgtctagggtgcctgaattactcacgctcagaacaacgcactacaggtgaacttatgcaagcacccagcatattgggctatttaactagccacattgactacctcgcagattactgccctttccacaggacttttgccaacaattcaagtcaccagtaatcaagcctgggaagctggggcttacaaaagatagttgagccaacatgccaaactacagaataactaggtatgcaattactacactttgtgggccatatagccaatgagataggaaaagaaaggtaacacatctataacgagataaaatcccgccagtcataacaagaatgcaaatggtataaccatgagctaccgagagaagcctagactacttgaacagcatgaactattaaacattattgcttgttgaaccagcgagcaaagtattgacaggacaacaaatgagtttggcaccggagctgatccaagagaagaagacagtcagccacaagatgatattacaatttagaatatgtcacatcgctcagagtcacaagaacaagccagacataatcatagacaaaaccaaccaacaattgaattgaaagcactcattgtacccccacgatcacaaaacaaaacggcaaatcccaaaataatgtccc

SEQ ID NO: 559898 - DNA, 246 bp, Homo sapiens
  misc_feature (52)..(52): n is a, c, g, or t
  misc_feature (60)..(60): n is a, c, g, or t
  misc_feature (117)..(117): n is a, c, g, or t
  misc_feature (130)..(130): n is a, c, g, or t
  misc_feature (147)..(147): n is a, c, g, or t
  misc_feature (178)..(178): n is a, c, g, or t
  misc_feature (188)..(188): n is a, c, g, or t
  misc_feature (207)..(207): n is a, c, g, or t
gtcggcaccggccgatacgacctggtcggacgcgccgcatccctggcgccgntacttttngcgcagtgccgactacctggtggtgggcctgccggtgctgatcctgctgttcatccngctgttcgcgatnttcggcgccagctcgcngatgatgaagctgctgtccaacgccttcgtntgccagtttntgctggtgtgcctgttccngttcagcgaagccttcctgctcagcacctggggcttcgc

SEQ ID NO: 559899 - DNA, 1008 bp, Homo sapiens
tcgctgatgcactccgctggtccaactgttttttcggggccacctatcgccctccgggtgacgagcccagcaattcgctgggggccactctagcggcagtcatgtcccaagccgctgtcaccaatcccctccgagttagtagggtcgccgtgtttaccactagtggctgctggactcaggcatccgggagacgccatgccaatggcaggccctgggagacaattccctcaggactagggacagggcctgtgcctgccatgggccagggcccacgtaccacgcagcctcagggcgccgcccacgtcgtctgcaggcgggtgcgccgcgggtgttccctcgcgtctcttcaactgcacatttgcaatgcattttgcgattcccatttctctgctaggagtccagcttgggtgggcgctgctcccagagccgtgggtcccagacacttgcgttccttttgttcctgtccgtttatcaggacacgggccccacctgtcacgtgcccgaggccaccctagcccagcctgcggggcgttccctactgcctggatgccggcttgagttctgcgcacgcaggattcagtgtggggacggcccctgccggataggctagcctggcccaggtggtgagcggtttgcagtgtccgttctcatccacctgatgggcaccagataaaggccccagcatgtccagccttcactggacggccctcgcggtcccttgcagcccaagatgggactcagacccatgtgcacaccagagctcccctgccgcagaatggggccaccagccggccccgaccagggtcacaggagcactgctcgcatgtacatactgttgccatagcccacactggtgcaagtgggagccacccccaggtgcatgggggcacagcccactcccacacatccggcaacgcccccacccaaccccgagtgtttcatgcacatgtgactccatggtacactgcgtcctccccaaagccaaattaaaggcggtggtacctaaca

SEQ ID NO: 559900 - DNA, 849 bp, Homo sapiens
  misc_feature (215)..(215): n is a, c, g, or t
cttgctgactgtgctcatcactttctctcaaagttagaacttttcagtataaaaataattagctttaactgattatacttttcttaatagtttctgtcaaaattgtgtctaaaattgtgtgtgtgtgccaaatggaaataccatataatatggtgcattcagtttatccacaagtggttaacattttaagtcctagattttgagatgtctgtgcntttgtataagcatcgcttggggaataccaagatgattcattattcagtgattattttcttgacagataatatgatgatgggtgtaaaatcttcacctaataacggagtgagatctctgtgtaaagacagtttctgaaggatgataatagaatagaattgcagccaacaggctttttccctttcgagacgaggatcgtgtccggactgctaaggtaagacttcatttgtccatagagtgccatatcctgtgaaacgatcatacaacaatcaaaactcatgctttcagcaaacaaaggacacaacagatcttttaacctccactttgtcctattgaccttaactgtcctagacacaccgctgacctattttaaacgtgtgccacatttactcaattctggtggtgactggcacgtcctaacaggccatatattggttactcttactgccggaacgaacaaatttttccttctacgcccaggaaagtaaattgtggccgcgaaacccaaactggcagacggccggacaactggcgcgtgggcgccatggttacaacttatgaggaaacacctctttatctgggaccagcaacacttccacgcggtctggcgcggataacacggctcccctcacactg

SEQ ID NO: 559901 - DNA, 449 bp, Homo sapiens
aaagacacaagcacttgtatgttcatcgcagcattattcacaatagcaaagacatggaatcaatctaggtgtgcatcagtggtggactggataaagaaaatattgtatgccagacatggtggctcgtgcctgtaatcccagcactttgggagtccaaggtaggtggatcacctgaggtcgggagttcaagagcagtctggccaacatggagaaaacccttctctactaagaaggctaaggcagaagaatcacttgaacttgagaggcagagtttgcagtgagccaagatcacaccactgcactccagcctgggcgacagagtgagactctctctaaaaaaaaaaggctgggcgctgtggctcacacccgtaatgccagcattttgggaggccaaggtgggtggatcacctgacaccagcctggcccaatggtgaaaccacgtctctgct

SEQ ID NO: 559902 - DNA, 552 bp, Homo sapiens
  misc_feature (202)..(202): n is a, c, g, or t
gggcgccaacacacgccgcccggcgccccgggcgtttccccccaacttcccgcccgggcgggggactcggtttggtcccttgttctggggcaatccgcgccctcgaggaacccctcccctttttccggggggccctgctttagggggacccaaggtttcaacacgcgatctgtggggtcccgccccacgggtctacgtcggntaaaaaaaccccggggggggggggctcctggggttttccttaaaagggggccccaacccttggggggggcccccccccgggccccaaggggcccggggcccagaggggcctccccccccgccggggggggccgggctaaggggggttgggggccccccaaaaaaatttttgggggggggggttcccccaaaaccccccccggggcgggcctggggaggaacaaattcttggcccccccggccccccccccgggccccccggggggatccccgggggcccgggcccccccgggggggggcccccccccccccacttaaccggggggggaaaaaaaccccgggggtttttta

SEQ ID NO: 559903 - DNA, 799 bp, Homo sapiens
tgaaagtcagcccagtcaccaactccgacgccgaagcgttacactggaagactatcttaggaggagcaagcaaaagagtctaatgacaaaatacaacatttctatacacatagcacagtattccagcaaagagtctacttcttaacgagaagcaactcaacagatatccctctcgaccaggaagatggaagtgctggaagagaagtgctcatctctcacacagtactttggatggacaggagtttctaagtatcatggctaccagacaagctgtagagaatgatcaccctggaacaatcaagatcaacctgtcgcctttgtaagcagctcgacatccagatgaatacaaaattgcagcccttgtctactatagctgtatcttcataatcggattgatagttaagcatcactgcattatgggttttcagttgtaccaccaagaagagaaccagggtaaccatctatatgatgaatgtggcatgtagctggacttgcatatttataatgactttaccctttcgaagtgtatcattatgcagaagatgaatgggcatatggagagtacttgctggcagattcttggagctctcacagtgttgtacccaagcagtggtttatggcttctggccttgtattagtgctgacagatacatggccattgtacagccgaagtacgccaatagaacttaaaaacacgtgcaaagccgtgctggcgtgtgtgggagtctgggataatgaccctgaccacgacacccctctgctactggtctataaagacccagataaagactccagtcca

SEQ ID NO: 559904 - DNA, 114 bp, Homo sapiens
tgctgctgcggttgctctcgcgagctcccggtcttcgctctagtgtgtccgcgcgcgcccacacagggcgggcgagcccacccgggcgggcgagcccccgggcgggggttcggg

SEQ ID NO: 559905 - DNA, 568 bp, Homo sapiens
gtagctcagggtaacgtggtgtctgcattacctcggtgtctctagagcagcagctggctctgagaaggtgctaagttacaaccactgactcgatgtccttgtgtgtgtgtgttgactatgcatagatgggcacacatatgaagtagaattgagtcttggggtcttggaacaggggagttctgggtttaggaatctgagctgcacagcctgaccgtcccatttgtctgcataggctgtgatggaaaacctctcctaatgccaaggggcactgcctggcatgaagctgtagtcctctgaggaccactaggtggcgccaactcatccttgtcccgtaaactgagtaagtggctgggttatccaccgctgagttatcttggggcctccaagatcagaggcaaaaattcaccatgacccccctgccaccgcatactggagttctggcctactggactccagttccaaagccaccaagttccctgtagctatcttcttcctagagggaatacttcatccaaaggctacacggcagatccagtctagttaggcctttccttgaacctaaaccctc

SEQ ID NO: 559906 - DNA, 486 bp, Homo sapiens
acctgctaccccacgctcgaaaaaataaacaaagctgattcggggggggtttagggaccctaagggaaaaaaaaattttttttcctcctttttgggggagggggggcctcccaaaggtttttcttcctaatttttccagggtgggggggcttagggggggaaaaaaaaagggggttttgtttttctttctcaggggggggcggggtataaaaaaaacggggtaaaaggggtccctcgcgttaaaccccctttttttaaagggccctttttttttttaaaccccctccgggggggggaaaaaaaaaaggtccggggggtttaatttgggaattttccccttttggtttaaaccccaagggaggggtttttttttgcccatttttttttggccaactggaaagggggggggtttctccccccttttgccaaaggggggcttccccccctcccccgggggacccttcccggggcgtgggttttttcccc

SEQ ID NO: 559907 - DNA, 509 bp, Homo sapiens
tatcatgagaacaaaaaccagaccagaggacaagcgcatggccacacagtaagtcatcgaaatctacctttacagtaagtcaggctcattggggaatatcgagcatttgcaccgccgcgacggtatgcatatcttcgcaccctccgcctaaccggacgccacgcaccgggcacgcatcaagataatcgataccaatggcgagtttcaactgctgattaggctggcaggtattgttagtcacgtcgaagctctgccagtgtccgtcgagccaggcttcggcccaggcgtgcatcgccacgtgggtagaatcctcggtgtagagatagccactgacgtagcgcgccgggatgcccaagctgcggcagcaggcgaggaacacgtgggtgtggtcctgacacactccctgttgggcggaaaacgcctgcgaggcgctgtctttcaccgtggtggtgccggggctgtaaggcattttcatcaacagttcgcccattaaggcgcgcaggctttcg

SEQ ID NO: 559908 - DNA, 436 bp, Homo sapiens
  misc_feature (51)..(51): n is a, c, g, or t
  misc_feature (76)..(76): n is a, c, g, or t
  misc_feature (126)..(126): n is a, c, g, or t
  misc_feature (134)..(134): n is a, c, g, or t
  misc_feature (167)..(167): n is a, c, g, or t
  misc_feature (186)..(186): n is a, c, g, or t
  misc_feature (208)..(208): n is a, c, g, or t
  misc_feature (229)..(229): n is a, c, g, or t
  misc_feature (278)..(278): n is a, c, g, or t
  misc_feature (300)..(300): n is a, c, g, or t
  misc_feature (333)..(333): n is a, c, g, or t
  misc_feature (343)..(343): n is a, c, g, or t
  misc_feature (427)..(427): n is a, c, g, or t
gaacagggtatttgaagcccaggccaaattcccggcttctttttttttgcnaccagaggttccagagttgagtttntctttatttagaaaaatgggaagatgcccaagagcttggaggcattgttntcttttcntgcagaaacagtttttcttcttccctttcagcnttgtggccagttctttttnacatgaagcccctggcatttgntggggaagggactggcctggnacttgctgttagggcaggaaggggcaaaaggaagacttgggtagtaatntgggggttcagatgggtagcantaagccagctggcctaaagatgcaataagttcntaggtagtcnacccttaccctgaggaatgggaaaatgaacctcagcccattaggcaggaaaagttgatatttaataaacaaggaaagagtgaantgagacccc

SEQ ID NO: 559909 - DNA, 373 bp, Homo sapiens
  misc_feature (35)..(35): n is a, c, g, or t
caggcttggaggctcacacctgtaatctcagcacnttgggaggtcaagataagagaatgacttgatcccaggagttccagaccagcctgggcaacacagtgagacctcgtctctacaaatataaaaaaattagccaggcctggtgacacacgcccgcagtcccacccacccgggagaccgaggcgggaggactacttgattttttgagctcaggaagtcgaggctacagtgaaccacgactgcaccactgcacttcagcctgggcaacagagagaaagaccctgcttaaaaaaaagaaaagaatcaatttatttgatatatgagttatttaagtactcaaaaatttttgttaaatcacacaatgtagagctta

SEQ ID NO: 559910 - DNA, 1027 bp, Homo sapiens
  misc_feature (6)..(6): n is a, c, g, or t
  misc_feature (94)..(94): n is a, c, g, or t
  misc_feature (133)..(133): n is a, c, g, or t
  misc_feature (137)..(137): n is a, c, g, or t
  misc_feature (152)..(152): n is a, c, g, or t
  misc_feature (165)..(165): n is a, c, g, or t
  misc_feature (184)..(184): n is a, c, g, or t
  misc_feature (201)..(201): n is a, c, g, or t
  misc_feature (239)..(239): n is a, c, g, or t
  misc_feature (242)..(244): n is a, c, g, or t
  misc_feature (253)..(253): n is a, c, g, or t
  misc_feature (256)..(256): n is a, c, g, or t
  misc_feature (281)..(281): n is a, c, g, or t
  misc_feature (331)..(331): n is a, c, g, or t
  misc_feature (354)..(354): n is a, c, g, or t
  misc_feature (375)..(375): n is a, c, g, or t
  misc_feature (385)..(385): n is a, c, g, or t
  misc_feature (401)..(401): n is a, c, g, or t
  misc_feature (406)..(406): n is a, c, g, or t
  misc_feature (409)..(409): n is a, c, g, or t
  misc_feature (416)..(416): n is a, c, g, or t
  misc_feature (432)..(432): n is a, c, g, or t
  misc_feature (454)..(454): n is a, c, g, or t
  misc_feature (457)..(457): n is a, c, g, or t
  misc_feature (501)..(501): n is a, c, g, or t
  misc_feature (504)..(504): n is a, c, g, or t
  misc_feature (509)..(509): n is a, c, g, or t
  misc_feature (521)..(521): n is a, c, g, or t
  misc_feature (530)..(530): n is a, c, g, or t
  misc_feature (553)..(553): n is a, c, g, or t
  misc_feature (555)..(555): n is a, c, g, or t
  misc_feature (558)..(558): n is a, c, g, or t
  misc_feature (567)..(567): n is a, c, g, or t
  misc_feature (608)..(608): n is a, c, g, or t
  misc_feature (671)..(671): n is a, c, g, or t
  misc_feature (902)..(902): n is a, c, g, or t
  misc_feature (1027)..(1027): n is a, c, g, or t
agaacnaaaatagaaggtatctgttgtacaacatgggtagtaattgactataactggagatttattatattctaatacagatcatttataaatncaatttctttattaaaaagcttccacctttttgtttgtntgtntacaatttgcaaaantattctgaaagcngaatatatgtgcacaagtntgcaaagagtgcaaatntaggatatggtaaatgctttacaagtcactttcaaaanacnnnctgccacanctnagcctttacattgtcatcttttttnatcaaaatattttgatgccagccttccttccactgccctaaactataaancattttttaatgagttgaaattnaggaaggactacacctactanaaaaaaaganaagaaagttctattantttgnggnttcagantccccccaaaccaggnccagtatcgtggtaaaggcaangcnggggccccggacagagtatgagaatgtgcagggggcatccctgnggnttcanagcttcagtggnccgtgagtnctccagctgcataactcactgancngtnttgccagtntctacactggctcgactgggcataattcaaaaacgaaaaantcattttctttccattcttctggggctctgtgatagcatttaataacaccccaatgggatgtnttccacatatagtattatggtatttcttcaagtaattgctaaaagatacagggtctaattgttctataatactcatacccattttatctagatgttcaatggatctataaatctccccctgggattcatcatagtaactgtaacggaacctttgaccccaatggcagaaatcagaagaaaccacaaagagattactaggatccgctagatatttactgatgagttttccgnattcctgttcttttgactcactcagagctccaaccagtacaggaataatggtaaactcatccttatggctttccatggctttagctgtataaggcaaatgcatttcaatactgtgttcatcttcn

SEQ ID NO: 559911 - DNA, 367 bp, Homo sapiens
  misc_feature (30)..(30): n is a, c, g, or t
  misc_feature (279)..(279): n is a, c, g, or t
  misc_feature (323)..(323): n is a, c, g, or t
  misc_feature (343)..(343): n is a, c, g, or t
  misc_feature (349)..(349): n is a, c, g, or t
gagatggagttttgctcttgttgcccaggntggagcgaatggtgcaatctcggctcaccacaacctccgcctcccgggttcaagcgattctcctgcctcagcctcccgattacaggcatgtgccaccatgcccagctaattttgtatttttagtagagatggggtttctccattttggtcaggcgaacttctgacctcaggtaatccccccgcctcggcctcccaaagtgctgggattacaggcttgagccattgtgcccagcaatccaaaattttttnagtgcgaaaagggttgccgcaagtgggaaaattccatgcctganctcgtgtgacaaggttgctntcaagncacagtcaaaatgttttt

SEQ ID NO: 559912 - DNA, 141 bp, Homo sapiens
acggcttgagccacatcaggggtgtctcctttttatccccctcgcttttagctacaacatccctcccgagttgaccccctggggtttcacataacccatgtgtccctagttggggctggggagagtgagaagctgagatac

SEQ ID NO: 559913 - DNA, 255 bp, Homo sapiens
gcgtcagagctgatcagtgaccgcagagctacgggagatcagacatgctcctgaagaccaatgcagcatgtggcccctgtagcacgactgacgttaccatgtacagcatcaaagctgcaatcaacaacaaaatcagcagaatactgaggcgtccaccaactggcgtagctgactatgaagtccattccccggtgacgcacgcacgggacacgaccaggggactccatctacgacgtcgacccatgcacggcctgc

SEQ ID NO: 559914 - DNA, 177 bp, Homo sapiens
  misc_feature (10)..(10): n is a, c, g, or t
  misc_feature (54)..(54): n is a, c, g, or t
gactatgctntacaaaccacaaagacattggaacactatacctatgatgcggcncatgagctggagtcctaggcacagctctgaagcctccttatgcgagccgagctgggccaaccaagcaaccttctaggtgaacgaccacatctacgacgttgatcgtcacagcccatgcatttg

SEQ ID NO: 559915 - DNA, 535 bp, Homo sapiens
gcatagctgttcctgagtatcctggttatccggtaatcccagcacgacgtatgtacaaggtcccgggttcgcaatatcgacaaagtccgtcacagattcagtccccgtaaggcatgacatcaaccgtcaatgtgaggcaatgtatgttccactcccccttataaccaagagttccctacgtaatgaagaaagtcatctgttcatggtattttcatactagaattcagttatcaacttcctttcctagaataagggagactcttcacctttgaaactttatgcttggccttgaataagttcatgttactaactgacttacaacaggctgtcctggagtaggtggttagtcttctccatcactccctgaagagatatcatctgcacctccaaataaatccatggttcccactattatcttcaatgcagaaggaaaaaggcattagagttactatctgtaactcaggttcttcacaggtgatcacttcaagacattcccaaggtttctgggccagcatcagaaaagcatcaagaacct

SEQ ID NO: 559916 - DNA, 356 bp, Homo sapiens
agagagtttgagagagagagagttagagagagagcgagagagagagagagagagagagagagagagtgagagagatatagacagagtcagagtgagagattgttcgagggacagatataggttgtgcaagttacttacacaagttatttcttaaattccaaacattttttaaaatctttttacagcctatgccttggatattaaaacctattggtggaaatcattctctatataggttaccatatttgacactgtaaatacttcccattttaattagactcatcttctaatagatttactgtggtccacttgtacgtattcctctttatgatttttttctagataatccgtgcccc

SEQ ID NO: 559917 - DNA, 406 bp, Homo sapiens
gacaaccctcctcaggctagccatggactacacgggtatgtccttctgccatcccgtcagtgcacctaggaagtctcattatcgaggctgactgatgatgatcatcactaatttctggggtccccattgtacattatccctactgatagtggaagcttacaaacaagattggcaagtttccaaaatccatggtactcatgcccgactgtctacctggctacacagagtttgagggagagggagtatgtcgtctgtgatccgcatcagtcatgggggtcggtccccttgggaaggcattgtttctttagcatttaccattctgcagttgtgtgtaaggaagttgtgtccggtcagcaggtcaccagactgggatacccactgtgggcatggcagttggtatactgct

SEQ ID NO: 559918 - DNA, 110 bp, Homo sapiens
gcacggattcgccatcgtgagttccaggattttcaaaatggctgcagctcctcaagcaccgaggcagggtcatcatccataagaacgagacctactagttaatataagaa

SEQ ID NO: 559919 - DNA, 468 bp, Homo sapiens
gaagagtgagcagggcaaaggacgcaagaggacatcgggtgctctccatcaccaggaggagacaggtgttccactgaagggcagacaatgtggaaagtaacaagaaaaaaaggctagcactagattctgaggcagcagtctctgctgataaaccagacgcagtaccgactcatcgtgtccccaggaacctgcagaagctgggcaaagagagggcccagaagttgtgcagaaatagcaccagggtgcctgcacagtgcacagtcccttcccatcctcagtccactcctgtacatagcccagacagaatgctggactcacccaaaagaaagagaccgaaatcccttgcgcaagtggaagagcctgcaattgaaaatgttaagcctccaggttcccctgtggccaaactggcaaaatttactttcaagcagaagtcaaaactgatccactcccctgaatatggttggctgg

SEQ ID NO: 559920 - DNA, 526 bp, Homo sapiens
  misc_feature (1)..(1): n is a, c, g, or t
  misc_feature (331)..(331): n is a, c, g, or t
  misc_feature (522)..(522): n is a, c, g, or t
  misc_feature (524)..(526): n is a, c, g, or t
natatcggccgagtcgcacaagctgccgcataaacagaaccgtggcacgatgacgcgcgccatgcgtggcatccaactacgatacctcgagtctctcaaagaccaggaagcgtgcgcgaggtttcgagacggcccaacgtcggctgaagaaggttacgtcttccaagacgggttcaataaactgttgaaagtttttatgaaggcccgcccgtggcgcctgcccctgcggaacggctccccttcttggaccagtcccccgcgagcccggagaagggagacccgttcccaaaaggaccccacgggcctgcctggaatctgtcttgtgaacgcncttcgttgcccaaggacttggcgttggcaccgggcgccccccatcccagtgtttgtgtgcgtccagttgtgttgcacaggcctgggccccccactgagtgccaagggtcccctgagcatgcttttctgaagagccgggcctcagagtgtgtggctgtgtgtctgttggactcccctcacccccaaaaaaanannn

SEQ ID NO: 559921 - DNA, 237 bp, Homo sapiens
gagtggcatgctcacatggacagatcccagtgctcaggctgagtgagtcaggacaggctctgtctcagccttatcggcatcctgcgtcactgggtgcgcctattgtgcaaagtgaccggccgggctggtaaccctgcctgttgctaagctgtgttgccggcctgccctctgactgtacgccaaggagcggtgacaggatgtgcctttctaccgatcgccttaggtacggtcgatcga

SEQ ID NO: 559922 - DNA, 737 bp, Homo sapiens
  misc_feature (600)..(600): n is a, c, g, or t
tgagcctggagaacccgctcagccctttctcctcggacatcaacaacatgcccctggaggagctgtctaacgccctcatggtcggctgagcgcttcaatggagcaccgggtacacagccctgctacatgtctacttgtccggtgcctggcacgcccagcgtctggccaatagcccctctcctcttgccgtcgcgtccaacaactaggactccggcctgttggtccatcgcgagcgatgggcacagtcctgcggtcgtagtgttccattgtgcttggtcggtatgccccgcagcggtttgggatggaccgttcgcagcgccagcgctttaggccattcggacgagtgccgctacggtgatcgccttaccaggccaaggtcggtccatcatagtcatcccagtgccaggtaggaatgagagctcgcgtcccacggctggatgcgaagcgtggttcggccacgggcggatctcccgcattcggaagcgacggtcgtcatctctcaggcagggttggccaggtcccgtcgtgtggcaccctcgtcctctccaagcccatcgcagtgccctggagctaacgttcccagacgtcctctccacgagnctgtcagagctcgtgcagtgacaatcctcgcgtggatccctgtgcggacgaaggcccgtacgtgggcctggcgttgagcccgtgaaggttcactggcccgggtcacacgttcagtgtaccctggactgggggaaagt

SEQ ID NO: 559923 - DNA, 338 bp, Homo sapiens
  misc_feature (160)..(160): n is a, c, g, or t
gagtatgaaagaactatcaaagccagtctcacttatgaacaaaagatccagtaatcttaagaagttaagtaaatctagcattatgtaaaaataataaaaatacatcagaacgaagttgtatttatcctagaaaatgaaagttgatttaacattagaaacnctttaaaaagcagggaggattaaaggagtttgtttattcttaatatattctgtttgtttatttcagtgtttttatatgagtatccttaaatttttaaactgtgttaagatgcatgcttatacttgttttacttttctgactggaagataaacctaaataaaggttgtgaaaaagaaaa

SEQ ID NO: 559924 - DNA, 122 bp, Homo sapiens
  misc_feature (12)..(12): n is a, c, g, or t
  misc_feature (31)..(31): n is a, c, g, or t
gcaatcatgtgnccatactatgatcttcgtngcatgaaacagccaatcgtggtattcaaggacacctaaaagcagtctcttatgacaagtttgtgagtggtgaggaaaattgtctctgcctc

SEQ ID NO: 559925 - DNA, 113 bp, Homo sapiens
tgtctaggctccaaatttcctggagttctcgaagtctgacatgctaatgtctgtcctgtagcttctgattgaaactcggtcgacgtcttcctgtgccgggctctggccacccc

SEQ ID NO: 559926 - DNA, 91 bp, Homo sapiens
  misc_feature (21)..(21): n is a, c, g, or t
  misc_feature (23)..(23): n is a, c, g, or t
gcagagggctgggctgcggangngcgcgccgggcgatgcaggggggcaactccggggtccgcaagcgcgaagaggagggcgacggggctgg

SEQ ID NO: 559927 - DNA, 106 bp, Homo sapiens
tcttcccagatctattactagcttctagaaataccctgggtacaacagcaagctcatgctgtccccgagtgcttgcacattctaacagcgtgcagagtatattgac

SEQ ID NO: 559928 - DNA, 421 bp, Homo sapiens
tcacttaaaaataactaatgtaatttttggccgggctcggtggctcatgcctgtagtctcagcactttgggaggccaaggctggcagatcacgaggtcaggagttcgagaccagcctcaccaacatggtgaaaccccatctctactaaaagtagaaaaattagccaggcacggtggcgggcgcctgtaatcccagctactcaggaggctgaggcaggagaaccgcttgaacctgggagacggaggttgcagtgagccaagattgcaccactgcactccagcttgggtgacactccgtctcaaaacaaaacaaacaaacaaagaatatacctttctccagcaaacaatttgattttggagtactggatgacaaaggttacgtggctcttctcctcgtacctgttctcaaggggatcctctag

SEQ ID NO: 559929 - DNA, 616 bp, Homo sapiens
atcacgaaaaaaactctacctctctatactaatctccctacaaagtctcgcttaagttataaacattgcacagccatcagaactaatcatatttgatatctgtcttcgaacaccacactgtatccccacgcgttagctatcattcagccgatgaggtgaaccaggcagaacgcctgaacggcaggcagatacttcctattctacaccctagtaggctccacttcccctactcatcgcactgatttacactcacaacagcgctaggcgtcactaaacattctactactgcactctcacgtgcccaatgaaactatcaatactctctgagcctaactaacttcagatatgagctagctgtagcacaatgagcttgctatagtacaagatacctcttgtacgggctccacttatgactccctagaagcccatggtcgaagcgccccatcgctgggtcaagtagtacttggccgcagtatctcttgagaaactaggcggctatggtgataatagcgccgtcagcactcattctcgaacgcccactgacagaaagcacatgagcctaggccgcttcctgtgtgactataccgctatgaggcataattcatgaccaagctcc

SEQ ID NO: 559930 - DNA, 137 bp, Homo sapiens
aaggggacgtactcggctcggatgcgtcagtccctcaggaaccggggatcttagtgtacctggctaagttcagaccttctcttcctttcctttcctttcctctccggcccattttccggtcctccggtccctctcca

SEQ ID NO: 559931 - DNA, 312 bp, Homo sapiens
aaacaccatctctacaaaaaattaaaaaaaaaaaaattagctggacatgggtggcatgtgcctgtagtcccagctacttgagggggctgaggtgggaggatcgcttgagcccaggaggtcaaggctgcagtaagccatgtttgtgccactgcactccagcctgggtgacaaaagtgaagccctgtctcaacaaataaaaataaaaaccacctctgctttgctcacctcctcccttaataaaacatgtatagaagactttgagctcaatggattacatatgcatcgtactcagatattttacaaagaacatga

SEQ ID NO: 559932 - DNA, 849 bp, Homo sapiens
agcggattcctggagaagctgcagtgtggggatgctctagaccgagtactgcccccagtgtctttccaccgtcctcctgcagcagcggcagcgtgcatgcagcagttagcagcggcaactatgaggcgtgcaccccagaggcaagtcccgcagggatggagcgtcagcctgagaaggagggctatggcagccccgacaggggtagtgttgtaccggatggagggcgaaccagactgggaaccagactgtatgggcccatgagaatacaccattcccaacgaactagacccgtacatgcgcacgaacagtgcagcgtatatcgatcagtatggcgataagataggccgccgattcagtatgaccctaggacgcgtccagtgatgatgaaggagtactagagttagttgagcctacttcagacccgtggttccagcagcgcgagtgctcacgcacagttagacgcagaccctgatgatagccttggcacacatcatatgcgcgaggggacccggtgtgccggactgctgtaccggaccgggaggacagacaaagaggacagggagacgtcctgcgtgagggaccgcgagcacggagccggctgagacgacaaggaccatggggcgtacgcggtattagagagggaacgtgaacgcggtcgtcgatcacacccgtgccgcagagtaccccaggacgaaaactcgcagacggggagcctcgggacatgaagagcgaggcgcacaggaagcaagggacggaggggcgcggggacggcgagcaggcacagagacagacgcccgcaacccggggcgatacgaggctggagccctgcagcgcctctgcgcccccgga

SEQ ID NO: 559933 - DNA, 945 bp, Homo sapiens
  misc_feature (651)..(651): n is a, c, g, or t
agcggaggtaacactgtcgagatccagtgctgcctgatgacagtgagctgtctccgagagaaaaattcctcagttattaactctctgttccttgcatcgtcatctccttatagagcctactcacctccctctttactctgtaggagacatagaccaagcgaaacaagagagaggcctttctgagagagatagtcggtctgtaagagtcctggtaacctgtcgtgtcgcaaacgttgagacgtgagtgctactacttggtcacaatacgcatgtaaggatggcctcctcatctaagataagggcacgttgaactgccctgataacattgcactcttcaaacgttaaagcctacttacagcatcatctgtaagctcacatctattgggtgtatgtccatgtacagttcgcctctaactttaccagattgaattaatataactatgtttccccttgagaatacccgcgtaaagggaccatgtgtatctagttgcgctacgtgtaaccctatcctctttttcgagaggccttcctgattccccgtgtggtagtccctggatagtgttccatttttgctttgtgcaagttgggtccgccaatccagtatgcttcgccatctctcaaaactacaggggcctcagttttcatcccaangcaaattacaatggatgggaatccctttcctttaccaagggtaaaaacacgttttgatgcggcatgcaaatgaggggaagatgccactggctcgatgaacgtaattcagagcttggagagacacgtatatctttgcagggggccgatctatttgataacccttgggggataacggtcaagccaaatctttcatgtgtggcttggattgccttaagcaattaaaccaatggggcccccccttttctaagaaccattgccctatggttgccgacgagatttggtaaaggattacca

SEQ ID NO: 559934 - DNA, 810 bp, Homo sapiens
ggtccaccgctgccgcctccttcttctgccgctcctggtgctgctgtgtgctcgtgcggtgcggacctggtacctctttgtgaagcggagctgaggagaaatccggcgctctgcctatggctcgagcagaaaagcccaaggtagaggagtcaaagactgagaacaacgatcatattaattgtgaaggtggcggggcaggatggttctgtggtgcagtttaagattgagaggcgtacaccagttagtaaacataagtgaaagcctatgtgaacgactagggatcgtcaatgaggcagatcaggatgtgcgattggatgggcaagccaatcaatgaaacaggacatatctgacacagttggaaatggaggatgaagatacaattgatgtgttgccaaggagggaagacgggaggtgtctactgagaagaggggaaccttggttcttttagtccagtaactctggtggcttttgaaggaccgaggattgacattagctcaaattgagaacaacctgcaagtatgggttccgaccaccactccctgtaggtactcacctggtcattcgtcccccacccgatgcgtgtctccattttccccgcctgtcccccgattgccctttcagatggtcgcgcgtgaaacggtccactcgggtcatcatggtcgccacgcaggcctcatcggcctctgccctctctctctgtagcctccccagcagccccagggcgtggcccggctcgggcctcccctcgcacacgggtggcgcgccacctcctggtcgctgggagaatcccctttttaatactgggcctgg

SEQ ID NO: 559935 - DNA, 434 bp, Homo sapiens
cgtccaaggacaagctgctagtgtccccgtccgactgggctctttgataaccatgatggtgatgatgatgacgactttttctcggcaacccacagcaaaccttctaaaacaggcaaagtccaatccactgccgatatctttggtgacgaagaaggagatctgttcaacgaaaaagccgtagcatcgccagccagccactgtgcgtcagacagatgaaaatcaagcaagagcagaacaacaggttacttcatcttccagcaaaaatctccaagccctcatcagaaacaacgactcaaaaaggcttattttcagatgaggcggcactctgaggattggttttcttctcaaagttgcgagtaagtaaaaaggtgcatctcgtgctgccgggaaagctccccaggtaggtatcccgggttgatggaagcgtcgggcat

SEQ ID NO: 559936 - DNA, 939 bp, Homo sapiens
tccggggaaaaaaaatttttttggaacccccccaatggaaaaatttttcccgggttaaaccccttttttctcttggaaatcgggtttttttatgggggcccccaggtagttgttttctcttctccccctctcgtgtttcgcggaagtcggcctgtggcccactacttggggggtggggtgccatatagaactcttagtgtcccatccttcctccgacgacaccccgcccgtcttcggtcttcgccccgacaagaggatcttttcgcgtgggtggttcataccaccccgcttttctggtgtcccccccacacaaactagctcttaccggttatgaacaacgactcttgggtggcccctctttcaacactattaggtgtgcgaccaacacgccccccccaggaggtgatgtcagacgtgctctcttgtgtcatacaaataagcgcggcacatcacgcaccgtggggagagggagctatctgtgttctctatggatcacatgatgtgcgccctgctcctcgaagaaaaggttgtaaccccctgtgcgcacatctcttttttataacacctttcttctctgtgtgtgagctcccccagtgcggggggcaggagtatgaggtaacctctttctctggcgcccgaggtgagtggtgcccacaagaaagaaggcgtctacctcggaatcatgataatgtgtccgttcgccccccatatgttacaggtggcccaccctgtgtgcgcgacgacggcccctgcgaggggcgatcttctttgtggcgggggggcagccctttcttcgtgagtgttgtgctgcccccacagctgtgtggtgggacacccccctttttgttagttcgccttttgtggcccctgtgtggttctccccaccccgtggtagtggacctcttctcaactatagttgttatccttcccctgtgctca

SEQ ID NO: 559937 - DNA, 205 bp, Homo sapiens
ataaaatggtgatgaaaatgtcatgatagtatgataatatgcaagtttcaaattcatttataattatttaaaatgtagttttagatccagctcattcataatagtagcatattttatattaaagatatgaaaatacataacataaacaaaatttggaatatatttgaaagacttaagaataacttaattgccaaaacaatcttag

SEQ ID NO: 559938 - DNA, 418 bp, Homo sapiens
ccccgttaatccagatcgcatcaaacaaacattgccattttccccaacacccaccaagtcctctccatgggatcccatgcccccctccagagctaatcagaagcataatatctccgggatatcatgaagcaagatataagagaagaccaaaccaaaatccgtaattcatggaaagaattgtaatcatcaatctttcatattattaatacttggtaattattttctccccaccagtattttccagtagattctaatcagggggaagggcaaaaggaaccccccctttgttgttcatttgtttcaagccaatagtcctgattaatttagctttgctaaactgacttatatctggaagtatataaccaagataagaaaataggttttaatatgatcatcttaagctaactgtaatgaaaag

SEQ ID NO: 559939 - DNA, 1096 bp, Homo sapiens
tccccagactccaccccgagccagtgtccgacgagagagaggtagccgaggcagcagagcggagggaagactgccatcttcgcacgctccgaaaaccgaggcagcgagacgaaccccagcatcccgcgggctccgaaggggccgccgccggcgacgcctcaccgccactgctgcgctgcctagtgctcaccggctaaggaggcatacgacaaggtgaagctgcagagccggccggcagacgccccacggacccatgggcccggccagctgacgctgacgatctgcgggccatgcgggacatcaacattcggcagacctcaatggactaggcaaggggctgtacagaccagactcccgccgactgacatgtcaactccagggcatggagggcgcggagtgtagtgatcagcaagtgggcgagggacgtcagagaccgcaacggccaggagaccgggtgatggggtagaaccaggtcagggatgtggcaggaagaggtgactggccctcggatccagaccttccatgattcctgaggccatgaccatagaggaagcagaaagaccatgactcgcacaacatgaccataacagcacaacaatggacccactaagcactaccggcaaccataacagacagagccaaagacgtcatggtacaaaatggcatcgcaaggaagaggccatggcatggacacccactgagatgagtcaacatactggcaagggggaacaacttcctgacacccatagacaaagacaacaacattggaatggacaacctgatgacgacccaaatgcaccagaaggacactgaaccagaacaggaggacaacgcataaggtacaagacagcagacgcggaagccacccgggccagataaacaacacatgggcaccggaatgaaagagaacgagaaaggaggaggagacaacccgtaactgagacacggagcagcacacagaggacaagaggacacaaagagagactaaaggacagcgacattggaagcgaacgagaaaaacaacatagacacaggacgagccagcgaactcaccaagcacagctgcaacgcaaaatgaaggacgagcggaacaatt

SEQ ID NO: 559940 - DNA, 262 bp, Homo sapiens
gtccacgctggctaatacggcaaagtccctgtctctactaacaatacaaaaatcagccaggtgtggtggcacacacctgtagtcccagctactcgggaggctgaatgcaggagaatcgcttgaacctgggagtgcagaggttgctggtgagccactgcttgcaccactctcacctccagacctgcaaacctatcttccaggttacagcacagtctgttatcagggcacacttcttcccactactcctgcctgtccagcgccg

SEQ ID NO: 559941 - DNA, 1306 bp, Homo sapiens
  misc_feature (601)..(601): n is a, c, g, or t
  misc_feature (659)..(659): n is a, c, g, or t
  misc_feature (772)..(772): n is a, c, g, or t
  misc_feature (775)..(775): n is a, c, g, or t
  misc_feature (1077)..(1077): n is a, c, g, or t
atgagatcacgcggcaaaggaaatgaacagcagcctcctaatagccagccttctttgtgatgtggaaataattatcagcatgtaaaagactatatatatattcaacaattctgatcccctgaaaaattcaaatctacaactgatttgcttcctgggctcctgaaaacaactttgtcaaaattgttcagaaatataatcagccaatcgttgccccttggggacgcaggataaagcaagtcagccatgaccaatgaggagtcggccgtgcacaattacatgcagacctgcaggacatcgagtccctgctatggtccctccccagtcaggcccccattgcctgggctgcagccagaagcattcaggcacaagtgcattcaacaaatacttatttaattgtattggtggttagagggttgcgattgattaaggcacattaatggatccgtgtcctccctgtatccaagattctgccatttgtctctgcagttcctcccactgaagaattggagtatatttctccagcccctaatgttgggtttagtcatgtgtctagctttggccactggaatattaatctgcatgaccaaaaacttggaaagtntgcattcatttgtgctcactcactcctgctatcaccatgagaacaagcccaggccagnctgctgcttccagcagaagataagagacaccaagagcaaagtcagagcttcccagacatgctcatgctagattaaccaatcctcagctgacccatagatccatgaaaataaangantgttgtattaagccactgagatttggagtgacttgttatgcagcattttgtgacaacaactaactgacacaagagtcaccgtcctttatctctgtagattttaaccaattttaatagctagatggagatcttctagttgcctttatttataatgaatatgactgtagagctagtttggcctgacactaccagtaacctacccagaaattcagaaatactttcttctccaacccgccccaaccaactttttgtttgtttgtttttgggttctccctctttgcctaggctagagtacaaatggnacagtcagagctcactgtagcctcaaaatcctgggctcaagtgatcttccccttcagcctcctatgtagctaagactacagacatgtgccaccatgcctggctaatttttttattcttgcagacagagggtctcactatattgcccaagttggtttcaaactcctggcttcaagcagtcctcctgcctcacccttccaaagtgctaggattataggcatgagccaccat

SEQ ID NO: 559942 - DNA, 769 bp, Homo sapiens
  misc_feature (656)..(656): n is a, c, g, or t
actagttctactcatgaggtgatgggccccaagaagaagcacctggactatttgatccaggctaccaatgagaccaatgtcaatatccctcagatggccgacaccctctttgagcgggcgacaaacagtagctgggtggtggtatttaaagctttagtgaccacacaccatctcatggtgcatggaaatgagagatttattcagtatttggcctctaggaatacgctattcaatctcagcaactttctagataaaagtggatcccacggttatgatatgtctacgttcatacggcgttacagtagatacttgaatgaaaaggctttctcctacagacagatggcatttgactttgccagagtgaagaaaggggctgacggtgtcatgaggacgatggttcctgaaaagctcctgaagagtatgccaatcctgcaggggcagatcgatgcactgctggagtttgatgtgcatccaaatgaactaaccaatggtgtcataaatgctgcatttatgcttcttttcaaagatcttatcaaactgtttgcttgctacaatgacggcgtcattaacttacttgaaaaatttttcgagatgaagaaaggtcaatgcaaagacgcgctagaaatttacaagcgatttctaactagaatgacganggtgtctgaattcctcaaggtcgccgagcaagtggtatgatcagggtgacattcccgactcacaaagggttccagagtcttatgagacccttgtaccaatctaaataccttaa

SEQ ID NO: 559943 - DNA, 117 bp, Homo sapiens
  misc_feature (75)..(76): n is a, c, g, or t
cccgacctctcggtgacaccaaccaccccaaagaggggtccctgctccgtctcacagggatctttttgtatattnngcttagcatcatacatttgccatgttgtttcatcatctgcc

SEQ ID NO: 559944 - DNA, 200 bp, Homo sapiens
  misc_feature (10)..(10): n is a, c, g, or t
acgagtctgnttggctcgtgttccgtcggtctgggctcccgcagacgctgtttctgctcactgaggtgctcttctgggcgccgcgctgcatctgctccctgtctggaatgggccgccccgggcttgggcggccggctgggccccgaggcgcttccgcccgtatggacgctggtgccgccccccccagatgaaggcgcagg

SEQ ID NO: 559945 - DNA, 263 bp, Homo sapiens
cgctctgtgagactctctacaccgtcctgccttcctctcgagacagatgttgcagctgggtacaccaatctgcttatgacgttgaaagaacccaggaagttaaagggttagtggcagcagcaccaaaggaagctaaaggaaatctgttgagaagaagctgggaaaggtgaagggtctctggcgacagcctcccgagaaggccttccaaggtcagagtgtgacaatgttggcagccccttctgcagagaagtcgctcaaggatc

SEQ ID NO: 559946 - DNA, 224 bp, Homo sapiens
  misc_feature (198)..(198): n is a, c, g, or t
ttgggggtactctctactagagtggagccacacttcgtagtgtgtggaacaaaccaagttaaagaaagaagatatttatgcagctggagatagattggtggtgctagcacgaaatcccatggcggtgaagaagaagaaggaatctatcgcaatatgtgtatgtcgggtagagaggaatcttctatgatacaacctaanttaacaagtgcgtgactttgagatag

SEQ ID NO: 559947 - DNA, 431 bp, Homo sapiens
tctgtcggtccgaaccttattgtgtagagggaaggttatggtcgatatgttaggtggcgcttccaattaggtgcatgagtaggtggtctgcagtaatgttagcggttaggcgtacgtgcagggctattggttgaatgagtaggctgatggtttcgataataactagtatggggataaggggtgtaggtgtgccttgtggaaagaagtgggctagggcattgttaatcttagagcgaaagccaataatcactgcgcccgctcataaggggatggccatggctaggtttatagatagttgggtggtaggtgtacatgacgtaatggcaggagtccgaggaggttagttgtggcaataaaaactgatacggatactagtataagagatcaggttcgtcctttagtgttgtgtatggttatcatttgtttttgag

SEQ ID NO: 559948 - DNA, 285 bp, Homo sapiens
gcttgggtgtcaatgatgatttttctgaggaagtacccaaacaaaaaaacctcatgaaagaggtaaccccctttgtaaagaatctgtaaccaataccatgatgttcaggcggtgatcggggctcccggactttctgaagctagaaaaatgctgtgtctcccaaccacttttccatccccagcccctctcatccttggagcactctgccgctcaagagctggttggtccattattggtaagacattatccgtaatggttgcaaaaaaaaacaaacagagggggtgt

SEQ ID NO: 559949 - DNA, 511 bp, Homo sapiens
  misc_feature (469)..(469): n is a, c, g, or t
ttcgggctccttgcaggatgtagcgctcatccaggttgtagccataggcctgggtgccctcccacgccctttgatacagtatagtacggtagagttttcccatgtcttgggagggggagatatgtggtgtatcgggtgaaaacgtatattggcccttggcttaatgaaatgtttctttatatttaacatcacttggatggacagaataaagctgggctagaacaatctcgggaggatccaccagactggtaacgtcaggatagttggcaagggcatttttcttatattggatctgactcatcattgccgggttctaagtaacccttacatggtccacagaatccagggggatccagccaatggcctcggagccactccaggtcagctcggtagacattatcactcggtaggtcataggcctttctggccttgaataacatcgtgcgggtcgggatgacacatccagggnggcaagtaattacgataatcaatatcatggacaagggtctgg

SEQ ID NO: 559950 - DNA, 135 bp, Homo sapiens
caaaacgaagaatacagtcctcgatgttttggcccatacacttcagtatttgtctaatacactgtcttctttgtagcgatgctaggccctgtctagcactgtgcttggtgtgagttcaccacatctagtggtaac

SEQ ID NO: 559951 - DNA, 115 bp, Homo sapiens
gctcttctctaatcgctccgctatgaaaggtcgttgtcacacgattaaagtcctacgtgatctgagttcagaccggagtactccaggtcggttatctatctacttcaaattcctc

SEQ ID NO: 559952 - DNA, 345 bp, Homo sapiens
  misc_feature (16)..(16): n is a, c, g, or t
  misc_feature (111)..(111): n is a, c, g, or t
  misc_feature (135)..(135): n is a, c, g, or t
  misc_feature (144)..(144): n is a, c, g, or t
  misc_feature (165)..(165): n is a, c, g, or t
  misc_feature (167)..(167): n is a, c, g, or t
  misc_feature (176)..(176): n is a, c, g, or t
  misc_feature (178)..(178): n is a, c, g, or t
  misc_feature (180)..(180): n is a, c, g, or t
  misc_feature (199)..(199): n is a, c, g, or t
  misc_feature (228)..(228): n is a, c, g, or t
  misc_feature (237)..(238): n is a, c, g, or t
  misc_feature (252)..(252): n is a, c, g, or t
  misc_feature (269)..(269): n is a, c, g, or t
  misc_feature (322)..(322): n is a, c, g, or t
tcgtattcctgtttgntggtccacatctgctggaaggtgggcggggaggccaggttggagccaccgatccagacagggtatttgcgctctgggggggggatgatcttgatnttcatggtgcggggtgctagggcngtgatctcnttctgcggttcggtcgggaangncagggtacntngnggtgccccctgataggacnttgttagcatagaggtccttcctgatgtnaatatcacnnttcatgatgctgtngtaggtggtttcagggntgccagcagactccatcccgatgatggatggctgggcagggtctctgggcagnggaaacgttcatttccgatggtg

SEQ ID NO: 559953 - DNA, 415 bp, Homo sapiens
gacacatggtactctatgatatgaagatatccgtaaaccatcctttccagtgacttaaggaattgttctcacatatgactatgttgaacacttcgagacctcttgaatatggtactgcattgcctcttacataaaagaacatagtatgatgtccgctgtagaactgcactgtgacaggttggtcatactgcaaaggatatcatataatattggaagcaggtgtttgcttggacagaccatgactagggtcgccagtctggctacgctgtagctaactcggatgccggagttccatgattagagacagactgatggcctactaccaagtgcattccaagctgaacgatgtacaaatctatcggtcgtgagtacgtacgactatccgcacatactattcatactactaggactggcg

SEQ ID NO: 559954 - DNA, 232 bp, Homo sapiens
agaagttcaatagcagttaagcatataactacagtctgcagggactattctaaatattcatattagtgtcttggtagagctctgattttatgacagtttatgaaacatcggtgcacaggtgaactcaattggtgctaatggctcttcacggtgaagagcaatgttagagaatacaagccaccacgtgggtggtatttgaatatagtgtgctattgaaacttctaacactagg

SEQ ID NO: 559955 - DNA, 415 bp, Homo sapiens
  misc_feature (415)..(415): n is a, c, g, or t
ctaccgcctgccggaggaaacaaaggatgttctgggcacgcatcagtgccctgagtgaaatggagctgcgctacaccatttacgttaacggcctttgctagagagagtatagtcctggtactacaaggcagggactgttttacacagtttttggttatacatgatcatcatcagttatgtaacaacaaatgagagcatggtagatgacatttaggggcacccatttagttgggtcaggccaacaagagtattaacgggaacgatgcatcatatttgccaacaacagaagaagtcctgctcgcaggcaccagagacgaagacgggatcgtctgtctgacataatggcagtagtggggatgatgactatgaccatctacattacgcacatccgcattcgacaggatcctctagctgn

SEQ ID NO: 559956 - DNA, 88 bp, Homo sapiens
  misc_feature (5)..(5): n is a, c, g, or t
  misc_feature (27)..(27): n is a, c, g, or t
attcnatctcggtaccccattggatangcggatgagggtagaggtttttgctcactaatgaatgacatgaacctagaaaagtgcttga

SEQ ID NO: 559957 - DNA, 786 bp, Homo sapiens
  misc_feature (162)..(162): n is a, c, g, or t
gtggggggggggggggcgccccccccttcttctctttattaataaaaaaaaaaaaggaaggggtgtgggttttttttctctcctccccaaaaaagaaaaaaaaattattttttttttctcaaaagggggggtggggtgtcaaaaaaaaaaaaattttctctnttctctcttttttttcttcttcaacaaaaaaaaaaataaaattgggtgtggggaggggggggctcctctcctccccccccacaaaaaaaaaaaaatatctctctccccccgcccggcggggcgcgcgtctttgttttttttttttttttttcttcaccaaaaaaaaaaaaataaaaaaaagaagagaggcggggcgcgcggcgcgggcaaaaaaaaaaaagaaaagggagggggggggggtataacccaaaccccacccccccctccctttttttaaaaatagggcggggcgcgggagattttttttcctccccccccgaggggggggggcgccccgcgggcgtggtggagaggggaaaaaaaagggagggcgcccccaaaaaaaaagtttttttttttttataaaaaaaaatgtttggtgggaaggcgaaatatattatatagggggtggggcgcccccaaggatttttataaaattttcttcgggccgccggaaagaggggggttataaaaatttttttttgggcccccaggggggtttgggaaggttaaaattaagccccaaataataggggaaagggaaccctcctaaggggttaaaataagaaagtatgggcctccgtc

SEQ ID NO: 559958 - DNA, 169 bp, Homo sapiens
  misc_feature (158)..(158): n is a, c, g, or t
gactcggcccgcgtggttcttgcagagaaggtgctgcagtttgacccaggaccaagaacgtgacggccctgctgatggaggcgaaagagctggaggcccgggtcatcagtcctttctgccagcgaggacgatgctgccagcgtgtataccgcgcagcncgcgatgctga

SEQ ID NO: 559959 - DNA, 296 bp, Homo sapiens
atcgggaacaagcccgttgtacccttggctggacatggccaagacccaaggcattccccggcggcaagctgaccgcccagcagtttggcttgattttcagccgtcatcattgggttttgttttgacagctttgctgtcccatagggacttcgactgggaccaggtcaaccccgccaggggggggtccccagccttttctttttttctttctttttttttttttcccccttaagctgctgtcaatccaaacccttggcatcatcgttttttttgaattaaaacccccatatcagcca

SEQ ID NO: 559960 - DNA, 349 bp, Homo sapiens
tacagagtctgagtaatctgggcgggcacggtggtctgtctgtaatcccttggaaggccgaggtgagtggatcacctgaggttgggagtttgagaccggcctggccaacatggtgaacccctgtctctactaaaaacacaaaattagctgggcgtgttggtgcgtgcgtataatcccagctactcgggaggctgaagcaggagaattgcttgaaactgggaggcggaggttgcaggttgagccgagatcattgcatttgacaccaaggcctggggaaacaagaagagaacctcattcttcaaaagaaatttaacaacaaatcaacaagggtttacacagccacccaatc

SEQ ID NO: 559961 - DNA, 119 bp, Homo sapiens
tctgtttcagccagtcgccaagaatcatgaaagtcgccagtggagcaccgccaccgccgccgcggccccagctgcgcgcatgaaggccggcaagacagcgagcggtgcgcgcgaggtgg

SEQ ID NO: 559962 - DNA, 140 bp, Homo sapiens
gtaatgcgcagtctgaggagaacgacatacatgggctccgcaacggtcattgatgacaccaatatcgcagcgactgcagctggagacagagatcgaggctctcaaggaggagctgctcttcatgaagcagcaccacgaat

SEQ ID NO: 559963 - DNA, 786 bp, Homo sapiens
  misc_feature (1)..(1): n is a, c, g, or t
nagaaaagtctgtggtttctaaaagtgcttcctgcagggtcttattttcaaagctttccttggaggcttttggtgtgttttaggtggggctactgtttctccctctggcttctgccctccctccttctctccctcgtctcctcatcttccatttctctctccactcaccttcttctctgcacccccgaccccagcaggagaggtgagagctgtggggaggggggggtttcagttcactaccccggattaggttttcctatcaatgcacattcctttgtcctcttcaacaaaaggacgaaaagcaaaaaaccacaacccacagctttctagttgctggacttaacccaattttcctgtaacccccaggcatgtctttctttctacctttgactcagatatttatcagcagatgataaaatgcaggcaaacccagaaagctaaagtctttggaaaaaaaatagctgttcttacacatctttcctcatttgcatgggcctttcccttaggggcactgggcaagtccatgtattcttgggtatgcagtgagcacagctcaaagggggttctaacacatttttataagattgcgtttcctaaatgaatctcttccatttaaggatttaggcataattaaaaatctgtagcgtttttgtgaaagcaaatttaagtttaacttttggaaaagttacagactgctcttaggtgctaaaaaattacaatggtaaaatacggtttagcctgtttttgacttgaaatggagaaaagtggcagaatctgggcagagac

SEQ ID NO: 559964 - DNA, 1773 bp, Homo sapiens
  misc_feature (1134)..(1134): n is a, c, g, or t
  misc_feature (1424)..(1424): n is a, c, g, or t
aaaagccaatatgggaaaggaccagactcaggtatcaatcattgtcatcataggaacacgtagagttcggagcgaaagtacaacactgactgagcacatctgagtctataaatgcggtgtggcatgtcgaccaaagaaaccattgaagaaacttatgagaacggagggctgcgtgagaatgggaaaagggcttcctatcacacgtatgccttggagtctatgcgataatcatgacaagcctgtacgcgctgcaacgctggataattgactcatttgacatgatcatctcttggtgagtgaatacttgtggagaacccaggcgaagtgttacttatgttgaacgtgagtcgagtttaggatgccgcgcctagggtacaacaggagcacgttatggatcaagaaaaaacaattgactctactaggggtaagcaatttttccgagggcgtggaaccgttgtggcgttgttcccttgggtagttgggtctcgcgtgggcctcggagtgtaagtgctcgcacatttttccgagacgcccttgtggtaattcttgcgccaaagggaaatttcgggggtccacggaagcccacaaggaatcgaatggcgaatttgccctctattatctatgaggcgccttcttagcgaaactagcaattgtggcgttgcgtgcgaataagacccacaagacttcaaccttggggttcccggaggtagttataaaagcaaaaccacatactctggggacttttccccaagccttgggaatggcacccaagaaaacaccggtaaacccatagggcgccgccacgtcaacaagggcaacgacctgactttgaaagcgccgaaacacacagtgtctggttgctccatacgccgcagacagagagcgtccctcacggtcagcgacacacgtaatttacacctacattttctgcatacacgggacacacaccaccacccttttgcgggcggagcgttctacccgagaaagagcccccacacgagacaaaccacaccaaaaggtcttaacgcagcccacaattttgcgggggtgaaggcgccacgaagacatctttatgcccgtaaggggagtttcgccgccgacaaacttggcgggattgggaccgcaaaacaactntaatttggtcctttagagagggcaacgaagcgccacaaaatagtgtaggaccttttagaaagaagccaaacttcggtcaccattatgaggggcgttcttctcacacaggggcagcaacgttcttgcggcatacggacgggtcccaccaccctgcggttaacacgcggaaatggtaggacaaaattgggcctcacaaaattgggagaataccccagactggcctctagagccatacgggacggggctctcgcatggcgagtagctcgtcgccaattctcccgtttaaaccnaaacccaaaaagagttgtagcctcctccaagacctgtgcgacactagagaaggccctcttgtttgtgaacggcgcgcagtgtgcgacaacttgctctccagacgcggcactggtagtctgctaacccaaaatagacgaactcggccgtagtgagcacaacttggtgacgtgaccgcacggggtaccgctccatagcctagtaggcccgagcagcagtacatggaccgacaacagctgtagcaggcgcttgatctgacgacactaccgccgggaggacagaggagggtagagcaaccaccaattagagtagcttcacgagatcaatacaggacgtactaaccctcgcggg

SEQ ID NO: 559965 - DNA, 131 bp, Homo sapiens
gcccaaacccactccaccttaccaccagacaaccttaggccaaaccattttacccaaataaagtataggcgattagaaattgaaaacctggcgcagtagatatagtaccgcaagggaaaagatgaaaattt

SEQ ID NO: 559966 - DNA, 233 bp, Homo sapiens
gcctggtataacactgcactgcgtagcagtactccttagcaggactgataagctcacgtaacctaccacatgctgcttactgctagtcattctgtgcatgccattacgctaggtcttgaactccttaaccccagttccttgactagtactgagtacatactgaataaggcactattgagttacctctttcgtgttgctcccctgtgttagatttctaggtgtacagaccgtcg

SEQ ID NO: 559967 - DNA, 162 bp, Homo sapiens
cacgaggctttttctcaaccctgactttcaaatgggctttccaccctaggacaatcatgctggatttgcgcttttcttttgaggtttccctggccctgataatactaaggggcttggagacctttgggccacatcactcctttcattgcggttgtctctgct

SEQ ID NO: 559968 - DNA, 799 bp, Homo sapiens
  misc_feature (40)..(40): n is a, c, g, or t
  misc_feature (80)..(80): n is a, c, g, or t
  misc_feature (116)..(116): n is a, c, g, or t
  misc_feature (767)..(767): n is a, c, g, or t
tgagacagggtcttgctctgttatccaggctgctgtgcantggtgcaatcacagctcaccactgccttgacgtcccaggntcaggtaatcctcccacctcaacctccaaagtagcnaggactacaggcacacaccaccacccgtggcttacagatattgctttaatttctgaaaatatttaactgagaagtcatagtacctcataataggcaattttaacagatatattgatctgaagatatccttccatgtaaagcaatggtacatgagtatgataaggagaatgtatggaatgatattgtttcttagcaattaataatttataaaaacataaacagtaggcctgagattatacttgactataatacaccgatatatgaaattaaaagttatatttcacctattaactagtttaagaataagtactttctacaagtctaatgtcaaaatcattttcatgtatatatattataccacttcttattggaatgggctagaaggaagtactccattgcaataaaatataaccacaaaggctgagtggagtggctcacatctataatcccagcactttgggaggccgtggtgggtggatcacgaggtcaggagttcgagaccagcctggccaacatagtgaaacctagtctctactgaaaatacaaaaattagccaggcatggtggcacacatctgtaatcccagctactagggaggctgaggcaggaaaattgcttgaacccaggaggcggaggttacagtgaaccaagnaacggcctctgcactccagactgggagtctca

SEQ ID NO: 559969 - DNA, 841 bp, Homo sapiens
acgttacatgtaaattgtcgctacgatttacagtgaaggcacagttcgtaggggtaacagaccatgtattgggctcaagagcctgctcactggaaggcttactggaaaacttactggaaggatgggaggacggggttggtaatctatttgtagaaaacatattcagccctgcgcaccacagccagctggctgaagagctcacaaggcccgaaatgagccagagagagagatgaagcatgagaaatgagcaaagaacacccaggacatcatattttttggacaggttagcagtacatgaaaatagatggcgctctccctccgggactggcgtatccctgaataatcacgatgtctctcacttttatcagttttttctgagctcgcattgggggaatatattttcggctgcctgcaccatggtcacacgaatctattacgaccacgcatacagcgcttctcccctaacacgaagcttattaggggtcacggcccccctatttcactgacaaactcgctaccgcggtcaaaaaacagggtcccagcccacccatacgcggcccctcggcctcagccgtggaccccccgcgccgctcgctttaacggggcgtcaaggcatgactcctgttgcctgctttataaccttggtgcgctcggcgccgggacgggcataactaacccatacgctgcctcatcgtttttcaccgatatatcggttccctgtgaatgagatcctcgccgcaggccgggccggtcacgcatcatgacaaggtcttttgtgggtgtcttccttcgcttcctcccctggagtgccgcccgatcccggccgcgagccacgtggtat

SEQ ID NO: 559970 - DNA, 244 bp, Homo sapiens
tgaggccactctggacagactgtctaatgccggaacatcctacttccctacttgattcctcactaaccaccttaacttcacaccattatacatctccatcctctccagccccgctgagtgtgaagccactactctccataccacaggaggcgcaaactcgccacagccctccccggaaagcaagggcccacaaaaccacaaaaccactccacacccaacgcaccccagaaccagacccccaccc

SEQ ID NO: 559971 - DNA, 260 bp, Homo sapiens
ttactgttatttgcggattttgttttattttttgaggggaaaattctatccttatgacactattgcaaccaaattggctttcccattttggctttagtaggaataaaagacaatggattcccatctttattgctgtaatgtgttaagcattaaaggctagaaaaatctagtttaattgtttcaggtggaaagtattttttgagtttccaaattgaatgggtttggactaaacaaacaatcaactactgatgtttgcagca

SEQ ID NO: 559972 - DNA, 451 bp, Homo sapiens
  misc_feature (35)..(35): n is a, c, g, or t
  misc_feature (61)..(61): n is a, c, g, or t
  misc_feature (68)..(68): n is a, c, g, or t
  misc_feature (94)..(95): n is a, c, g, or t
  misc_feature (116)..(116): n is a, c, g, or t
  misc_feature (123)..(125): n is a, c, g, or t
  misc_feature (256)..(256): n is a, c, g, or t
  misc_feature (273)..(273): n is a, c, g, or t
  misc_feature (277)..(277): n is a, c, g, or t
  misc_feature (283)..(283): n is a, c, g, or t
  misc_feature (287)..(287): n is a, c, g, or t
  misc_feature (314)..(314): n is a, c, g, or t
  misc_feature (325)..(325): n is a, c, g, or t
  misc_feature (340)..(340): n is a, c, g, or t
  misc_feature (352)..(352): n is a, c, g, or t
  misc_feature (371)..(371): n is a, c, g, or t
  misc_feature (373)..(373): n is a, c, g, or t
  misc_feature (450)..(450): n is a, c, g, or t
tgcgagaggggggcgagagtatgagaggagcaggntggaaggggcttgttctgcgtgcgangggatcngtttttaaagaaatgggtgtggaagnngggcacggtggcgtgcaggcntgtgatnnnatcacttgtgggagggcaaggcgagcggatcacctgagatgcggagttcgagaccagcctggccaacatggtgaaacccgtctctactcaaatacaaaaattagctgggcgttgtggcgcgtgtcctagtntgtgtgtgaagtgcctnagtnaacgtnaggntggaggtgttaagggcggacagagaanccttgtccctnccgtggtcccctctnaatgcttccacnggggtgtctggcggtagtnangagggagacccccggtccttacagctgggcagggagggcaggcagggcgtgtgtaaccgggagcaggggtgttcgtnc

SEQ ID NO: 559973 - DNA, 306 bp, Homo sapiens
  misc_feature (1)..(1): n is a, c, g, or t
nttatgaatagcacctctggcctccatctcctaaagtgctgagatttacaggctaatgcctggaggtggaggccaaaggatcacttgagcccaggagttcatgaccagcctgggcaacatattgagaccctgtctctaaaaataaaaattaaaaaaattagcctagcatggtggtgcatgcctgtagtcctagctacttgggaggctgaggcaggaggatggcttgagccgagtaggtcaaggctgcagttagttatgaccatgccactgcacttcagcctgggcaacagagcaaaaccctgtttc

SEQ ID NO: 559974 - DNA, 121 bp, Homo sapiens
ttaaggacctacagtaagaggaaatctagacagagactcagaatagtgtctgagcgctcagtcagctttaaggcaggatggcacacgtgctgcggctcgtccagtgcgcacgtctggcgtc

SEQ ID NO: 559975 - DNA, 109 bp, Homo sapiens
gagctgaggaggagtgacgggtgtggtggaggaggaggatgttcacatgcagtcccaaagaaggtggggagaggcgtgtgggggtctggaaggggaggctgtggtgtct

SEQ ID NO: 559976 - DNA, 1047 bp, Homo sapiens
  misc_feature (172)..(172): n is a, c, g, or t
  misc_feature (343)..(343): n is a, c, g, or t
ggagagaactagtctcattttttctttttgttggttttctcttaaaaatttattgggtcctggaaaaaggagaggcaaactcctgcctcccgttcaaagtcccccaaaccctcaatgtattcccgtggccattgattggggacgggttcacagtactcaaggggagcgccangagaaaggccattgagctttgggccggagcgcataacggccgccccaaattattcgctgaacagcagcggggaacagcattcacaggcacatcaggggacatagagaccatcagtggattcacgaaatggacagctccacgaacaggtttggatcaatacacggcaaaagngacatatcgtgtgtcttgccacatcaaagtgaggagggtactgtgaccatccccgtggaattgcgtggcagacagcatgaggggtatctgcagaaatgtgctcttacacttatgccaccggagacagagatgccttttacaaaattagttacatacctgtgaacccgcgacctttcaaaaatcagtattgggggtggtgagaaactgaaagggaaagaaacagatatgatcggcctaagcagaggaagaagattacacttccagagaagtcgcggattgaagaattattcgcaacgcaagttgtttaactacacacacacaaggggagtagaagaagtagacatacacgttgccagtggaatcccagtattccgctataaagagaggcccaacaaaagaggggtagtcgcacgtgaccacaccaagggttgagacaagacaacaagaagacaagtcggacaaattgtagcagaacacagggcgcaacccacaaacggacgaccaacagacgacgcatgcactcccgagaaaaacgctcggtggaacaacaacgatactagaagggagacaaaggccctacaccccaccaggacatcatcaagcagcaacggcaacagagaacgaatgaagaattagaacaggcaccccccaccggatcagcaacacaacaactaatctaccacaaagggagcgcgaacagagaa

SEQ ID NO: 559977 - DNA, 1513 bp, Homo sapiens
ctgtctcaaaaaaaaaaaaaaaaaattaatgatggtcaaagggtataaaatctacagacaggaagaatatgttttatgctttttttggagttctgtggtacaggtgtggtgcctattactttaataagtggggtattatacattttcaaaattggatgtttctcattcacagaaatgtgtattttgaagttatggcattatgtttaactagcttgtgatttacctattcccattattggtattccaccaattttattgattattcacctttggtaaccccattacattttattaccaatttattaaatttggtcaattttaccaattaacaaaattttttggtgggctgtcttttataagaaattcacgatatttcgtgagtgaattgggctcaccattaatttgggcgcggaccattgggtcttatattaccgtgaccttacctccaattaaaccatttctatttaacagtgttattaccatagggtgccttaatctaagcagagtggttccgtgcccctctcctaagaacacctctcactatagtgggtgggaacaagcacaacaaccattgttaccctctgacattacacattgccccgttacaaaaatatagccacggtgccataggggtctaacaaaggtttctcacgaggcgccagtgtctcagtgggcgccaccatttaagcgggctcggccattgcatgtttctttcctacactggggttggggcactgtgcagcacggcgcagcgcacacggcgcccagtctgggtcccacttgtgggcttctcgcacggcttaacctctctctccaacactccttgcacctaccgggttgcccctccccccgaggctcacactttctcgcgcactctgggacacagtactgcataagcgtcatttaagggcaaaacaacgaggtttagaccgcctccttttagggaaaagagattcgccacttgtacatgcgccctagatgtggtagtttacaaattccaccccaaggtcacatcttaggtgggggcaacgaacactctgtcagcaggggtggtgcggccaccagcaacttctaccctcttgcacggagtgctgcaggagacattccgtgacaaaaccgactgctaccgtggatcgacgaaaaccatgtgtgtgtagcaaacgcccccaagccttctctacagactagatggataggcttccccagcagctacgttcatgcctgcgtggtccctgttcgtgtagcttgaccacaccccctggttgtggcccccctcgcgcgcgcatttgtactagcgacgagttccagccgcgctacatacgtccgctgtgtgaccccgccggctcaggcgccaagcgatagatccactgcgtcccggcatagacctcccccgggtgttcctcaccgtgggtcacgacagacactcttggttcgtccgctgtcactcactaccacactgtttccttgtgtggtgcgatggacgtaactactgcgagggagtatcgtgtggcgg

SEQ ID NO: 559978 - DNA, 368 bp, Homo sapiens
atctggtaatctaaatccactccttccacagtaccggatcctctctttaaccctccccttcgtgtcgcccccaatgtttaagatatgttaggatggtttgttgtgctgcctggagacaaggtgctacgatagatttaagtgaatacattaacggtgctaaaaatgaaatttctaacccaagacatgacattcttagctgtaacttaactattaaggcctttgccacacgcataagtagtcccatctcactcttgccatgcgtagcttagcccattgtcttatcggcacatgggtggacagggatctgctgggctctgctttaaacacacattgcaatcacggtctctcagggcaccgagcctcagaat

SEQ ID NO: 559979 - DNA, 421 bp, Homo sapiens
acgtcttccatattactgatcaaaggggaaagtcaaaaggaaaagttgagatttctgccagtccacagtcgggttgtgagcatcgtctggattcctctgagccaaagttcttgtgacagttaatacgcagcacagtaaaggctgtcatatatcgtatgcaccatgactcggaagttggccagagtctcattgctctggctgaggaagcactccttgaactcctctacagctgcttcggtttgctcagtgtcgatgaacctctgaagatctgctttgtattcctccacagaaaccgatggatcgatggtcttttccacgacgctctccagaagaacgcaaccagaacctgcatagcagtaaagggggagggcagcaagcaggaggaccataaccaccttcatgttgaggctgctgtgtttgg

SEQ ID NO: 559980 - DNA, 724 bp, Homo sapiens
gtaaacagcctgaggtgatctgtgaaaatggtacgctatatgcatcttggagccggagaaacccacgaaatcgatgcaaatcaagcaggttccaatcttcggtgttcacttgaagaacagcatcgtgaaactgctcaggccatcaagggatatgcatatacgaagaagccacgtaacgttcaatctggaaatgatgctcatcgttgtagcagaagactagtgtgtaccattccgatgttcccgaagggtgggagttggacgaggtgtgcgcaggccaagacaatgggggctggacacgaggtcggtgggccaaaaagaggtgctgaatgttggctgcacatgcattagaaacaagcgcgagagagtaatgcatgaactataagggtttagatgtagattctctggtcattgagcatatccaatgtgaacaaggcaccgtaatgatgcgccggctggacctacaggagctcatggtcggattaacccagtacatgagctctccctgacacattgagatgatccttacggaaaaggaacagatcgttcctaaaccagaagaggaggttggcccagaagaaatcagatatcccagaagaaactgaagaagacaaaaaacttatggcagcgggagtaaattcagcattaaagataaagtgtagattaaaacggaaagaaaatcaggacaaagacccgagggctataaggcagggatgggaagacaagg

SEQ ID NO: 559981 - DNA, 765 bp, Homo sapiens
aacctaggctagtacgtgcctcgtgggttaatcggccgaggcggatgcccgtacatgtcgtgtgatgtcgtctattgttctcgggtactggtgatatatcgtgggctggctgcacgccatcctgcctgctcctgtgagttcatgtgatacctacttatgatgtgatgaaactggtacacgtgctggggaagctcctgactatgatcgaatgccaatggctggatgtagaaatatcaagctagacctagtgacttacctcaatactgccctacctcctggatgggaatgaacaacgatcacccagagcaatgccatctatgcgctacatcgctacgcaagcacaacatgtgtggttgatgacttgaagaagaaaatgattcgatgtggacatcatagagaaccaagtaatggatttccgcacacaactgataatggctctgttacagctctgaccacgaaaaactgaagcctcagtacttgtgaagagctacctggacaactgaaacaattctccatagtatctgggtgaaattctcatggtttgccggtggaaaatgctcacctttgtggatatttctcacctatgatatcttgcgatcagaaccgtatatatgaccccaagtgcctggcatgagttcccagaacctgatgtgctatcatgtgccgttctgaggcttgggagaacatcgctgcctacttacagtctgatcagtactgcaagatgcccatcaccacacagatggccagtgggcaacaggctgatgc

SEQ ID NO: 559982 - DNA, 360 bp, Homo sapiens
  misc_feature (201)..(201): n is a, c, g, or t
  misc_feature (258)..(258): n is a, c, g, or t
  misc_feature (262)..(262): n is a, c, g, or t
  misc_feature (313)..(313): n is a, c, g, or t
  misc_feature (356)..(356): n is a, c, g, or t
gagatgccagacactagaagatgaagaagagatgtggtttaacacagatgaagatgacatggaagatggagaagctgtagtgtctccatctgacaaaactaaaaatgatgatgaagatgatgatgaggatgagataaggaagataccgttaccattgtcaaagaaagcaaaatttgattcataataatggcaacggcctangatcagtacctgttgaaaaaaactggtcttcacccctccccatactccacacaaagngcantggctttgtgaatgctgacacagatcaagcctttaccttgcttctgttatnagtgccaatcaatggacaggagaagggatatcatatattaggngctt

SEQ ID NO: 559983 - DNA, 552 bp, Homo sapiens
agggaggtgctgaattcggttgtccaaacagtgcctcaggtggaatgtgtctcctggcatatctcttcctgcttctgctatcttgctgatgcacgctacttggacaagtggccttgcaccttggaactgggcctgaggagggagaagttattcattcccttaagcgttcagaccccagggagaatctttcattcctgtctatttggttatagaaaaaaagggacaactttctcaataactacttcaggcatgacataggagtggcatgggcaccttcgcaaaataaaaacttaatttttggggtcttcttgagagacgggttggtatccatcgtgtcattgtagcaggagcatggtctggattgtctggcagctaactttagtttcaataagagttttaatggcttttattattagtgggataacacaggagagaaacaggaggaacccagtgatgaagattactggtcctaccagcattttaaatccccctaaattagagaaacaacctccttaaagatttgtagggccccaccccttccaggtttggact

SEQ ID NO: 559984 - DNA, 1438 bp, Homo sapiens
cagcctctgctggtctacgataagagacggagggaagggagaggaaggcagtgctaacaccatccaaatgatttgtttgaacattctttgtcctgcgagctcgtcgcttcagttggtgatgaccctgcttatgtaaacgcgatgttctctctgttgcccccgtagtggtagtgtgcgctcgaaaacctggttgacataatctctctgctgtgtcttgcctcggtgaaaagaggattgtctccaccgagggggaagttctcgggaaccttgcacaaatagatttttggggtgctcaagacacccatgtggtcttgcccctctgtttatgttgttttctttatttcgtcgcgcgtctcgtttggcctccctggtctttcgccccccgattgtgtgttatagtgggcgctctgctgtttgagactttgtttttctcccccgtcggtcgatgggagttgtctgtattttgctcctcgtgtctttgctaatccgctttagggttgggaggaatcctccagatgtacgctttttcggaaggtttgaaggccgttccactggagccccctttgtcgaaatacgcccccgtaacccgtggttgttaaattcttgtgggcacaacacagagagggaagccccccgttcgcctcgcgataaatttaggtgaaccgcccttcatattcttgttatgaattgtagctctgtctaatgaggcgcataatatgtttaatgggatatatagaataaatgtattgttgtgtttctcgccacaatgtcgcccttttttaaagaatcgcttgtttatagggtaacttgtttggggaaattgtgggaaactcttagaggagattgttgtaatttgtgataaaagagaaaactcgggaaaatattttctttggaaccttgttttgcctctctcgtgatgcaccacgttatttgtgaactcagatttgttataacaaactcttggaccacacgtaacacacactctgggggagcacaccactcttgatgtgataaatgtgaataaagagaaagatatctttaagaaggtgttgtgtctcaaacccaccacaggggtgcactcggaattctttcttctggagaaagctagatcccactaaaaagtgttcccctcggaggaaaatttggtgtcacaagattgattctcgtgcacgaacccacttttggagaaacttgctcccagacccagcttgcttataataataagtaggatatttacacttttccttgcttatagtacttactataatagcttaaaaaacctcggaggaataacttgacccaagaaggagttaaccctactctggagggtgggattttgggggaatattttgtttgtttctgttttctataaatagtgaaacattttgtagtaagtatttttctaattgaagagaataaagatttaaaccaagggccg

SEQ ID NO: 559985 - DNA, 691 bp, Homo sapiens
  misc_feature (1)..(1): n is a, c, g, or t
  misc_feature (6)..(9): n is a, c, g, or t
  misc_feature (11)..(11): n is a, c, g, or t
  misc_feature (15)..(16): n is a, c, g, or t
  misc_feature (28)..(28): n is a, c, g, or t
  misc_feature (35)..(35): n is a, c, g, or t
  misc_feature (47)..(47): n is a, c, g, or t
  misc_feature (79)..(79): n is a, c, g, or t
  misc_feature (92)..(92): n is a, c, g, or t
  misc_feature (124)..(124): n is a, c, g, or t
  misc_feature (141)..(142): n is a, c, g, or t
  misc_feature (144)..(144): n is a, c, g, or t
  misc_feature (158)..(159): n is a, c, g, or t
  misc_feature (166)..(169): n is a, c, g, or t
  misc_feature (173)..(173): n is a, c, g, or t
  misc_feature (179)..(180): n is a, c, g, or t
  misc_feature (197)..(197): n is a, c, g, or t
  misc_feature (209)..(209): n is a, c, g, or t
  misc_feature (213)..(213): n is a, c, g, or t
  misc_feature (231)..(231): n is a, c, g, or t
  misc_feature (233)..(233): n is a, c, g, or t
  misc_feature (257)..(257): n is a, c, g, or t
  misc_feature (260)..(260): n is a, c, g, or t
  misc_feature (275)..(276): n is a, c, g, or t
  misc_feature (284)..(284): n is a, c, g, or t
  misc_feature (286)..(286): n is a, c, g, or t
  misc_feature (327)..(327): n is a, c, g, or t
  misc_feature (329)..(329): n is a, c, g, or t
  misc_feature (333)..(334): n is a, c, g, or t
  misc_feature (345)..(345): n is a, c, g, or t
  misc_feature (347)..(348): n is a, c, g, or t
  misc_feature (351)..(351): n is a, c, g, or t
  misc_feature (353)..(353): n is a, c, g, or t
  misc_feature (355)..(355): n is a, c, g, or t
  misc_feature (358)..(358): n is a, c, g, or t
  misc_feature (361)..(361): n is a, c, g, or t
  misc_feature (364)..(366): n is a, c, g, or t
  misc_feature (368)..(368): n is a, c, g, or t
  misc_feature (370)..(370): n is a, c, g, or t
  misc_feature (380)..(380): n is a, c, g, or t
  misc_feature (403)..(403): n is a, c, g, or t
  misc_feature (538)..(538): n is a, c, g, or t
  misc_feature (547)..(547): n is a, c, g, or t
  misc_feature (577)..(577): n is a, c, g, or t
  misc_feature (585)..(585): n is a, c, g, or t
  misc_feature (609)..(609): n is a, c, g, or t
  misc_feature (650)..(650): n is a, c, g, or t
ngttgnnnntngggnngggggggggggnggggggnttgggggggtgnggggtctgttgtgtgtgggggtgcgcggcggngtccagttatgcnactttttctggttctgctcctcatttgtttgntttcttctttttttttnntntttttttgcttttnntgccctnnnngcgntttttnngggggcgggggcggcgnggcactgttatngggnctggtactggcaccagtncnggcactgccactctcttgggcttnggngtgggcgtcggggcnngcctgggncngggcgggggtccagggtccgatatcagcttcgtcccagtgncngggnncggcagctttntnngancngngcncgntgnnnangngggggcgganctcggccctaggccttggcttcncccgcagcctcagctgcaccttcaaatccgcttccatcgcctctcggtactgagctgcccattccttgggatccttcttttgtaccttggcaggcaaacttgaggacttgcgatcttgctggtctcatagtaagngcgcaggcnccagaagaactcatatggggggggattgcnattggggnctctggcatagtccaggtacttcnggttcacaaactcatcagtgatgagcttcttcacgtccccnaagagtgaatgatgtatcccagggggcaccaaacttgcgga

SEQ ID NO: 559986 - DNA, 430 bp, Homo sapiens
agccagatacaaaaaagtatgtattgtttgattcccatttatataaacttaaaatgggcaaaactaatctatggtgttgaaagtcagaattgtggtgtacctcagggagaggtaaacactgagaaggggcaccatggagtctgccagcttctggtagtgtgccagttcctaatctagggactgataacttgagtgtgttcattttgtgttcatcatactcttcacctaatcatttgtacacttttctgtaacctttatgttacattttaaaagaagttaaagagttatgttatagaacttaatgtgcattctttagaaaaattttatcctaaagaaatgtaaatttatagtcagttctagagcttatgatgtgtctttttgaaagtttgacctgcacctgtaccctaaaacttaaagtataataataata

SEQ ID NO: 559987 - DNA, 306 bp, Homo sapiens
cagaccggtaaagaccactgcagagaacaatgtctcacacacactcgttaattccaaccaccctgcaggattcctccatgtgcagatcaagactagactcagtgtttttgtgggttttccttctttctttctttttcagactgggtcttgctctgtcatccaggctgaagtgcagtggcgtgatgttggctcactgcggcagaagcaggaactcctgcttctgcctgcttcctgcttctgccccttctcctgcccctgcagatcctactgctatccttagccttggaaactgcaggagaagaagcc

SEQ ID NO: 559988 - DNA, 217 bp, Homo sapiens
ttttttttttgctgttaatcgtaccacaatatttttaagtacgtacaaagagtctgacatgtgacccagggacccagtttcacccacgtggtctgtttggccgccagtcttttgtctctctcttcagcaatggtgagtcggataccctttcgtctaggaatggaaagtccatggtttgttgcccttgccaataacaaagatgtgggaaagtcgaagg

SEQ ID NO: 559989 - DNA, 477 bp, Homo sapiens
gtgaattacacgagtcacgactgtagtgctactgctaggacccaactgagggtgctatcgtggaggttgcgctggaagggtactacaaggtcaagctctttgaccacgcgggagttccggctctgagattggcgagggggagaaactggatctgccttatggtctggagagggccattcagcgcatggagaaaggggaacattccatcgtgtacctcaagcccagttatgctgtgggcagtgttgggaaggaaaagttccaaatcccaccaaatgctgaggtgaaatatgaattacacctcaagagttttgaaaaggccaaggagtcttgggagatgaattccgaagagaagctggaacagagcaccatagtgaaagagcggggcactgtgtacttcaagggaggtaaataccagcgagcttttactacagtataagaagatcgtgtcttggcgggaatataagtctgtgttaacgg

SEQ ID NO: 559990 - DNA, 423 bp, Homo sapiens
gtggccacaacaccttgtagatgtgggaagatgtccacggtggccacagtaagaagcctttttgtggtctctaccttctgaaatagtacatgacgcaagaaaatgtccatgcttgtcacgacaaaaactactattccctggaagtctgtggtacttttgaactctcttaaaactttaccctccttgaagaaggtttcaggagaaagaggaggccctggaaactcttgataatgccctcagcactgcttccaaggagcgccagtcatatagaccatccctgagagaaacaagagaaaacgggaaattctgacttctctctacttcagaactatgagctattttagttggcatttttgcccccatccaactttttttggcttcgctatttaaaacaaataaataaaacagctgaaaaaaaaaaaa

SEQ ID NO: 559991 - DNA, 848 bp, Homo sapiens
gtcctcacatccaatgggttgcatacccatgaattctaaaacttcatcctctttgtccctttcgagttaacattacagccacagtgacctttcaaaaatgcaaattaagttactcttaaaactctagttaaaatacttgatgtacataaagtgcttagcaaaatgaccaactcatactaagtgcttagtcaaatgttagataagtattctccagaattgatgtcaattattctctaaacagtgcattcttgaacgcagtatggcagtcatcacacaatttaggaaccaaaaccagcatcttgctccaagctaaaaaaaaagtaataaatggtcgtctatgctatgttcgcccagggtggtctcaaactcctgtgctcacagtgacctcaccaactcattctccaagtggctgccattacagagcaaccacgcctgacttaaacaagatatcttcaaaggtaacatgcgtgacattagcaacatcgtcgctattgctctaaccactctataataatacaatccattcaagcacagtccaaagaacggctgttcctcactgaatcaacagcgcagatgtacccacagacagcgatgcccgacaaaatacaattactgcacttggactccaccgaaccctgataccaagaaccggcgaggtgcatacacggccgccaggagaaaaccaccgacaccacacaacagacaccccgacaacacacaagacgcggcgaaacacagcacccgaaacgcccactacccgaaccaggcaaaaccacacaaacagcccacacaccgacagagcgaccgaacaccgggaacagggcaaaacaaacacccgacccacaacc

SEQ ID NO: 559992 - DNA, 409 bp, Homo sapiens
agagcgcagatgatcgcagcggtgatgacatacctcagcacctatgctggatattgaggaacgccgggagtttatgcgcttccaggagccgctgttgaacactcgacgcataatttcagaaatatttgctcacggctgtaacagccgacaggaggcctcactctagtgctgtgtcgagactgaacaatccgttcggaccggctccactactgatcatgaggagtacaacaatgagcattacatccgctgctgctggtgccgccctcgcaatggccgctgattctctgttcgcgggtgtggacacccaggtaccagcggcagacgccaccgttcactgctacggagtgaactcctgcaaaggtatgaacgactgcaaaaacaaggaccacgcgtggcagggacccactcg

SEQ ID NO: 559993 - DNA, 122 bp, Homo sapiens
ctagaggatcccctccgctatcatcggcacctcgctattcatcggcacctacgctattcatcggcacctcgcttattacatacggcacacctcacgtactatcatcagtgcaccattcgact

SEQ ID NO: 559994 - DNA, 249 bp, Homo sapiens
  misc_feature (41)..(41): n is a, c, g, or t
aggacccaaactaccttattgcatttgaagttttacttatnctattataatctaagagcccacccaacaaggcactacacatagatgctcacactctataggctgcctgatcctggaccacctggggccctgattatgatctccacggggctgtcaatgactagggaaagctttttaagacccagcgatcatgcaatggctcaaccatggcgaatcaaagttagcataatgtcccagcaaacaatgtta

SEQ ID NO: 559995 - DNA, 691 bp, Homo sapiens
agcgggggctggttggagagcgcctcccagaccgagaaggtcggaggcagaagccgggaaggagacgtgctgaatgagcagtgaatctattactgaggaaaaccagaggaagcctgttgtagataggtatcaagttagataccgagcgtacatggcaagagctttcatcaggagactgcgttccgtaaagattctcctactagatactggctgcagaaattgcacgatcctcatggagtctaggagaatcctgcagacagaccatgggtcggagctgccacggtctatggcatcctcagaaactcaagcttggaaatcacgacgtggaccctgagatttctcacgtgaacttcaggatgtccagcttgcaccgaaggagtcgtgaccccatccaggctctgaggaaattcactgagctgtgccatactgtggctgaggcccgacctccactgccacagcagcaagatcctggacatgctggctgatggagcagatcatgatctccatgccccacgagctccagcgtcttagtcactgatgaacggtgctgcacgcagctgcacatgaccctggaggaccctgactacgaccaatacaccgacagacccaacgacacactcggcctcgtggctccccattcccacggaccaggacatatcattgttgcagcgactcagatactcgaccatga

SEQ ID NO: 559996 - DNA, 106 bp, Homo sapiens
aggtcccccacctttgcacagtggcacagcttctatccacctccaggatactccatgacagtactatgccatttatgactctcgacacgcgtgcatcagcttctaa

SEQ ID NO: 559997 - DNA, 292 bp, Homo sapiens
gatgcaggagctgagacccgagaaaatcgatgtccgtgctcccagagagttcccaaataacgtgttgctctctaaggaagggacactagccttcccgggtatatttacatgagccctccagatatattgatggtggattatgctccccaccaaatttgtccaatagggcctctatatgttcctgtgtcaacttaatcatttgtttgatattccacaccatctccggaatggcagggtccgcagccgaacgaggccgcggccgcggcgccggctcgggctccatgtccccgtt

SEQ ID NO: 559998 - DNA, 160 bp, Homo sapiens
cagtccatgtgtgagctgctggcccggtatcctgggccatggcatctgccccggggatgtggccggcactgggcagcccaatggcatgtggcggtattagtggttgggggccaaacatggtgcagagagacacagggtctagggttgatgggcatcaagg

SEQ ID NO: 559999 - DNA, 394 bp, Homo sapiens
  misc_feature (97)..(97): n is a, c, g, or t
  misc_feature (285)..(285): n is a, c, g, or t
gcaacccggacgatcatcgtagcgccgccttttcggactggctcaaggccgaatgcgtgcgattcggcgaagaccggttcgcgcgtgctgtcgaagnggaagcggcctgcgtaacgaccgccgccggggggaggctggatcggagtgcgaaaattagggctgaaggcatggccgcaaactacagtttgccatccgttggcctacgaatggcttgcgcgtggacagggcccggcgccttatctgagcgaccagataccccagattcgcgatcaacaggccgaggcnaaatccgcagcccagcaacacataggtttccatttctttgcctcttgaaaacgtgggcagcgcgattgttcggcattcagcgttgcgcgttagttaaaagccagttcac

SEQ ID NO: 560000 - DNA, 974 bp, Homo sapiens
  misc_feature (177)..(177): n is a, c, g, or t
gcatttactctgacctttcagaccggctcggtgtccatgcagctccgatgagtctgctcacttcccacagaagtcactctacgttatgaggagtgcaatactgagcaagatgaagctgggcgtcagcgatagctaagacgtcatcgtgtgcgcgactcatcgactccgtactcatcntagaagactgctggtctattggctcacctcgagtcgagacagcgcgacgggttgcgatcttgatgcttccctcctatattttgcctagtattcagaccttagaccagagaaacataacgctacagatcacccaagattttagctagtcgagtattctcacatcagagcttgtcataactcataagtgtacttatatctgcagcgaattacatcttgtcggaggactaatcgcccgcgatggtgcctgcactccacagatgtactgccgggaacttaaccccgctgagttgttgagttcccaatcgcagcgactgcatacaacgaatgcacgtaattcgactactggttcatgtgtcgtcaagtagcattatgtacttgcatgacatcggaagtcagggtgacatgaatatagttgagactccctattcgacttgcattgtgtggaagaaaaaggcactttcccggcatttcaaatacggccgcatgacagtttgcgtgagaattaagatgccgtaaaggaattgcacacatgccgcgaataagaccatcgcgtcgggttcgatgtagcatgaataggtggtgtaggttgtctccccgcacggacacgcattacaccaggatccattccggcaggaatacaccggtgatggcgatcatggggactgcctaagagaccgatcccttgggcccgtgatttgtacgccccatgctcgctgcgagcacgacttgggtttaccaggggccaaagacctgcatgggaccctcccaatgaagtgtcccagcggaaaggttaccaa

SEQ ID NO: 560001 - DNA, 125 bp, Homo sapiens
tatttgatggtccataagactttgtcaaatgtaaacctacagtttgataagctttaaaataccatgttgacagcattttgaattgtttcatagacgtacttatttaactgatgcgaacattcaca

SEQ ID NO: 560002 - DNA, 324 bp, Homo sapiens
tcctggatgtatgtcattaatatgatccttgggtcttatagaagtaggtcaggcatatatcgtgtgatatccatgctcagctcatctatgaagacatcttcctcattgattgttttgccccttgtcaaagttgctgggtacatatatggcgtcactatacttctgggatatcagaagctgctaaaaacggatcacggttccgactgagtctgggattttggcttgttgaccctcctaggtgcctgggaattgcaaacagctttctggatgaatatctggagctcaatattgccaagaaactgaggcggcagatccccaggtggg

SEQ ID NO: 560003 - DNA, 157 bp, Homo sapiens
  misc_feature (16)..(16): n is a, c, g, or t
gtgctggtgctctcgntggctgccgatgggggcgccctgtctctggccgaggcgagccggcaagtttcccgggaccctcagagttgcactccgacagactccagattccgagagttgcggaaacgctacgagggacctgctaaccagtgcttgcggg

SEQ ID NO: 560004 - DNA, 193 bp, Homo sapiens
atcttgttaggagccgaaggggatgctgagaggtccacagtctcccaatgccagcagagtctctggaggctgctcttgagagcagtctgggtcttcctctgcgcaggattgaaccctatgctagcatgcttcgagtagatgggtgaggatggtagaatgagctagtcggaagaatctagtcctgaaggactac

SEQ ID NO: 560005 - DNA, 1134 bp, Homo sapiens
tcgtggcaaaggatttataagcatcaaggccattcatgaaatatgtctctttatcaacaacaggtgaaggaaggaaaaatattgagtttcagcatgtgttattttataagtgtgtgcaagaggaatgtgacaacttcagcaagcgtgttaaaaaagtggcagaggagaacggggtaataacagaagcaagtgaagactcctggatgtccccaaggcacaccctagcggccagcagtctgggtttctcccagaaatcgagtttacagactttgctcagcctggcgggagggcccaggatcatgcaggaagaaaagggaatacgctggattctgggaatgggtcattttaaagacgctttaagtaagatgggttccatatcttacacccaagtcttggccaaccaaagaagctatcaacgtgaacagttcaaagacattccggcacaggaaagcagggaggaggcagcggaaaggtacctatgagcagcagggcccgggggcgctggccacctccctggtgcaccggataccctcccccgaacccaagggggttcatcttacagtttccccaccttgcagcagcagtgaggctcagagtacacccaaactccatacatccctcgggtcataccctgcctgtagagggggctccgcatacctaacaaaggccccacaaacgggtcgaccaccgctgggcacgaacaaaaccgttgcgtcctcacatgtaataacctctgcacacgcctggaaacacacccacacacggaatggcataacgcaaaccgcgctggcaagaaccagaattggccagaaagcccgtgcaacccctcaaggccccctcaccgaaaatagccgccgcacaagtgaaaccaaatcccagaaaacaccgaagggaccctggtacccgcacacaaggcaccgggcgcacgagtgacaacgcaaacagcaaagagacgaaccaagggacagagaaacagcgaagacaaagaaacagagacccagccaacagcacggatgaaacaccaacagccacacaacgacaacaacgcacaaaagatactcccacaaccagaagaacatgcgacgaacgacaaagcgccatccactggacgacagctaaccccattatgaagca

SEQ ID NO: 560006 - DNA, 104 bp, Homo sapiens
tcaatgaatcacacactttccggcatttctaagccgggatgacattggcatcatcctcatcaaccagtacatcgcacagatgtgcggcatgccctggacgccca

SEQ ID NO: 560007 - DNA, 274 bp, Homo sapiens
gactctgaggatccccacgcgagggccaaaccgtaagctggagactgtgtgaggtagtctcagcagtggcgatcgaagaagtgaagctgggagcactgtgtgaggtggtctctgtggtggtgatcacagaactggagctcagaggaccgtgtgaggtggacttggtggtggtgatgaaagaagtgaagcttggaggactgcgtgagggggtttcggtgatggagattgaagaagtgaagctgggtggactgtgtgtggtgcctcggcgtgtgca

SEQ ID NO: 560008 - DNA, 145 bp, Homo sapiens
tgccacggagcgagacatctcggcccgtggcatcgataaacaccggtggtatcgatgagatctggtggttatcgttgccaccagccgctgcacttcatcatcaaaagttaagtcagcatagccagatagaggaaagtctttccgg

SEQ ID NO: 560009 - DNA, 335 bp, Homo sapiens
agggcttgaccatagaggatcccgtgatgttatcgcccaacactttgggaagccaaggtgcaaggatcacttgaggccaggcatttgagaccagcctgggcaacataggagacctatacctacaaaaatatttttttaattagctaggcatggtggtgcgcacatatggtcccagctactcaggaggctgagatgtaaggattgcttgaacccaagaagttgaggttggactgagccatgattgtgccactgcgctccagcctgggagacacagtgagatcctgtcaaaaaacaataaaaaattttaaaaaaggaacatctactatgtgctaatt

SEQ ID NO: 560010 - DNA, 240 bp, Homo sapiens
ccagatcatgcactcattcaatgcctgggtgacagaagcgagactgtctaaaaacaacgaacaatgcattgtactatgatatggtctctagcatagcaaagttgggtgtagattaaccctgtgaatcattggaaagtttatcaaataccttaaatgctgttgcaacttattcattccctggttatttgggtcaacaagtacagcgaacagttggctgaactttatcgtgaactattatca

SEQ ID NO: 560011 - DNA, 232 bp, Homo sapiens
gatgccaaaaatcagagagacagaggatggatggtgtctgtcagacacacacaggtcgccagtgacattcacacacacctcatgtgagaaccatgccttaaaatagtgtgtcctatttcatacactgtacacacttcctcgataaagtaatgagatttacttacacccacacagatcctgacaaaaaagcttcaagtcatctaccagcatgctcggatatgccattcactga

SEQ ID NO: 560012 - DNA, 237 bp, Homo sapiens
gccccttgtgatattaaagagccataacaaattatctgaatataaattatcaataccaggctgggcacagtggctcatgcccgtaatcccagccagcactactgatgttttaggccacgttgattctttattgtgggggctgtcctgtgccctataggatgttagcaacatccctggtctctctacctactagatggcagtagcaccccctctatgtgtgacaaccaaaaatatctc

SEQ ID NO: 560013 - DNA, 180 bp, Homo sapiens
  misc_feature (40)..(40): n is a, c, g, or t
caacctacgtagcacaaaacttacccatttaaagtttttntttgttggtgtttaatatatgccacagctacttgggaggctgaggcaggagaatggcatgaacccaggaggcagagcttgcagtgagccgagatcgcgccactgcactccagcctgggcaacatagtgagactccgtctc

SEQ ID NO: 560014 - DNA, 1342 bp, Homo sapiens
gggcatctgactgtccatgcaagttaggaacggtcctgggagagaacgggaaagaacactcaagattatcacgcaaaatcgagcaatcactgcagcggggcttcggacgctttgactgacaatcctgcgaggccagctgatggcgactcactggctgcgctcgtggctgatctaggcacttgacgattcctgcagagcaagcgtcttcccttgcctcagaagactgcatgacttggcacgcgtgcaacccgagcctgggcacagcctgctcatctgctgctactcaccactgctggcagcacgcactgatcacagaacgccccgcgccccacactccgggcctgaccaggccacgcgaatgctggcccaacctgcacaatccactggaactgagcacgccgcacctgccactcactgcctagctcatgcgcagcaaacacagccccacaagcggcgacctattccctcctgcgaacgcagacttgctgccggccacatccccccgcaaacccatgcaactttagcccccagcatgaacagcgaccatgaaagacgccatgccacaccatcttaacccaccctattggcacactcacacattctgaacgagcaccacctcccgccacccaccccttggacgccccccacattctaacccacgtcgaacccccccaacaagaacacgacccaacccggcccgagcgggcgctgacccggtggcaagcgccccatccctttcaacagcatgacctgacacaggtagagcggacccacccaactcagactaccgatcaccccaagtctgtggcgaggctcatgacatcacccaagggaatgaaaacagaaatagaccggatccccaacaattctcccccaatcaaattagcctgctgaccctctcaaactcccacactaaccaccttcaatcacacgccccaccttgtatcccattaccaactcatacccctactgcacttataacaacgacacccaactcaaacgaacccaccgtcgccctcacctacgcataaacctccaagctgaacctcataccactcactcgctcgccaagcaccaacgacctcatctagaaccccaaatctcatactcaaccataccgaccctgcaccccacctccccacactacacaaaccaggccaggcggccggccccgaaggcccccgacccacccaacgccgtaaacgcacacgccacacactccgcacacagcatcacatacacaccacaaagaaagaaagcaccagacgaccagccactagcaacacacacagacacaacccgccacccccacagaccccaacaccaccgacccccccaaccc

SEQ ID NO: 560015 - DNA, 455 bp, Homo sapiens
  misc_feature (97)..(97): n is a, c, g, or t
aaaatcggaaaaatatttggggcgggggtccccctgttgcccccgccgtggaaggagttgccccttaaaaagttggtaacctttaagtgcttggcanggggtttaacccccaagaaggggttggttttttggttgaaggggttaaagaaattgccccgcaaaaagtactttttttgggttttccggggggagcccagcaggggccccccccctttttttttgacaagaatattgggggtggcacccaaggatttaaaaaagggggacccttttttttggatgggggggccaagggcccttccggtgggctttttaaaaaaaaccattggccggttgggggggtaaccccccccattttaatttttttttttttttgggggggggggggggcccctgtttttgagcggcccgcgtttccccccccctgaataaattccatgtttccccaaggggga

SEQ ID NO: 560016 - DNA, 391 bp, Homo sapiens
atctgctaacggcctatctgaagaggccatttttttctagctttcgcgcttactaataggactgagagaacataacctttctgctgcagcgctagcccattttcctcaaaattcttctctgcctacaaaaggcatttccgcaatgtccatagcgatgactttgaaaataggattctccttaattgcccctactgtacgctcaatgcagacagaaagactttggaaacacacattaaaatatttcatgctccgaacgccagcgcaccaagtagcagcgtcagcactagaagagctattatcaatgaggagctgcttaaacctaagcagtctgacacgtgagagcaagctgtttattactgtaagaagagcacttaccgagatcctctttatg

SEQ ID NO: 560017 - DNA, 426 bp, Homo sapiens
cgtcctttttttatttttaattttttttgagacagagtttcactcttgttgcccaggctggagtgcaagtggtctgatctcagcttactgcaacctccgcctcccaagttcaagcaattctcctgcctcagcctccggagtagctgggattacaggcatgcaccaccacgcccggctaattttgtatttttagtagagacggggtttctccatgttggtcaggctcgtctcgaactcccgacctcaggtgatgcgcccgcctcggcctcccatagtgccgggattacaggcatgagccactgtgcctggccctttttttttttttttttttcccaaaaaaccggtttttttcccgaaactgggggttctaacacctgttggacaaaaagcttctttttttggtccatgtcgtgacgaattggctat

SEQ ID NO: 560018 - DNA, 315 bp, Homo sapiens
cccttacctgtccacacaaaatcatggttgcctgctccacctaatggcagcccagcgcctgctgcgttgccggaataagccaaatcataggggcagctgcaagccagtcctcctgcggccgtggaggggcttctggtaaaacccaagcctgagccccagctgcaaggcggcccctcccctgcccatataggaaacctcagggacgcagggacttgatggccacctgaggggtggacccgccatcgtggaagatcagataccaccaagcaatttggagacagttcctgttgagaataaccaccgtttccatgaaaa

SEQ ID NO: 560019 - DNA, 194 bp, Homo sapiens
agagcccgatgtgggtgggatcaagcacttagaagttgctactggttcatttcattgcatgttctgatgggatctacttttcttttttctttcttttagaccaggtctcactctgtcacccaggctggacgtgcaatggcacaaacatgattcactgcagccttgacttccgcaacccaagcaaaccctcctac

SEQ ID NO: 560020 - DNA, 376 bp, Homo sapiens
gcagtgacggaatgggatggagtggattggagtggaatagggtggactgtttaggaatggaatggaatggaatggagtggagtggagtgcagtggaatggaatggaatggagtggaatggaatgaaatggaatggaatggaatggaatagtgaaatgaaatgtaagctgagattctgccactacactccagactgtgtgaccgagagacatcctgtcgaatgtgaggaatggaacggaatggagtggaatggaatggaatggaatggagtggagtggagtggaatggaatggaggggaaacgaaaggaatggaatggagtggaatggagtggagaggagtggagtcaaatggaatggaatgcgatggaatcgaatg

SEQ ID NO: 560021 - DNA, 2004 bp, Homo sapiens
  misc_feature (1815)..(1815): n is a, c, g, or t
aggatgacacaacaaagatcaactgccgttaggtactgcgtgtgcttgaagctgattgttgtcggtgtttcgctgcgttaagtaccttcgctcaggttgtgggtagcttcctgctctgtaggtgtgtcgtcgacgctgtgtgttgtggcaggggtgactcttcttttctctattccgtctttgggggaactaagccttgtctacttaccttcgtttgtggcagaggttcgacttgcgcgtgttttcgtggcgtgatttagtttgcttcctccgcctcctcttttgctgagtgtcttggtgcactcgcacatccctcaagtgatgatgtatgtggggggaataaagcccctgttgttctactcatttgtataccatactgaggggagttgtgtaggaccttgtcactaggattgatattacgagcgtaggcatgatcactagattaacaatggtggcgaatacgtacgggcgaagcagggccctacaataggtcgtgtggtaagagtaacctacgtcggctagactaactatgtgcttagttgatatacgaacaatagttgtttgacaaaagtataatataatagtgtgtgtgattgaaaagagtgtgccaaccaaaattgttgtttccgcccaactatattgatttttgttgtcgtgtggtgttcatccgccgctggtggttgcgcctatcttgtttgtgttgcttcatggcaaaggctcgcttcgtgctggtgtctggtgtgggatcagacatgccgctcagttttggttggggcaggtcctgcggtgtatggtcgtcgttgggtagattgttccttccctacctggtgcagacctattttttctgggtgggtgacatcaatgttgtggcgccaaccccacacttcgtggggccttcatcatatttgggagttgggtggccctcccagagtaatgggccttcgctccttgtggtgaatgtgaagtttgcatatactccctcctcgggggacgcaccacgcacccccacttgtgtgtgtggggaagagaatacatgttctttgtcggtggtgcaacagaaagagggctatcggatagggtgctgcatgtactcacacaggaaaatgtataattaaaaggcccaccactgtaatagagggagaacacttggcggttggtgtgctccttcactgtgttgttgttgtgaaaacctcctccccctgtggtgaatgagtttgttttggggctttgtttggtcccccctgcgagggtattttctcccctacggagctcccaacagctctctcacgagactcagcacattgtgtatttgcgcgcaacagggattgtcatcacacttttataggtttttaagtgtgaatgttgaagttgggatatagattagtgagatagtggagcgccagcagcacacagagagggaaaactccacatatgtcgtgcacaagtgtctacctgagatgatgagagtctccccctcgtgcttctgcaaggtgcgcacatgtaagggagaatgcgtcttctgtctctcacttgtgagatagaatatgtctgacatttattgaggtttatagagaggggtatcacagtatggtgtgtgagaataaacctgtgtggccaccttgcgtttatgtggtctcaccacatgggcgttctccaccgtgctaagcgcctctgagggtgcccacgctggtctccacccctggcggtctccccgctgctgtgggtggtgcttatggtggtggttgtgttgtctccgctctgtctcactggtcctgttggtgtgtgtgaatggcccgagttaaactataagggtgngttcagagacacccacattgcgcctgctctgttgatcattctctgtggagacacaccacaggaattgtgatagattggtgtgaattggtggtctctactctttgatgtttgtttcaattttgttttgaaaatttaagtaatgccaaattaaagatatgcccgtttaataaacaaaaaaggaaaaagtaa

SEQ ID NO: 560022 - DNA, 690 bp, Homo sapiens
tggaacaggatcggctattatggtgtaatttatgacacaactgttccatgaatggcaaatgaagggttaaacttcttatacgcgagctaaccaccaaagaatctccagataacactacaggctctccatggtgcacactcttccccacgaaatcactgtctagagtctggtccaaactggcgagctccaaattcctggtccatggcgtctcggccctgctgcattcacaagcactgtctcaaatgctcattctacccaccaacgcagggttcacacacacacaacactggggtatccaaaaaatataccacgaaagtccacttctctcccctcgtaccccctctcgggttatcaccacatgcgtctattcactgaattctctgcgtcaccttcaggcaccctctgggcaccaagcgttactcggggtcccagcctataacaaacagggacacagcacacgtcaaacacccaatgttaccgacccgttttaacatctccaccacgagatcatcaatcaagaggccctttttaccacccgaacctaaataagttgcacccacagggaaggacccattatctatccatacccaccccccacctttatcctcactacacggccaacatccggcgaacccgttcgccccaggtccgctggccaccggcaccgcaccactcaccacacacgctgca

SEQ ID NO: 560023 - DNA, 341 bp, Homo sapiens
  misc_feature (35)..(35): n is a, c, g, or t
cccttcatgtaccgggactcaacattccactctcnggttagacagattatctaaatagaaaatcgacaaaaaaacattggatttaaactgaactctagaccaaatggacctaacagacatttacagaacagtttatctaacacctacagactatacattcttctcatcagcatgtggaacattctccaggatagaccatatgttaagccacaaaacaagtctcaacaaatttttaaaaattggaatcatacaaagtatcttctcagaccacaagagaataaaactagaaatcaataccaagaggaactttggaaactctacaaatacccggtacatgcaag

SEQ ID NO: 560024 - DNA, 464 bp, Homo sapiens
  misc_feature (14)..(14): n is a, c, g, or t
  misc_feature (29)..(29): n is a, c, g, or t
  misc_feature (42)..(42): n is a, c, g, or t
  misc_feature (61)..(61): n is a, c, g, or t
  misc_feature (90)..(90): n is a, c, g, or t
  misc_feature (384)..(384): n is a, c, g, or t
  misc_feature (449)..(449): n is a, c, g, or t
aaagtcccccaaantagcaaccctaaaantccatctgctcanggccgggaaaatgtgtaancttcccttggatcagctcccaggcctcanagcacgggagcagtgacccagtaaggaaacgtccactgctgtgcctttcctgttggaaattgttccgaaaaatacagtgaaactggcccaggccccagtagctcatgccctgtaatcccagcactttgaaaggctgaggcaggcagatcatttgaggtcaggagttcccagaccagccctggtccaacatggtgaaaccctgtctgtactaaaaatacaaaaattaggcgggcatggtagcacgtgtctgtaatcccagctcctcaggaggctgaggcagaagaatctcttgancctgggaggcagaggttgcagtaagctgagatcacatcattgcactccagcctgggtgacagagncaagactctgtctca

SEQ ID NO: 560025 - DNA, 398 bp, Homo sapiens
actctagaggaccccgcgacactcttggttattttctgtctggaaggtctatccattgctgaaagtggggtattgaagtctccagctattactgtattgaagtctatctctctctctttagctctaataatatttgctttatatatctgggtgttccagtgttgggtgcatatacgtattaggccatttttgcgttgttataaagaaataactgagactgagtaatttatcaagaaaagagttttaattggctcatcgttctgcaggctttacaggaagcatggtgctggcatccgcttggcttctagagaggtctcaggaagcttataagcatgggcagaaggtgaagggggagcaggcacatgacatgctggaagcaggagcaaccaagagtgtcg

SEQ ID NO: 560026 - DNA, 215 bp, Homo sapiens
attttaaacctaaagtaatagtgaattcttcatttttaccagagttcattttaacatgtttgtttaggtttactgcatcacagcaaccaccccatttggcttataaggctcggttacagcttgatgcaggaccccggggaaggcgatgggtctttgatttgtcgtaagtgatcaacaatggactaaaggatttatgggcatgctctcaaatctgg

SEQ ID NO: 560027 - DNA, 380 bp, Homo sapiens
  misc_feature (128)..(128): n is a, c, g, or t
tactaaaaaaaagtgtgcaaaacttctgccactctcacctgaggacacatgcatttgagaacacggactctgtcacataaacggtgctgcctaaaacagtatggaaggcgggaaggaagctagcaggngttggaattcattttgaaaaaagattgttttgttagaaaaagcaaataacaaaaaagcattagaaagtgggagccactgcacagcagtagcctagagactggctgcgatatggtagctctgccttgatatcatcttcgtgtcttcaggcatagagaaatggcagaggagcagtaagaccccacaggagatggccagaggatccaccatcagccttctggggactgaggaggtgatcttagtggaattatttt

SEQ ID NO: 560028 - DNA, 924 bp, Homo sapiens
  misc_feature (924)..(924): n is a, c, g, or t
gtacacttaccagcctggtgtggggcttgtcatcgtataaccataaaactgtgtttccaaaagagctctggtcatcctggctaaatggagcagaggaaatgaagacggcatccctgaagaatgtcatgtaggcgagctgggagttagggtcaccagttgcgaggccgtggctggaacagacccagatacatgtgtagccgtgatggggacatttgtcctgatgccagccttgatgatgcttaaaaagaggtgaccatatgatgtggtggtctaccaggagtaatctgcgcgcacagattttatctgaggtctgctgctgtgagaggagacccctgcaaggagcaggaagaacgagaaggagcctgatagaccgtcgactctgtgctggtcctactgctctgtttggctcactcaacatacgtgtttggaacgtaaggttacaacaaaaccctcttgctagaggactagcaatgattgaatgcaggtcatagacctactctgagaatcgtgtggaaaaaagacgggctgattcttacaagccggatggcctgggaccagcttcgagttatgggcatgcagttgttgagcctgaatggcaggcggtcgagggtccaagtgaaggctcccagtgccgtaaggagtagaagcggggagtgggagactggtagagaagaggaggaggaaccgtcccagtgtcgcctaagcaaacagtgagggtaagtgttagaagcgggcgctaaattgggggaatgggagtgcacacaaggattttgccaaggtgtaaatttaccggtgtgaaaaaggggttgtggcgcaaaaaaaaacagggtgtggggcgaagaaaaagtggggccaaaagtagtgtaagatattgtcacacgcgggctagtcttgcgtactgctttaattgagagagagtaggtn

SEQ ID NO: 560029 - DNA, 367 bp, Homo sapiens
tcgacctagaggatcccccttgcggcctctatatttaggtataagctctacatgactcctgagccaactgttagtgtgactggctcccctaggctggggcttgacactacgtgcagaagccatggtagttcagatctagatagcagagaagttagtctcattctaaaacattgcaactactgttagagtccaccccatgaagctgtcacagattgtgtatctttgactgaattactatcagtatcatctagttcagactaaaacaaatgttgctagctaacggtgggctagtggcctgtctcagtaggaccttgacagattccagctgtcaccctctgctgaccttggaccttagtgccacatgcct

SEQ ID NO: 560030 - DNA, 395 bp, Homo sapiens
  misc_feature (25)..(25): n is a, c, g, or t
tacaaaacagtggccaaatgaggtnaggtgacccaaaagcccaagtgaagaaactgaagaaagtgatgtgaaaggtactaaactagcccaagtgaggataagactaagaaatcacatagagtggctgggcgcagtgctcacgcctgtaatcccagcattgtgggaggctaaggtggctggatggcttgaggtcaggagttcgagaccagcctggcaaacatggtgaaaccccatctctactaaaagtacaaaaattaggggtggcacatgcctgtggtcccagctactcgggaggctgaggcacaagaatcgcctgaaccctggaggcggaggttgcagtgagccgagatcgcgccactgcactccagcctgggcaatggaacgagattgtctcc

SEQ ID NO: 560031 - DNA, 214 bp, Homo sapiens
  misc_feature (178)..(178): n is a, c, g, or t
ggatccctccaagatgaggaactgtgggacacaagagtaaaatcagaggacttcggtgcactgtttagatcctaaatctttgaatattagtggtgccttagaacgacggataggtaggagaacgggtgagacggaagtggagctgacggcgactagaacgggactgttatttcctggnaatacatcattaccatatttctcaatccttgggacg

SEQ ID NO: 560032 - DNA, 272 bp, Homo sapiens
tagctcggtaccctgaggagccgcgccccgcggcgaagcggcaggtgcgacacccgtaatcttcagaaattacccccggcggggctcctgcagttattgcttgccccagggcgccggggcgccgagcaggcggcccatggcgccgtgtacgcccagttcctccagtactttcagttccccttcggtttccaccatctcggcgatcagcggcaggtcgatgctgttggtggcgcggaaaatcgcttcgatgaacagccgcttgtcgctttcct

SEQ ID NO: 560033 - DNA, 138 bp, Homo sapiens
acccagtgaatgttactcacagccgttactcacaaatcaaagtgatgtggcctttgaacctcagagaggggggcttctagacacatctagcttgtgaacactgttctttgggctgttggttttgctgcctactaagct

SEQ ID NO: 560034 - DNA, 166 bp, Homo sapiens
ttcgtaagtgaggcagctccttggtctttggatctagatggtattccaaatcctttccttcctcgaggtgaagcaggaggactttatcgactggcttataatctttgagcactctgttgatgactagacttcctctggaataggtatccaaaccctggcaaacttt

SEQ ID NO: 560035 - DNA, 303 bp, Homo sapiens
cagctgctgctctttttaaggggtgtgcctcctgcattggttatccccacgaagttataaaggcaagggttccgggaaaagggcaccaagtacaagtcttttgtccaaacggcgcgcctggtgttccgggaaaaaggctaccttgccttttataaaggactgtttgcccagcttatccggcagatcccaaaaactgccattgtgttgtttacttatgagttaattggggacctgttaaaagaccgtactcagtaacaggccggaaaattgtgctttaaaaaaataaaactgaaaaactttaga

SEQ ID NO: 560036 - DNA, 207 bp, Homo sapiens
ccagggtggcaggtggtctgagtccgacataagtgatcggccggctggcctctagaagtttattttatttttatgatataggtgtacaaggtcaggatctagacttgttaccccaataagtagttattaagcagtgttgatggaaaattggtccttgcccggctgaattgaagagagggcggctttacagaatatcctgcattctta

SEQ ID NO: 560037 - DNA, 949 bp, Homo sapiens
  misc_feature (28)..(28): n is a, c, g, or t
tactatactctcttattactctctactngaaatgatcatactcaataaaactaataaaaaagtagaccacgaactaaaaaacttttgtttccctataattcttgttgttaataacccacaactgtgtttgattctccttctccacattcacccgggtactaacttcgaagtacacgccaatgtattgaaagaccctctctcttccctttgctcgtatgctaaccaccgtggcactcgccaactgttcttttaacactgcaccaagttttgctttaaacccgggaaaaagatacctctgtaaagcgcagaccaaccttgtttttcttcctgttttagggaaaaacagattgtccacggcgccacaaagtgccaaacaccccgtttaggcttctattccgaccccccagtagagcttccttttatttctcattcgggggaactaccccaaccccgttcagtaactgggccgccttaataattcatggtttagaagcaccgcaaaatgtattgaatgttaacaattaagacccccaatctgctgtaagtgtgtaatcctcccccccgtatcctaatattcaccatacaccctataaaaaacttgttgcacacattttcttaacccgaccagttgcagctacctatctacctcctttttctttatcagcataatacttcccccatagtgtggtctcacactgctccaaagaacacaaaaaagggcgacaacctcgactccccagcaacaaaaccatagtgggcttaaatgataacccactgattaacaaaggccagcatgtccacgtaagaagaatgtcgtaactttactccaccatttttaggtgaaaacaataatactctttcaattgtaccggcagaagatttaaaccacaactggtcacaccccctcgcggggttgtaaaaacaacgttttcaataaacggccacattc

SEQ ID NO: 560038 - DNA, 234 bp, Homo sapiens
aataattaaaccttttttttccccaccaaaggatgggtttaattaaaccatgtattggaaaaaaagtagcccaagtgttagaggtgggggatatattccattttagttaaaggacaaatttcccggattttaagcattcagtgggccgccaattttgattttgtggtgctctttacccaaaatattttttctttgtttttctttttttggggggggggggggaaaaaaaaaaaa

SEQ ID NO: 560039 - DNA, 1017 bp, Homo sapiens
tgaatattatactagcatttaggcatcggtcacttctaggaatactagtatatcgctcagacctcatatcctccctactatgcctagaaggaataatactatcgcatgtacattatagcgtactctcataagcctgcaagcacccagctccctgcttagccaatatagtgcctattgccatactagtcttctgccgcgcgtggcgaacgcgactggtgggcctaggcagcgtgacctagtctcaatctccgaactaccatatgggccgtagactacgtgacatgagaccgtagaaaccctgactcgcaatgctgataagacctcaaatcgtgcccgaagcgagaattatatatacgtaccactgtagcatgtatcatttccataaaaaccacatgaatgttgaagtcaaaacaaccacccacagtctcaagttattagcatcatcacctcttactcatttctttaaccaagatctaactaactaaccttatttgagctagttcgcccacccctatttcctccgaacaccccgtaacaagcctctctcctaaatgactcaactaatcctagactcctgacgccctcacaatcatggtgagctctaacaacctacttatccaagtagaacactaatcatgaatcatagatcttaactctgttatactaatactctctcacagaatctccttcgattatggcgtacacatgttcacgagaatgtactcatcatgtcagtctctggcttgcgaaaaacccagaggttatgcgccagctttggcgtatcagtccacccgatgacggcaaagccagtcctggaaggcctgtaatgcctggcatatcttctaagtttaaccctaaggggggtccctgtcccgatgcaacgggaaaatttcctgcacacccgtagtcgtaaactttggtagtcactctcagtggcggagcaaaatcccggactaactttttgaggccccaattttggaaggccctggggcctaacccaacgaaccacggaaagcg

SEQ ID NO: 560040 - DNA, 210 bp, Homo sapiens
ccgagcgccgctccggctgacaccgcgctcgctccgagttttcagggctcgtgctaagctagcgccgttcgttcgttctcccttcagttcgccatcatgatttattcttaccggggaccttaatcagccacggattgagaatgttctccgacaatctacaagatccggggagatcgcggacggggttgtgccttggaggtggaggggaaa

SEQ ID NO: 560041 - DNA, 238 bp, Homo sapiens
ataagtgagtgctcatgacaatggagcaatattctgtatcacagcaaaaatgtgaaaagctatggatgactaaagatctaacataactgttatatctttatgattaccatgagtactcaagtccaaaacaccctgtacatgcataatacgtggtttccccacaaacatcttgctttgtgcatgtcaagaaataacagaatacttctttcagattatctagcttcaggttgcagaaaag

SEQ ID NO: 560042 - DNA, 91 bp, Homo sapiens
agtgactctggcttctatctctgtgccagcagtgtaagttgggggcctggggatacgcagtattttggcccaggcacccggctgacagtgc

SEQ ID NO: 560043 - DNA, 833 bp, Homo sapiens
  misc_feature (58)..(58): n is a, c, g, or t
  misc_feature (64)..(64): n is a, c, g, or t
  misc_feature (66)..(66): n is a, c, g, or t
  misc_feature (76)..(76): n is a, c, g, or t
  misc_feature (79)..(79): n is a, c, g, or t
  misc_feature (107)..(107): n is a, c, g, or t
  misc_feature (109)..(109): n is a, c, g, or t
  misc_feature (120)..(120): n is a, c, g, or t
  misc_feature (141)..(141): n is a, c, g, or t
  misc_feature (159)..(159): n is a, c, g, or t
  misc_feature (215)..(215): n is a, c, g, or t
  misc_feature (219)..(219): n is a, c, g, or t
  misc_feature (242)..(242): n is a, c, g, or t
  misc_feature (257)..(257): n is a, c, g, or t
  misc_feature (262)..(262): n is a, c, g, or t
  misc_feature (280)..(280): n is a, c, g, or t
  misc_feature (298)..(298): n is a, c, g, or t
  misc_feature (331)..(331): n is a, c, g, or t
  misc_feature (353)..(353): n is a, c, g, or t
  misc_feature (391)..(391): n is a, c, g, or t
  misc_feature (435)..(435): n is a, c, g, or t
  misc_feature (470)..(470): n is a, c, g, or t
  misc_feature (478)..(478): n is a, c, g, or t
  misc_feature (556)..(556): n is a, c, g, or t
  misc_feature (660)..(660): n is a, c, g, or t
  misc_feature (686)..(686): n is a, c, g, or t
  misc_feature (717)..(717): n is a, c, g, or t
  misc_feature (720)..(720): n is a, c, g, or t
  misc_feature (751)..(751): n is a, c, g, or t
  misc_feature (809)..(809): n is a, c, g, or t
aggtgcggaaagggtggatgagcgcgggcggaggaaggagaagggggcggcgaaggtnggaatntngaagcttgtnttnacttgctttttaaaaaaaaaaaaataangntgcaaattgtnatttcaaatgcgaaaggatgnaggcataggcaaaatggntgctgattttagctaaagggggaaatcaaagctcgataaaaaactggattagatgnaaanatcatgggaaaaataaattaaanaaataaaggaaatcnatgtnctgatcgtggggcatcanatcctgtatgggaaaatnataaacctaaaaaaaccttttgcagtcattgtnaaaaaaacttctggggataaanaatgtaataacttggccgaaaaaatggaacccggtacntggtgacagcactcatcaaagacaagatattttcaaaacacgcnccaagcccattatcaccagcgtccccaagaaagtntgacagancctcggattttccctagagagcggccaactccttggactcgtgctccgctgccacctcgaggacggctcgacggttcnctgggaccacaggggggtcctgttctgaacacaggccacccactgggtgtgaactcggatcccttccttatggcggccggttctcttggtggaaatctgacccnatttccaaggacccatctccttttcnagcttcatcaggctcattggcttcaaatccngcncctttcccggctggtgctcgtgacccaagtntggcttcttttccaggagggatgaatccacatggcacaggtgcagtttctttccaaangcctgggtggcatctttggggcaa

SEQ ID NO: 560044 - DNA, 121 bp, Homo sapiens
tagtgattagaggatctgagtacatactcaaccatggattagatctgaaatggtcatcttcaaggatttaaagtcttactgagaaacagtgtgggaaccagaatgtattctagattaggaa

SEQ ID NO: 560045 - DNA, 294 bp, Homo sapiens
gttgttcagcgaaaacacttgcgacaacctcagctaccttgaacgctaccacgcgatggcgctgaacggcgccaaggatgccttggatgggcggattcgcgaggcgttcgtcaacagctccgacccggaactggcgatcgactggttgatgcactcgttgcagggcacttttttctcggtgtcggtttatagcagcctggatgccctggtgctggcgcacccggatgtggtggtggtgctcgatacccataaccaattgctgacccagcgtaatgaccgggtcgaagcacgctt

SEQ ID NO: 560046 - DNA, 251 bp, Homo sapiens
gttcgcagggagctggtctcgttgcaggggtcttacctggagctctccgagcagagtctagtccgagggagatccgtgagctcgcaagtataagacgttagtcccgggtacaggatgcgagccgagaggttctcattctcctcgccaggggcgatcttacgcctccacatcacatgctcatatggtcaggtaggcccagagccacacaatgtaattccggcagatgtagtgccgctcgcacagaactttct

SEQ ID NO: 560047 - DNA, 119 bp, Homo sapiens
acgcgattattatgaaccttcagaggcagagacacagcaagtggatgcacaggaagctttagctagaaggtgtttatgctatcgcctcagaaaatatctgtccgcgaattgtgttcata

SEQ ID NO: 560048 - DNA, 761 bp, Homo sapiens
tttggctttaaaaatatcttcaataataagacatcctattttgggggggtaggggtagagataaatatgaaacctttttttggataaaacccctagtaaggacatgttcccaggttaaaagtccatgaacatataaaacagaaaatggggtctccgtgcccaaccttgaagttgcaggattctgaggctcctaaactcgtggtactgaggatcgtggagtagagatctcgtggggttacagaacagctcaagttagggaggatcctccttagtgttcacaacaactacacgaatgcggaaggattctgtcccccaccaaagggctatatgctcggtggggcccattgtggacttgccgtggagagagagaaggccccagacagaaggccacatgtgggctccaggcatgtggctctcactggaggagggaccccaacttcttcaccacgcaaagagccccaagccaggagcacgtgggccaagccatgatatgacggcgccagaataaaaggggcgctatctggagcccagccacttgcacacttgggaggcccgcccatgtaacctgggagataccagaaataggggccaacggggtgggcaaacccagtgagaacacagaactccccatgggggataagagcagcataccgcgggggggagacccagccggccaaggatgtgccagaaatgcctgcgaaacaaacctgaaggaaccaaatcgccgaaaagagcggaacaggaagagaggagacaagcca

SEQ ID NO: 560049 - DNA, 188 bp, Homo sapiens
aggatcaaagcagcaggtgtagttatatcagataaagtagactttaaagcaacaatagtaaaaaaaaaacaaagaaagtcattacataataattaaaggatcaatccaacaagaggatattacaatcctaaatttacatgccccataactcatggagctcccagaattcatacaaacaattactattg

SEQ ID NO: 560050 - DNA, 134 bp, Homo sapiens
caactggcttgaccagttgaaatgcacaagcagagctgagattgcgaagagactgaacacaatttatagcacagatcatgcctttccgtgtcacaatgagcaccagacagcaggatggcgcatggcatgtgaag

SEQ ID NO: 560051 - DNA, 328 bp, Homo sapiens
  misc_feature (10)..(10): n is a, c, g, or t
attgatcaantgaagacatttaagtatttccttaacaagaagtctttccagaaacagtattaacatctgagtgtggccggagtgcaatggctcacacctgtaatcccagcactttgggaagccgagacaggtggattacctgaggtcaggagtttgagacaagcctgaccaacatggagaaacctcatctctactaaaaatacaaaattagccgagtgtggtggagcatacctgtaatcccagctacttgggaggctgaggcaggagaatcacttgaaccccagaggtggaggctgcagtgagctgatatccagccattgcactccgg

SEQ ID NO: 560052 - DNA, 1001 bp, Homo sapiens
ggagaagggcagtgaggaggatgacgacgatgagtgaagacgatgctgacgagtgaggctcccaatgccctgaccatttatgttacagtgacccatgcatgtgctgatgagagacagtgcagcacgccatgtgctgcgatggccattatctctgaccaatgaacagtgtgtaccaggcaattgacatgactccaacatgcatgttggcctgtgcatgccccactgcaggcacatggtgcatgaggccatgcgcagacaaaccacagtgacactgacagtgacagaatgtgacagccatacaacggctgacaaatgagcctaaccgacacacctggacgaacccatgagccgaaccgcacagacggagcaacaggcattgatcaccagtccgtgacgaccctgagatgcaagggacccagatggagagacggcagacggcaaccaagaaatcaccaaggccgatgcattcccgatcgcctggaggcctccatacaactaaggaggccccaaggtatcaactcaaccacctcaacagcctcagctttgcagaccccatgaggaaggccgccatctcatacataaccagacaggcccatgagccgccttcctgcagaaaccacaacagcggccataatgccaacagaccgaagaatccagtggggaccgagcaagcaggcaacctaccacccaaacatgcgcgtacagcgggacaagagaccggggaatggagtcccaaggcacagcggcccacaaaccatcagagacacaagacaacaattcccctcaaccctggaacaagcaggaaacacccgcaaccaccacaaacaccacagcagacgcagcagaataaacaaaaagaaccgaaacaaaacaccacacacaccaagcccagacagaccaaagacaaaataacaacaccccggcaaaaaaggagcaacgagcacaaccaaacaaaaacaaacaagacaacgagaaaaaaaggacacagaaagacaaacaca

SEQ ID NO: 560053 - DNA, 150 bp, Homo sapiens
gtgatgcttacaatggtgctgagttcccttggttaccatgtggtcaccttttgactacagaggttggggtgactcagttgggaacgccatctgagcggggcatgacctattgacggactccacgtttgtacctggatcaaagcaagaagt

SEQ ID NO: 560054 - DNA, 267 bp, Homo sapiens
tattctgggctttggcggtactggagtatgctcacagagatagggagataggtggccagaagacagtgtcatttaatttaatggagcataaatcatttggaaagaaaaaggcagggaatggtggtatgacagccaggcattatagatccttacatgcgacattttcctaaaggggtggagaaggaccggatcttggtccaccgtctcagtgacaaggcgtggagggacggggctcttcatatgcaggggcatcgaaaagggtaccga

SEQ ID NO: 560055 - DNA, 201 bp, Homo sapiens
caattgcgggagccatcttgatatgctgggagaaggatgtaccctgattccatggggagagggtacggaagctctgaattcccaattccctcccggatcttgccctatgtgcatcctttttttttctttcttttttttttttcttttttttttgatacagggtctcactctgtcatccaggctggagtgcagtggcacaat

SEQ ID NO: 560056 - DNA, 231 bp, Homo sapiens
ggaatcagcctctttattggaagggagggccaaaagggactgtacctcctgtctcaagaatggggatagatgggagggttttgaatccccactcaaaattggctcctttagataaagcctgatttcttaaacctggggcttaaactggattacccccatccgggggcaatttaaagataggactccctccttgaaccccagccctccattgaccaggcccccataaccacc

SEQ ID NO: 560057 - DNA, 287 bp, Homo sapiens
tgtgtgaattcccaggttggcctggtggacatgtcgtggctgtagatgtcgatgctgaggtcgtggggctgcctgtctgggttttggccttggcgtcacgttcggtcttgggtgtgccgccgcgctcgtcgcgttcgacggcggtgagggcgaattcggcggccagcactttggctgtctgcaacggtgagggcaggacgctgttgggtttggctgtcacgcgggattcctcatggtgtgccggggcgtaccccggcagacggcaagtcaggccttggcttttgccg

SEQ ID NO: 560058 - DNA, 470 bp, Homo sapiens
gatccgtcgacagcgggaaacatggcgggcggtgtatggcgagtgtcaagatgtccttgtgaatggctgcatccagcataaggggctggtttttatcttttatttttccaatcctctttccttctcaaggtgtccaagacacacagagccacggaatctcacaagtgtctgagaattcctcctccggggactctcagaggatccagaactgcagccgctcctcgcttggctgtccctgtccctgtccatgcatctggtcatggtgctgaggaacctgctcaacatccgggctgtcaggtctgactcccccctccacacccccacgtacttcttcctctccaagcggggcggggctgacatcggtttcacctcggccacggttcccaatatgatggtggacatgcagtcgcatagcagagtcatctctcatgcagactgcctgacacagatttcccacttgctcagacggg

SEQ ID NO: 560059 - DNA, 129 bp, Homo sapiens
gtcattgtcacccaggctgtagtgcagtggtgcattcctggctcactgaagcctccacctcccaggttcaagtgattttcatgtttgagcccatttatcttaaaaatacaaaattagtcagcgtggtgg

SEQ ID NO: 560060 - DNA, 315 bp, Homo sapiens
  misc_feature (5)..(5): n is a, c, g, or t
  misc_feature (20)..(20): n is a, c, g, or t
  misc_feature (58)..(58): n is a, c, g, or t
  misc_feature (68)..(68): n is a, c, g, or t
  misc_feature (79)..(79): n is a, c, g, or t
  misc_feature (91)..(91): n is a, c, g, or t
  misc_feature (126)..(126): n is a, c, g, or t
  misc_feature (145)..(145): n is a, c, g, or t
  misc_feature (147)..(147): n is a, c, g, or t
  misc_feature (159)..(159): n is a, c, g, or t
  misc_feature (167)..(167): n is a, c, g, or t
  misc_feature (199)..(199): n is a, c, g, or t
  misc_feature (213)..(213): n is a, c, g, or t
  misc_feature (216)..(216): n is a, c, g, or t
  misc_feature (245)..(245): n is a, c, g, or t
  misc_feature (247)..(247): n is a, c, g, or t
  misc_feature (275)..(276): n is a, c, g, or t
  misc_feature (280)..(280): n is a, c, g, or t
  misc_feature (306)..(306): n is a, c, g, or t
ggatntagagggggggatantgaggtatgatgattggggaagaggtttattatggttntaatgaaganagaggataagnagggtaagctgngtttaggatggatagtttgaataattttagtaggntctggggataagggttgtntntggtggtttagnaaattggntctggggtgaataggataagtggatagtggtnagagtataagaggnagntaagtaaaaaatgtggttgaggtatgggntnttattggttgatttgtatttcaaaaagnncaantatggggaagttaattaatgtttggnaattatgat

SEQ ID NO: 560061 - DNA, 286 bp, Homo sapiens
cgtttggtctacagtcagatattgcaaggctggtatcccgatggtccacatgtcaggcttggtcgatatgataaatcattttgattctagaggagctgcttttttcatatgaaacagagatcacactaaccggatttcaggccagtctcatgaaaactggaagatttcacagagccttgggtccacatttctgtgtggcattagagggctagaggttaatgagtcctcctctcctctcctctcctctcctctccccctcctcccctccattccgtactccccgccg

SEQ ID NO: 560062 - DNA, 221 bp, Homo sapiens
attcggcacagtggaacagtacaagacatgatgctactccgagaataccgacagctccaggaacagcagtccctactacccagcctctccccccaaccatcgcccctatccagcaagaagcagccagaggacaacggcgcccctcttctattacctattaaaaggctggaatgttaggaacaagttgcaccagaacccctccccacccgccccggtgttcc

SEQ ID NO: 560063 - DNA, 152 bp, Homo sapiens
gtggacatcacttgtgtgtccctggagtagcacttttaattcttcaagaactttccctttgcactcacaacttggctaactgctcaggacaagaggtctagctttcggtctgtctggctttgctgttctcactaagcataatcagagagatg

SEQ ID NO: 560064 - DNA, 152 bp, Homo sapiens
cgacttcatacccacggtgagagcgtcgaaccaatacttgagggagtatggggccggtgtttgggccctcagttgctaatggctaccgagtgggaagcggttcaagagacggggtgaagggtggttcacgcggttcttcaagtcctcaggct

SEQ ID NO: 560065 - DNA, 419 bp, Homo sapiens
tgccaaataagacacactgaaatgagagggagataagcacaaaaagtggcagagactacgaaatggatcctctctattaattcccttctgcacttccccaaggaagaactcagcaacttgaaagaaccaggtgacaacctgaagagacacatagtccacatctcatgtagagagcaagatctgggagcaagaactctccagaaggctggagttctactattggctctgccacttgttatatggctccagacaagttgcttttaccttcagtgccaatgtttcctcactctcaaagggctgttacataatttttttttctttctgtctctaaggtcatatactgagttcatgcgttcctttatactaattttaagagaaaagaaaagacttttttctaatatatcaaggcccactgaatc

SEQ ID NO: 560066 - DNA, 1132 bp, Homo sapiens
gtcacccatcagcaatgactcacctcctcccatgctaggtcagtaatattaatctaacgaaaggtctctcttaccatcagtgaggtcccattcaagagcgtcagaagttggaaaataagtgtctccctaaaccgcgcaatcggtcccgcacaaggaacatagcaatctattggagcttcatcgtccagtgtgataagtaaagtgtttagtgcattgaacaagagaatagctatgataggcagttggcgtactaaaagtgagtcagtataagtggtagaagtcatgttgcgttaaagaaggtgtaaacccataggggatttggctgcacttggagaacatcaggaatataggctaagataactaacctgaacttaggctacatggctctagcacagagcataagcatgctgaaatctgatgcccagtgaaagtgccagtagtacgagactaaagaagtgtacccctaggcaacacagcacaatgtcgagtaaaccgattgcccatggaccggaaacacatccagcaagatcaaactgacagcaagggagacgcaaaagatccagcgagactagctcaggccacgccgaaacacgtaaacgagccagacatgccccacagacttgcgatgatgactcccaacagctcacacgtccggctgcggccactaagccagtggagacacggaccagacggatacatccacgccagaaagcgggctaataaacaacaacaccccaggcacgggcgaattgagacaggaatcacgactacgagggaagaggaaaccagacggggggactcaacagcacaggacggaccacaacacgaggagaccacgccgagaccatagggcgcaggacactacacacgccgacaactaagacgtcaaagcgtgagccgtcaaccacgccccgcacattcacgaaaagcgtgacgcgtcgaacacccacaagatgcgccacaaagactcacccacacccaacaaacagtagacggccgcagcacactggagcacaacacgcgaggaaccacccgcagaaacgcacgccacataacccgacgccaggaccaaccagcagcacacccgacacagaggaacacaggcactacacagaggcagaacacaagaccc

SEQ ID NO: 560067 - DNA, 400 bp, Homo sapiens
ctcatctccctggagtggcaagcctttgtgatgccccttcgtggcccccattgtctggagcatctggcagctccctacaccgtgcccttgggaggttgcacggctgccctccttcctgtcgcagtaacggatggtgctgggtgggattccagcatgtgcgtgatggctatcccttcagctcagttgacaaagagagctcgccatcctctgagattatccttctaccctccatcctgttgagcggttctggccttcccaaactggttgtgatcttttgattcctctggggctgaagcagagcaagttccccccaggcaccccagttgtgggggagcctgtattttttttaacaacatccccattcctcagcctgggtctccatctcagcctgggtctccat

SEQ ID NO: 560068 - DNA, 137 bp, Homo sapiens
  misc_feature (15)..(15): n is a, c, g, or t
ggtgaagcccaatgngcgagaagcgccacgagttcgagtccggcatctcccaggctcttctgggagctcggagatgaactctggcccaccaaggcctcacctccagggatcttgaataattccggccaccttaaggg

SEQ ID NO: 560069 - DNA, 866 bp, Homo sapiens
cgagaggtcaagatagccactctcggttatcgctcttgctgctgtgcaaccatgcatctacgcgtgtattctgagatgccccggagctcgctctggctgtagccaggatgcgctcccaggccctgagtcttgcgctcattttcatcctactgtgattaccatcacatgccctgtgactatccaacctgtgtcaaaccgtagcgataccgctgcgcaggcctgagagaggaccactcctacacctgcggcgcgacgacccgtacttcactcgttacaggccgcaacagggttatgcgaccttgcgtgctcttgtgatggcacaatgaagctctgagagctatctaacttgctaccatcaatgccaactggcatacggtaagccgcttgggcaggcctttattcacatgcgccgtggactgttggtactatccattacagaccgaacgctcgcgttgaaacgtttcactagtaacccatctgggaccatcgcccggtccgaactacgcgactgcacgtacataattgtgagagacacctagtgggaggatatgccgtacccttattccgcccttcacgcctttgcaggtatcaggagctctcctttgtcgcgacatcgatacaggacacacgtctcatatctacacagacgactggcgctcgtgtaacacatgacccgcatcactctagcgacacacgcccaacacagcggtattccacaatcgccagaatactgccttcccacagaacactcgtgaccagcacgtggggacatcatgacccgtcaatttaacctgtctctatttgctcgcctgcctgctgctataccgagcagcaagcccaacaagaccccagtgaatgcgcgtaaa

SEQ ID NO: 560070 - DNA, 240 bp, Homo sapiens
acatccacactcttttggctccaagaggcgccctgccaagcacaccctcctcctatttgagcaatacaattctaggctgcagcttcgagtgggccagtggcttgtgaagcagcccgctgcagatccctcgaggccccagaggttcagggctttgatgggtatgaggacccagtgtgagtaggtgggggtgacggggttacgttccctttgttgagccttagcaaggtaatggcgtatttt

SEQ ID NO: 560071 - DNA, 1616 bp, Homo sapiens
  misc_feature (1)..(1): n is a, c, g, or t
  misc_feature (1256)..(1256): n is a, c, g, or t
  misc_feature (1297)..(1297): n is a, c, g, or t
ngaagtcgtggatataaagagaagcccctcttctttgttttgtgggaataaaaatagcaaccaaccaccgctttgtggtgaaaaaagtaagtacgcccccccccccccctgttttctcccccaagaggggaggataataggggtcgccccccatttggtttgtgaggagaatatccatcgctgccccctagcgcagcgataaactattagtggggttgtcttctgccaacagcccgcgggcgataattttggtggggtggtccccccccccctcttcgcctctcgcatggtggttatatattgtggtgcgggcgctcccgcccccccccccctctacggtggtggtctacttcgtcgttattatgacctgcctcttctcctccctcccccacggtggatgatgtctgtcggccacacacccaccttcgtggggggccgcccccttccttgtagtgggccgccccacaatggagaaaacgcctttctccgcggggtgttgttctcctacaagggggccgcccccacacaacaaccaacacgggggggccgactacctactatcggccgcggccgcctactaactaatgacttttttctccctcctcgttcgtggagaaaacaaatattagttgttctggaggccgccaccggccgccgcccccccccacatgtgtggccgcgacacaactactacaactccttcttgagaggagagagtttgttctccacaacaggaggagagtcgttgtgatggataatacccgctccgtcctcgtcacaagaggataattatttggtggaggagagaaacctttttttcttcttggtggaggaagtgtccccgaagaagaagaagagaggaggtgccgcatgcgctcgcgcagaatatttgtccccccctggcgccgccacatcaggaggagccccaccgcgggagagaacacatcttctccctctccgccccctcctgtgggagggccccacaccacagaagagctatatattataagagcgaggacatcatcatattatcaccgtctctcgttgggtcttgtgtgcccacccgtggtgcccccccaccgcgggaggagagcccacttcgtgagtatctctcgtgtgtagagagagcacacagcacattttttgtgccccccgcgcgcgcgtgggtgtttttccccccgttttacaaagggggcccacccgagagatttcaccaccacctgtcccctcttgagaatttccccattggtctctcncacagcagagagagagaatcatatagagagagcgctttctntgtgagacatatatacccctcatcaggggcgtacacacacacacagagaatatagtatctcacaccccttttgtccacatgtccacacaccaccccccacgcgcttgagaatattgtgttcacattggcgtccctccggtgtttttcttttcacatcccctgtcccttaacacccgcggagattttgagatatacccacaaaaagagaggggcccacatgtgaaaccctcgggagattctttttctgactccccgcgggctgggcaccattatatttagggcacccccttccatacaccttttcctttacccccaaaaa

SEQ ID NO: 560072 - DNA, 202 bp, Homo sapiens
cgacctgggggctgtacacacaagagctgagggcccgggccctcaatactggcgagggccggggctgaaaacatgggcggagcggccctgcccacccatagagtgcgagcacgaccggaagcagagcagccggccagggctgagaggctcaggcggacgacaggcagctcaggatccggtccacccactgatgggccgaggg

SEQ ID NO: 560073 - DNA, 722 bp, Homo sapiens
  misc_feature (114)..(114): n is a, c, g, or t
ttgcttgctggtgaatcctcctgcccccgccttataattcttttggtgttggtggcgccaccccctttatttgcgcgcagggttgtattccccatctggtccgcgcgtttactnctggtattcaatatattttggtccccgcgggagtattttctcgcggctccctctttttgccgccgcgcggtagaatccacttcgcgcttgcgccccccaattactcttgtccgcctccgctgcgcttttgctatcaccactttctatccactgggtctatctatatttcttgtagcccgccgcccctcctcacgacgaccccccctccgggtgtcactctctgtgggtccactcccccttccgcaccacaagtgtctcgcgcgcgcgccaatgtatttcgcggcgctcacacacacacgttgttgtgtggagaccccccacggcgggctcccccagcggcgttctcagctgctcgctctttattggtgggcgccgaacacttcttccgccgcactagattggtgcttctcatacccgcccccgctctatagatgatttctccctttaccaccaccccacaaaccaccttgtgggtctttgatacccccccctcttatactcgcgccctttttttaaaaatatgtggtttgcactatagcttctttatattatttctccccatctctattttatatatagggtctcccataacaaataacaaaaaacat

SEQ ID NO: 560074 - DNA, 201 bp, Homo sapiens
ctgaaaatacgcgagggctcgggtcgatgatcggcatgtacaccaactctcccgggcgactcgcgctctggtcaagggccgcagtgtcgaccagcaatccttggcgactcgtgctcgcttgagagtcccgcgggttcgaccagctgtcccagtcttctcgggcccttgtccggagggtccgcgaggtcgaccagttctccg

SEQ ID NO: 560075 - DNA, 225 bp, Homo sapiens
agaggatcccagcactgtgacgctccgttgagcacgtgaggccacgtgccagccaaataacttattttaaagaaaaaaatatctaagccttactgaagaaattttctgtaggctgtaggttcgaaagctgtatttcactttatttacattaacgagatttaattacaagaacctcaatgttgagtgttgcaacgccttaaaccaagtgaggctcacacgtgctgt

SEQ ID NO: 560076 - DNA, 372 bp, Homo sapiens
tgccaaactgaggtgaaatgtagaatcttattctacttttcacttgcattttaaaatacaaattgaataaatgtttcctgcatttccatgaaaggcctgcttgtatcttttgcccattttttaaaaatgggttattaaagagtcctttaggaaatactgtaaacgtaacgtgctcctcttttccccagaaatgtttgagcctgccacgtgtgccatgtttgtgtttgtggtagaggagatgctttcatgattgagaagaagacgcattttatactcttttcccctaatgtaaaatttattccattaaaacacaaaaggtttgtaattaaaatattttttccctaaggttgttatataaagttactaatggaa

SEQ ID NO: 560077 - DNA, 136 bp, Homo sapiens
cacgagggctaactgagataggggacgggagattttgagggtttgcgaaagagtttactgatcgatccgaataaacgttaaatctgtggtcgggcgcagtggcccacgcctgtaatcccagcactgtgttaggcgg

SEQ ID NO: 560078 - DNA, 683 bp, Homo sapiens
  misc_feature (24)..(24): n is a, c, g, or t
  misc_feature (135)..(135): n is a, c, g, or t
  misc_feature (151)..(151): n is a, c, g, or t
  misc_feature (258)..(258): n is a, c, g, or t
  misc_feature (278)..(278): n is a, c, g, or t
  misc_feature (283)..(283): n is a, c, g, or t
  misc_feature (300)..(300): n is a, c, g, or t
  misc_feature (312)..(312): n is a, c, g, or t
  misc_feature (323)..(323): n is a, c, g, or t
  misc_feature (367)..(367): n is a, c, g, or t
  misc_feature (403)..(403): n is a, c, g, or t
  misc_feature (448)..(448): n is a, c, g, or t
  misc_feature (464)..(465): n is a, c, g, or t
  misc_feature (504)..(504): n is a, c, g, or t
  misc_feature (518)..(518): n is a, c, g, or t
  misc_feature (579)..(579): n is a, c, g, or t
  misc_feature (603)..(603): n is a, c, g, or t
  misc_feature (605)..(605): n is a, c, g, or t
  misc_feature (608)..(608): n is a, c, g, or t
  misc_feature (625)..(625): n is a, c, g, or t
  misc_feature (650)..(650): n is a, c, g, or t
ggaggggagatcctggattctgtnaaaagacaaattttcggggtgaagaggagccgccctgtgcagtgcgcccaaacttcagctcctcagtccacctccattctccctggacggcgggggaacaacagcctagcnaagggactctcctctnccggttcacatggccccagcaagtggccacactgtggaaggaagagcctctctgtccctccctggtatccagactttatctccaggtacagttgtccctggagaccnagctggagcatccctcccgncaagnagcgagtgctccggccnctcttggtaggnacacagactgncaactggaggatgacagatcttttggaagcatcttgtttcttgngaaatgagttaggacaggcctcatcctacggggganggttctgcatagacagatcagtgcctggctcccacctccagtggnagcagggaggatgggnngtggccaaagccaagtccctcctgcgctagacaaaagtnggggcagaacaggnagggaaagggggatgttctgcggttacaagtagcgggtgccaatcaaatcaagaccaagcnatacatgcacggggcaaatgccancnganactccagcacaaaaganattctggcttgttttattgtcattnaaaaacaacttttaagacacgattatctctgcc

SEQ ID NO: 560079 - DNA, 784 bp, Homo sapiens
gtcttcagttgagctacggtcagtcctgaacttcctgaagatgtccttgatgtgcagttggtgttccttcgacttctctccagccgagatttcaccagaaccgtcacagtagtcttagtggcataataatggcatggcttacatggtatcaggcgctagtgtgaaatgtaatagaaggccctgaagctgatggggtcgaatgaaggtgaattcaaggctgaaggaaatagcgaatgcaccctacacagttctggaggatggttgcactgaaacacatcgtgtgggaattggagccagaatgtgtctttgtaactatacgagaacatgcgaggctgtgagactatctattgtatgatattgtatcctttgatgatcaattggtggtcctgatcaagatattctggtgtggacagttggcacctgtttgcgtgctgtataaatccaaaatctatgcgtgagaatcgcacgtactgaatataagagagtgtgaactccatattgttgtgtcctccattggttctaatcttgtcaaagcagctgcaagtgaccgacacaaattccagttgtttatttccaaggatgttgggtaaacgagatataattatgacagagagaagaaatgatacgtgctctcttattggtgttcaaccatatactattgcaaaatgcttcaaggtttcatttgtatttacctaatgtccaatttgcactagatgtgtcaatggtgctataataaagtaaaacttcaacgactcgtttattgataacggcaactgtgttatat

SEQ ID NO: 560080 - DNA, 96 bp, Homo sapiens
  misc_feature (38)..(38): n is a, c, g, or t
  misc_feature (77)..(77): n is a, c, g, or t
  misc_feature (95)..(95): n is a, c, g, or t
tcaaaaaactacaaagggatccctggctctgggtgtgntatgaagacaactccctccccactcaccccagggaacangctggatgctggacaaant

SEQ ID NO: 560081 - DNA, 150 bp, Homo sapiens
agacaccctctgagaatcgactgagatcaatgggaatgttcaagcgaaaagcctgagcaggacggaccttccaagatgtgccagctttcctgtggatctcactgcagacagagcgtctgaggcccagcaatcacaactcagcagactggt

SEQ ID NO: 560082 - DNA, 131 bp, Homo sapiens
cagggggcctctgggagcatcttcagcaagttcacctccaagtttgtacgcaggaacctgaatgaacctgaaagcaaagaccgacgtggagacgctcagacctcacgtggtgaagcagtggcggcaacgac

SEQ ID NO: 560083 - DNA, 234 bp, Homo sapiens
caggaggatcgcttgagcccaggagtttgagaccagcctgggcaacatagcaagacctcgtctctatttttttttttcccaagacagagtcttgctctgtcaccaggctggagtgtagtggcgccatctcagctcactgcaacctcagcctccccaagtgccacaacgtccgactaatttctgtatttttagcagagaagcccatttagtgtttgagaaagagcctcatgtgta

SEQ ID NO: 560084 - DNA, 310 bp, Homo sapiens
tcgtttagggagtagagtttttttcgtgatagtggttcactggataagtggcgttggcttgcaatgattgtgaggggtagggagtggggatggttaaagggtacaaaaatatagttagacagaataagatctagtatttgatagcacaacaggataactacagtcaatatttattgtacatttaaaaataactgaaagagtataactggaatgtttgcaacacaagaaatgataaatgcttgagttgatggataccctacttaccttgatgtgactgttatgcaaaatacctatgtaactccctaaacga

SEQ ID NO: 560085 - DNA, 1516 bp, Homo sapiens
tgggaatgtggggctataggcagcctctctgatgcactctcttccatctctttccccaaggctccgtgactgtcaaactgggagtaggcagcagtgggacaatttaggcactgggctagcattttcagcaagcaaccatctcacaatatcctcattctatcacaatcttccgtctgggcaacaaggcagtggtttcttggctgcacatcactatctatagtgcatccaatggcagcaaaccaacaatcaaaacattcagctttcccagtgccagcccttgttatttcacacatgcacaattggagcaactacattggcgcagcacagcttgatatttgtctactactcaatgtagctatcccacagccctctggccctgtccttgtatgcacttactatggagtctacactgagagtgcatgaacttatcagtacttgaccatgtctaacagaacagggccaggaccacaggtactatgagatgcacgcatcgacccttgcaatattcggtcattgaccacgatggccacttagccagcccttattcacgttgcccctgtggcccaagtttgcgttcacagccaggctacacattaatcatgggacagtaggaaatgttcccgcgtacatgacgacgcgcgatattcacttgggccccaaatagatctacataattaagcacgtcccaacacgcgttgacacgcgcttgtgccaagctgtaacacaaggaatgcaatgggataacttggttcagcaggccattcggtaggaaccaaccaactttacacaaagaccgatgtgtgggcaccttcagatcgccacaactggctagccttttgggacaagctctactttgcacgcgtacgtcaatattccatttgtcccatgcgcaattgttcgccacttcaaatcaggccccccgctttcaatagatctcccgtcggcggccatattaagaccatgtagtacagacaacatatcggttcatttaaacggaacatttaccagatggacatatgtgcaccagagtttgatagcactattgaagtaaggggtataaggacggaaaccagttgataggagagtcatcccgataccattgtaagaaggattgaaaccgtcagaaatatatgcacgcaatgcacacacaacaacaaccaataaatgacaaacacacccaagaccacaaccgcaacggccaaacgacggcacaacatgagccgaaccagtgacacaaaaacagccccacatgagagcacgaacgaccccagacgcagacaaattcacaaacaccaacggcaccggacatgagaaccacaccaacccttacaacgcaagacggaacaaccgaacgacccgccgaaacaatagagaccgaacgatagacccgcggactggtaagaatcacagaaacaaccacacccgagaaacaaacaagaaccggcacaacacgaccagcaaggtagaacaaaaaagaacagaggcaaacaacgcgcgaaacgaaaagcaacaccac

SEQ ID NO: 560086 - DNA, 206 bp, Homo sapiens
ctaactatgtaatttgcaagtgtatatttagaaaaatttttgggaacaggataatggttaatattaaattaaaatcaaaacaagaagagtttgacctacccattcaatcacaatgaatatacccacaaaattgaagtacattcttaagtaatgtaagtatttttaatggtctaatctatattcaacatataacaggccctaagaga

SEQ ID NO: 560087 - DNA, 882 bp, Homo sapiens
  misc_feature (86)..(86): n is a, c, g, or t
  misc_feature (293)..(293): n is a, c, g, or t
gatagtaaatcccaagtaaggtacctgccgtcagcagatttggctttcttcttgacacctaatacccacagtcctccaggtacctncgtcggcagatttgagctttctccttggacacctaatacccacagtcctccaggctccagtagattgcaaatgacctgcttactttctgttcccgggctgcgttctgacacctgtcggatagtaaatcccaagtaaggtaccagccgtcggcagatttgagctttcttcttggacacctatacccacagtcctccagagttcggacncctgtcggagagtaaatcccaatgttttagacgcccagctgcacaacttgattgccttacaaatgacctgcttccaggatgcggaaattcctaatttcttctgtgacccttctcaactcccccatcttgcatgttgtgacaccttcaccaataacataatcatgtatttccctgctgccatatttggttttcttcccatctcggggacccttttctcttactataaaattgtttcctccattctgagggtttcatcatcaggtgggaagtataaagccttctccacctgtgggtctcacctgtcagttgtttgctgattttatggaacaggcgttggagggtacctcagttcagatgtgtcatcttcccccagaaagggtgcagtggcctcagtgatgtacacggtggtcacccccatgctgaaccccttcatctacagcctgagaaacagggatattaaaagtgtcctgcggcggccgcatggcagcacagtctaatctcaacatcttcttatctgttccattccttttgtagggtggtttaaaaaaggcgccaaggtcaaataagctcgtgccgaattcctgcagcc

SEQ ID NO: 560088 - DNA, 454 bp, Homo sapiens
tgtatcctttgtctattaaaaatacaaaaaaaaaaaaattagccaggtatggtgacttacacctgtaatctcagctactcaggaggctgaggtgggaggatcaccttgatcctgaagggtggtgagttgtagtgagctgagatcatgtcactgccggctagccggggtgacagagtgatacccggcttcaaaaaagagaaaagatgcataactttacatagtgtatcaggggatattatacgtttataaaaccatcatttttggggctcacggtgatctggcctgcctggggcctcccaaactttctggggtttacagggcatagacgctactggctcccgggcctcatttccttgatttttacgaacattgatttaccctctcaaatttatagaggagtacatagtctttcctccttggtattagatttacgttacctcagaccaaaggggaa

SEQ ID NO: 560089 - DNA, 929 bp, Homo sapiens
  misc_feature (86)..(86): n is a, c, g, or t
  misc_feature (340)..(340): n is a, c, g, or t
gatagtaaatcccaagtaaggtacctgccgtcagcagatttggctttcttcttgacacctaatacccacagtcctccaggtacctncgtcggcagatttgagctttctccttggacacctaatacccacagtcctccaggctccagtagattgcaaatgacctgcttactttctgttcccgggctgcgttctgacacctgtcggatagtaaatcccaagtaaggtaccagccgtcggcagatttgagctttcttcttggacacctatacccacagtcctccaggctccggtagattgcaaataacctgctttctttctgttcccgggctgagttcggacncctgtcggagagtaaatcccaatgttttagacgcccagctgcacaacttgattgccttacaaatgacctgcttccaggatgcggaaattcctaatttcttctgtgacccttctcaactcccccatcttgcatgttgtgacaccttcaccaataacataatcatgtatttccctgctgccatatttggttttcttcccatctcggggacccttttctcttactataaaattgtttcctccattctgagggtttcatcatcaggtgggaagtataaagccttctccacctgtgggtctcacctgtcagttgtttgctgattttatggaacaggcgttggagggtacctcagttcagatgtgtcatcttcccccagaaagggtgcagtggcctcagtgatgtacacggtggtcacccccatgctgaaccccttcatctacagcctgagaaacagggatattaaaagtgtcctgcggcggccgcatggcagcacagtctaatctcaacatcttcttatctgttccattccttttgtagggtggtttaaaaaaggcgccaaggtcaaataagctcgtgccgaattcctgcagcc

SEQ ID NO: 560090 - DNA, 337 bp, Homo sapiens
gaattccggctctctggggcggggacgctttatcacattaacacactttatgctgtctatgctctaggggagaggaccacttttttttgttggttgttgagacagagcctcactgtggcacccacgctacagttcagcggcttaatctgcggtgactagcacctccgccttccgggtgcaagcgatcactgccacctcatcctgcgagtagctgggactacaggagtctggcatcatgcctggctaattgccatattttttgtagagacggggtttcaccatattgctcaggctggtctcgaactcctgggctcaagttatctgtctgcctcatcca

SEQ ID NO: 560091 - DNA, 120 bp, Homo sapiens
caccaccacacccaccaacaccccaccacacacagccacccccaccaccacaccaccccccacaaccacccccacacccccctcaccaccccacccacccgccccagaccctcgacaccg

SEQ ID NO: 560092 - DNA, 642 bp, Homo sapiens
aatttacttgtattctaatcttctgatattccacacattctgtgcgatcatcgtcatacacaagcccttctgcaccatgcatgagtgtttctcaaggtacgtaccaagaagtgaaattcctggttcatatggcgtgactccgacatttttctccattcagccctgttgccctccagagatgggtgctccagctttgcgtacctaagtatgagagtatctgtagtacagtatgctctacgaggctccagtatttgataacttgagttactgctaggttgccatctttgatctatcatgtttgccgtgacctactacgactgtaattggtacagtagattcttgtcatctgtgtgtgaatttagcattcatgggcttaatgctgacaaggcccccagggtccaagacatataatcatgtataattttgtcaaggtataattttttaaattgcttttgtcatgtgtctgctggtgatgcccaacccagtgctctgcacccaggtcacactgtggctttgtcctctgcttatgcctgcatagcagcaactgtcctgaagagaccaaaattatgcagatttaggtaagtccatggctaatgttattatattatgtgctattgtaatggatggggctgtggagtgttt

SEQ ID NO: 560093 - DNA, 84 bp, Homo sapiens
cctgaaactcctgtatttgatgtttgttttcgatgaggttccatgttttgtttttttgggaataaattaatatattgttttcca

SEQ ID NO: 560094 - DNA, 814 bp, Homo sapiens
  misc_feature (78)..(78): n is a, c, g, or t
  misc_feature (81)..(81): n is a, c, g, or t
agagtacgctgtatgatactataagacgacactaagaccgagagacttaacgactagaacacccttcggaatgcacgncgnttgataacgcccaagaactcgtggatcaacccggtctgaaggaattcggcacgagccttcctcctgttggtgaccatgtgtaggcaggtgcacagcagatggaatatggcggcaggccctatcccgcttaccatcatcgggaacctcttccagaaggaattgaagaatattcccaagtccttcacccggatggcccagcgcttcgggccggtgttcacgctgtacgtgggctcgcagcgcatggtggagatgcacggctacaaggcggtgaaggaagcgctgctggactacaaggacgagttctcgggcagaggcgacctccccgcgttccatgcgcacagggacaggggaatcattgttaataatggacctacctggaaagacattcggcgggtttccctgaccacccttcggaactatgggatggggaaacagggcaatgagagccggatccagagggaggcccacttcctgctggaagcactcaggaagacccagggcagcctttcgaccccaccttcttaatcggtgtgcgccctgcaacgtcatagccgacaatacttttccgcaagcattttgactacaatgatgagaagtttctaagggtgaagcatatggatctatgagaacttacaactaactaagtattccctgggttcaactttacaaaaatttttccaaccttatacaatacttggctggaagccacacaaaaagcataatgggggttgct

SEQ ID NO: 560095 - DNA, 410 bp, Homo sapiens
cacgaggggcattttgaacttgctgtctttggcagtcacatccttgtcggccagggacaggtccccctccagccgtgcaccatccagcttggctcctggggcctcgacatccacctccacgctgggcagagaaacctccacatcaggggctgtcacttccaccttggggtcttttaggtccagcttggggcccttgatgtctatttcagggcccttgaggtccactttgggcaccttgaaactgggcatctgcagcttgggcaggtgccctttgaggccggctccctcgggcacggggccctctgggagtttcacgtccaattggccagcctggagctccaggtcagtggaagggggctgaatgctgaggtcagtggtcttgaggtccccctgcatggaggggaggctca

SEQ ID NO: 560096 - DNA, 380 bp, Homo sapiens
tgcttttttttaatatgtttaaaaattatattaaaaccctttctttctaaactagttggattctgtggctataaattgttttgtctaacaaaagagagaaccctgtattaacccttttgcattaatttatttacagaatattagggctttgcccttggatatagccagtggtgttttaatgttgttcaatttcgaataggaattaaattcctggtctcaagagaaattattaatgccattttgccttagccattccctttaatattgtagagaattaaccaaactaaaaacaaatataaaaaatatggaattaaccccttatttcattgggggtttgcctttaataccccgatggccctttaaagatactttaaccctta

SEQ ID NO: 560097 - DNA, 308 bp, Homo sapiens
cccgtccaagcttccggatctgtcggcgatcgaagacatgcgcgagccgatcgtgcgggccaatattcttgtgccgcaagagcacctgggcaacgtcataaccctgtgtatcgagaagcgcggcgtgcagcacgacatgctgttcctcggcagccaggtccaggtgacctacgacctgccgatgaacgaagtggttctggacttcttcgaccgtctgaaatccaccagtcgcggctatgcttcgctggattaccatttcgaccgttaccagtcgactaatctggtgaaactggatgtgctgatcaacg

SEQ ID NO: 560098 - DNA, 830 bp, Homo sapiens
  misc_feature (770)..(771): n is a, c, g, or t
  misc_feature (778)..(779): n is a, c, g, or t
gatacatttggtcctggagatgatgatgaaattcagtttgatgacattggagatgatgatgaagatattgatgacatctaaattgaactcaacattttacattccatcttttctgaagattgtcctacaatttggattttgatcatgacaaagaagattaaaatttcattagcatgaatgcaatttgttaaagcagactgatttgtttctaagatatttttggtttttttaaaactgataataatgctgaattatcttaagtgagatgttaagcccactttgttcttttaatgtaatggagcttatgggtagaagaccatgtctactaattacaaaaaaaaaaaaaaaccatgcttggctgctttcccttaccatttccagtaagaaaaggggtgtttggaagaaatcattggccttgtccctcagggaatctgattaagcccgggcctctggatggtatagagtcatggtggtatattcccagttacctagaatattcccttgagatttggatacaattggagggaggcagaagtctgcagttgaagaaaaaaaataagtctgttggtcatatttaagtagcctggggctattttaatacgggattggatatcaggtcctttcatagtcgtatttggccaccgtaaacttaaaaaaaaaaaaaaggatttctccaaaatggccggtttcaaaacccgggggtttaaataagcaggtatggatttgggaaagctatagatagttggcaggaattggaccccttaggggcnncagtaannttacggggaggtctgataccatggggattctttacattgtttagattccca

SEQ ID NO: 560099 - DNA, 691 bp, Homo sapiens
  misc_feature (384)..(384): n is a, c, g, or t
aagcagtggtatcaacgcagagtggtcattacggccggggggggtaccaaaaaaaaaaaaaaaaaaaaaaaaaattgtgggcggccggggccgaaaattttaaaccattctcggttgggcggcgggggccccaggtaggtgtacggtgaccttgggccatataggtggtacctagggaaaactccggggccaattggacatatggcgttggggtttccttcacaaattaaaaaaacggcgcggggggcacccgggaggttgtctggaaacaaattccagagatggtgcgtcggagaggggcacataagtgggttcttactcacacaggggaggcccaaggagagaggcctcggattttcaaattcgccccccggcggggggganatggacaaagtaagaaaagaccgaagaaccgaagtcagcaagaaaagtgcgcccccacgcgagggcgaagagcccaacacagacaaacaacgaacaatagatcggcctgggatacaaccggaccaacagcgacaagcgaggacagaggtcagaacgaacgaagccaaaaaactgtactggccacacgagagataacgaagggaggagcaagaacaagacggacaccacaacaggcccagaaaacagaaaagcacaaaccgacaggaacaaaccgcaacagaaggcgacaaacacaaaaccaatcgca

SEQ ID NO: 560100 - DNA, 768 bp, Homo sapiens
agaagtcccgcatcagcctcatcccaccagaagaacggtgggcctggcctgaggtggagtgtgccagaagctcctgcattgccctgtggtgcctgaactccctgaggtgcccatggagatgccttatggtgatgaccccagagctctgagctgctctcacttggaagacagtgcacatggagcagtggcactggatgctgcaggctaacatgttgagcccgacttcagcagcctggtgtcacctctcatgcccgccgaatggatggctagccctgggttcttactatctgtctccctggtgctctcagctgcaacagatatcttcacggtgaaaacaaagaaaaaggccataatggtcagacgtccatgatccaatgcctgagggccccaagagtaaccaactgatgaggttaatgaggtcacaataataaaaaaatgcgtaggccaggtaaatccagcgccaactagcgtagataccaaacaacggtcggatggccatcaacagtggaggtccctagaattcaacctcaataccacattggaaatagctgccactcacacagacgcccctaaccgagcggacaccagaggaagctaagtcagggtgccacacgacccagaagcaaagagcgtgcaagtcaagacaacaggggacggcaaaacaagagacagacaacacacgaagcgaaccaaaagaagggcagagaggcacgacaggggcaagcagcgcaggacacgtagcgcacaaacgaagaaccaccggaccag

SEQ ID NO: 560101 - DNA, 922 bp, Homo sapiens
  misc_feature (743)..(743): n is a, c, g, or t
gtgtgatgatctcgtcggattcgtgagtggtgtaatgctggctccagtgatatccgtggtatgccgaagatgggtgcgagtgctctctgcgaccgatatcgattggcatatggaatgggcggttcctatctaatccgatcttgcgatgttggagagcgccttgtagcgccgaactgacagcatgtctgatgctgtgagcgatgttagaaccgatcataagtaataatgctgatgtattgcgaggctactggtaagaagtctagtgcgcattcgtagatatgcatagctacgattcagagagataggagtggggggagctactaagtcgttcttgttgatatgaggctggtaatagtggaatggtgttgatagtccgtaagggacagctggtattagaggagatcaaggggtggtggtccgtaaggttatcgttagatatggacaaagatgtagataattgatacgggaaacgtgttatcttgccctagtattgatatcatacctttaaaacgaagagtagtcacgttatacttatggagactatactgtactggattcgtggatgcacatggatattctcttaggtataagggtgatagaaattgaaggagtgaaagtaagaaagccgaagaagagttattgctcttttcaagatacctataaatgactgagaatgcctttttatgtgtgtcttgtgaatcgttggtcagagatgatagagtgtttgcctgatgacaataccnattcggagagcaactagagggcatggtgcggagccgtattatattagtgaggaattggggtttgcataaaagtgctaatgaggatccagagtcagattcgttgtatatggtggagatgccaggatctaaggaagataaggtaggagaagcgggtggggaagagatttggggggtgttgg

SEQ ID NO: 560102 - DNA, 203 bp, Homo sapiens
  misc_feature (52)..(52): n is a, c, g, or t
ccggtcatgatcaagtccgcatatcacatcatctcgggcccggcgatatttnggagtagatgtggtacaccaacagctgctgcagaatagcgtgccccagttgctgcggcacgaccatggggaacacgaggtcaaatccgttggattcgagcacaatggtggaatcctttcggctaaactctgggagtagactagaaatgaga

SEQ ID NO: 560103 - DNA, 318 bp, Homo sapiens
atgactacagtaaatcaccagagacatttaagagtgtcaacatgatccaggaaaacatgacctcaccaaatgaactaaataaggcaccagggaccaatcctggagaaacagagatgtatgacctttcagacagagaattcaaaacagctattttgaggaaactcaaagaaattcaagataacacaaagaaggaattcagaattctatcagataaatttaacaaacagatcgaaataattaaaaagaatcaagcagaaattctagagctggaaaaatgtaattggatatactgaaaggaatggcatccagttctcttgg

SEQ ID NO: 560104 - DNA, 1087 bp, Homo sapiens
ggttcagagcgctgtgtggagatcgtgagaccgggccaggaggtcctctgcatggtgctggggagtcaggcacctgcttcaccccaacgtctgcgcgacaagtcttctgagtgctgccgtggtagaccttgggtgttgctcctgcattcgcttgagagggatgtgcacagggtgcgcatgttagtgccagcaagccgactctcccatccacgatcctgaggagtatagcctgcgagtgacgtgggcactgatagaaggcagggacgatcgatttgtcgctagacaggatactggtgtgtgaacttcgcgtcgctaggtcctatggtcgcgtgctcctcagacgcaacagtgatgcaacgattcatcgatcgtcgaactcgtacatcgggaacgagactgttgtctcaaccgtcagaccatctttctgtgaatgccgccaggacggtctgtgcgagggaggactgtggcgttcgcttcggtgtcatgacacgctaacggtggacgtggacctatccagggcccaggaccgctgggtccccacgacctggcggtggacggacagcttgcgagagaacggccgcatggcggcagggaacggacgcaggatccattgcgcggacgaacggcacgcgcactgcctgatggcccacggacccttgaaaccccagggtgtcacgtgtgtctggctagcttgagttggcaaggacaaacctgtcctaacctggaacaatcgtctaacttactgagctgagctgggagtgcagcggcggtcactccggaagcccggacgtgcctgcaccatgtctgacttacaggcccctggggccccccatgcgcttgcagcttccgtaatgccctagggcggggccatttaggccgatcgttccggcacacaagcttggctttggcaggcgaataccagggcgcgtaaggaggggtccccaaggagctgatacacatgccccactcactgccctgccaggtacaagggctgccgtggatcatgaggcggacccgaacgccctccatggtaataaccaaaaacccccacccgatatctggcacaccagttgggcaagaaaccaca

SEQ ID NO: 560105 - DNA, 698 bp, Homo sapiens
ccacgcgtcgccgggagctgccgacggacggagcgcccccgtccccgtccgggcgtccgccctgtcggcgccatgcccttctccaacagccacaacgcactgaagctgcgcttcccggccgaggacgcagttccccgaactgagcgcccacaacaaccacatgtggcaaggtgctgacccccgaagctgtacgcggagctgcgcgccaaggagcacgccgagcggcttcacgctggacgacgtcatccagacacggcgtggacaacccgggccacccgtacagtcatgaccgtgggctgctgtggcggcgcgacgaaggagtcctacgaagtgttcacaggatctcttacgaccccatcatccgagggaccggcacggcgggctacaaaagcccaggcgattgagcaccaagcaccagaccatcaaaaccccgacaaccatagcagggccgacgccacgaacctaggaaccccaaacctacgttgctagaagcctacgacggagatgcagacacgggaccagcaagccatccggatggccattccatgcacatcccccccagcaacgtgcacacccgccgaggacaggcgccacaagccaaactcggacgaacagcccaccggagtggaaagccccctgatccagacctagaacaggccacccctgccgaggcccgaaaacaaacgcaagcacaacga

SEQ ID NO: 560106 - DNA, 90 bp, Homo sapiens
gaaaacctgctgtcagcaattgctcctccgtgggctgttcaagggaagtgagatacttttgtactatgcatttcattttttaaggaccta

SEQ ID NO: 560107 - DNA, 102 bp, Homo sapiens
gaaggggtatgggttgaacaacgaagctgcgggcgcaggtcggagacctggaggaggcgctggcccggggtggggcaaacaggcaggcactggactgcgact

SEQ ID NO: 560108 - DNA, 122 bp, Homo sapiens
gagagcgagcagcgagctggctggatcaccgagcgggcgcccgcgcgtgtggcgtgaggggaagccgctgcccgcctagtcttgtccagggcgccgcagatcgcccgggaggaccaagacgg

SEQ ID NO: 560109 - DNA, 377 bp, Homo sapiens
tggaaaatccatccaatactaaaagtagggtgtgaaagtctccagctattattgtattggggtctgtctctctctaataatatttgctttatatatctggatgctccagtgttgggtgtatatacatttaaaattgttatatccttttggtgaattgacccctttatcaccacatagtttcctgttacctcagttgttgtcttgaaatctattctgtctgatataagtatagctattccttctcttttttggtttcctttggcatggaatatctttttctacccctttactttcagtctatgtgtgtctttataggtgaagtatatttccggtaggcaaaagattactgagtattgatttttttttttttttttatt

SEQ ID NO: 560110 - DNA, 175 bp, Homo sapiens
ggaatagcgtcagatagcacctaggaagcaatgcaacaagttaccctacggatgtcagcgcactcctattctagagctccatatcaactagtagcggctgacaacctcgatgtttggatcacgacatcccgatggtgcagccgctattaaaggttcgtctgttcaaacgataaaa

SEQ ID NO: 560111 - DNA, 1445 bp, Homo sapiens
tctgaccaaaccgtttcactgtcttatcgtggtgtcatagatattacaatgtgccagtaagcaccatcatctcccgttattgtttatcatcaaatatactttaacattggagaacactccgggtgctccaagatatatacgcaggtgttttcagaattcacagtgtaaagagatacccgtgtaaacccagcatcgacccacaccctgtagcacagagtgtgccccggtgcacaacagaggatacacactagagctaacagtgggcaatcccccataagtaccacaaagtgccgtacatggagaccctatagtggggccacaacagaagaacgccacggagacaacaacatcacacccattacacacaagagactcacgtctccagaccactacagaacacgccgagaaaaaaagcatgcccggtgcgcggtgcgactcagccacacacacggagccaacacccgtgggcgccacagaacaattagttcacaaccaaccaaccggccccccctggcgaccccccgtcttggtcccaaaaaacatgtggagaccgcgtaacaccacacagatcagcccacacaagtacgcggacacaccgcggctcacaacaccaccacgacccaaccaccacacagcggcgacatacaccacccgtgggaccatccagcaggaggcggacacacaaccacccaagggggctgaccggcccaacaggcgagggggcaacgacgcggctgcaccatctgccctccccagcgctcgatgggcattagtgggcccccgaggcgacaccaaaaaccgccacaaactaaagcatctgtgctacaactcagaacagatccttcccagaaacaacaggaaccccaagcggcacaacacacgcccgccaccgcggtgaacattagtgtcctgcgccaacacagagaccccagagacggacaagcacaaatcgcccagcttaacaacgcataaccacggccgaaccacttatagcagagaccagacacacacaaaccaacaggattaccacgagcaaaccaaccacagcctgtgggaaacaagtcatagcgcactaggatggttgaccaccacagaagtgggcagacaaacaagcacaaaacgcaacgtcaggtcagaccaggcgcgacgccgccacgcgcaacagaagacaatcagagggagccactgctagcaacaccagagtgtggcgggtccacacacacccgcctcagaggatcaatttccacacaggagccactaaaaccacaccccgcgtctccagatggagcacctctgcgggacactcaaggggggaacgcgcagagaacgcgaacaggcaagcagccaccacaatggcagcgcccacaacagccagcgacgctcgtagcagtcgactggccggcaaacacaacagcggaagagaaccacaccacacaccacagacg

SEQ ID NO: 560112 - DNA, 108 bp, Homo sapiens
gctgcggacacggccgtgtattactgtgcgagagatgcgggaatccgagatacagcaatgattattaacgggattaagtactacggtatggacgtctggggccaaggg

SEQ ID NO: 560113 - DNA, 465 bp, Homo sapiens
  misc_feature (2)..(2): n is a, c, g, or t
  misc_feature (74)..(74): n is a, c, g, or t
  misc_feature (90)..(90): n is a, c, g, or t
  misc_feature (96)..(96): n is a, c, g, or t
  misc_feature (99)..(99): n is a, c, g, or t
  misc_feature (105)..(107): n is a, c, g, or t
  misc_feature (113)..(114): n is a, c, g, or t
  misc_feature (123)..(123): n is a, c, g, or t
  misc_feature (161)..(161): n is a, c, g, or t
  misc_feature (181)..(181): n is a, c, g, or t
  misc_feature (191)..(191): n is a, c, g, or t
  misc_feature (221)..(221): n is a, c, g, or t
  misc_feature (240)..(240): n is a, c, g, or t
  misc_feature (242)..(243): n is a, c, g, or t
  misc_feature (248)..(248): n is a, c, g, or t
  misc_feature (276)..(276): n is a, c, g, or t
  misc_feature (396)..(396): n is a, c, g, or t
  misc_feature (427)..(427): n is a, c, g, or t
tntgtctaatctattaacgaagaagcccaatacagtactagaacaatccaccagagtaatgcaaattacatganacatatatgtcactgnaaaacngtncaagcnnngggacnncatggtttnctccagtcatagttccacttcttaacaaaatgtgagtnttccctttggatttgtctgncatgtaagtntgttttttgcactaagacagccttctatantcatgtgataatgatatcntnntggcnaagttcatcttcccacagtttttgctgnccaatctctctaacctcagcctaggtaatttggtggcttgccgctcaacatttccttaactagaataaacatagagaaatagaattagtaataatccttttacataaatcccaaaactcntggcataacaactccccacaaaggaaaggtntaacagaactgaatgaggagaaagcacaatacaagaaa

SEQ ID NO: 560114 - DNA, 209 bp, Homo sapiens
cctggcatcaggaaagggagagagctgtggaccggtactctgcatagtcagccacatccgaggaagagaaactgaagggagaagtagatggcaatggttatgataaaccgggatagaagtaactcttcgcgagacttctttagtgctacgtcaatgtctcactgcacgtctagaaagtcctagatccacgctattctgaacccggtcct

SEQ ID NO: 560115 - DNA, 146 bp, Homo sapiens
aagttagttcataagaatattcccttagaagctgcggccgggtaggtcccaaggttttatccttcaacccgggtggggaatttacccaaataaaatattaaacccccattccctgcctcctaaaataaaaaaaaacccctattcaa

SEQ ID NO: 560116 - DNA, 361 bp, Homo sapiens
  misc_feature (127)..(127): n is a, c, g, or t
  misc_feature (279)..(279): n is a, c, g, or t
aggacgcggcgtaatcagggcgtacaggaacccaacttggataatcaatccccccggcgtattcacccgcgccgacgctcgcgtagcgggcacctcggtcgcggtcgtcagttatgtgattaacaanagcccgcggccctggcagaagccacccgtttgcgggtactggccgcgatcgaacaaacgggttaccggccgaacgacattgcccgcgcactggcctcaggtaataccctgacttacggtttagtagtgcctgacatttccaacccctttttntccacactggcacgggcgctgcaacgcgaggattcagcccacggacgcgtactgttgttaggtgatcgggcgacgaccggca

SEQ ID NO: 560117 - DNA, 113 bp, Homo sapiens
taacatactccgacgggtgctcccaaagtgctgggatatacaggcagtgagccaccgcacccagccaacagaagaaatgtttaacagttcagtacatagtgcacgcgaggtag

SEQ ID NO: 560118 - DNA, 1208 bp, Homo sapiens
  misc_feature (331)..(331): n is a, c, g, or t
  misc_feature (594)..(594): n is a, c, g, or t
  misc_feature (686)..(686): n is a, c, g, or t
agcgggacgcggacagtagttccgaggaggaagagtacgagaacatgatagtgtgtccgcgaatccgtaacattatccggacccgtaaacagcatgaacagctcaaggtcgaatatccgatactacaggcgaaccatacacgctgtgggtctagcctccgtagtgggaatatcactaggtaggtacctcgtcatgaccgttggcattgcttgcatcatggctctgagccttagtaagcgaatagcataccaacatgtctcatacatctacgaagctggccttagtgcgtctcgagcattagtgctatcgcaacagaggctctcgtcgaaangacgctacgactcgactgtcaagcgcgagaagattatcctttggaaagcctcatcattgcttagtcatatacccaatgtgtcctcagggtcctagtgtcattagtaaggagctctctatattggctatcgcattaatatcctcgctatttggcattactatattcgaacgatcaggtacaccgaatcatagtaacagctctgggggatccgaacgatgcctgtgctggtaagagatgggatattgactgcatgagtgcacctngaattcgggagacatggggggcgtaatatgactggcccaaaacagtttcactacgctaccactctgccgtggtatgactcggtacacttatntgacttgactgcagtactttgtcaggtacttgttacgagcggaaagcactaaccgatcactcagataaggacgaagctgtgacatggaggatacctgtcgttactaaggggttagggtccagtagatgggtgggttgaccaacctagtcttgtgtagaaaggaacccatatgacctatacgattttgggcctaggtgtaaagatgatacctattaaccgtatgaagctagctttcatccgccaacattgtgattctgggcgttttaaggttcattgattttaaacccttgaataggtggacctagagtttaaggaaccactaattgtgggcgaacgaggcgagtcggacccttgtcgtggtgtgggcccccacaaaggtggattccaagaggccacccttttgttcaactacagttcttggctcaaacgggataccctgtggtacccttgtgctacacaccacgattcacttgcctcgtcacacatgtcattcatggaggcgaagcgggcagggtccttcag

SEQ ID NO: 560119 - DNA, 1449 bp, Homo sapiens
  misc_feature (465)..(465): n is a, c, g, or t
ctcccttgtgtgggtgtcgcgcgtaggtgtcgctggtcctctgctgatcggcgccgggtttgttttgaggcggccgccttattctgtcttccgcgtgggtatgttgacctgccccccgtagtttttgtcggcgctgctctccttcgttatgtcccggtgtagtactccccgacggttttgtggcgccccaagtttcgcccctggattgttccctccggtccttcctggtggttgttccgcacgccacgcttgttggtgtgggtgcgcccccgggggggactccccgggggggggctctccaccaacgaatggttttaatgcggtttggggatcccaagaaatgccaaatgtacaggggggttttcacccccctggcgtgtccagacattcccggggagggaaaagttctcacatagggggaggaaattccaatggccctctatttttaaccccagggggaaggcncaacaaggatggtgtttgtttgttaatttccacgaaacctgttatagtggggtggttccacgaaggggcccccacgccttggggtagggaacccagccacaccccctttctttgggaaggttgggaattgggcccccaccccgagtttaaggaaaattgtgggaaatctcccaaagggcctccagagacgccgagagcgcgcccttgtggcaccccacgtgttccccccccgaggagatacctcgtgacagtttctttctttggagcgcccctggttgttgaacactgctcgggaccactgtgccccctcgccttgggagcccacagtgtctccacacacagctgtcaccccgtgtcccctcggtacaccctcgcaacagtggccctctctctcccacagagaatctggagggaccccacagagatagagagaaacccgccccacactctcctcgggagtcttgtcacccacttgagaacctccacatggcgcaacacatggtatatgagattggagaccacgccacagagggtttcttgccccacaggaggagaaatatattaatgtctctggctcgcacagcaccacctctgtgagagagaaaggaaacttattccttttcctataccactataagaaaccccaaagaggctgggcgtaagtggctcacacaccccgtgatttcccacgcacctttgggagaggcccacaggagggcgcacagagtcaccttcacggtcacggagtttcgagaccacccctggcccaccactggtaaacccctgtccctagtataaaatacccacaaaattagctgggtgtgggtgtgggtaccccgtatttcccacgttatacttgggagaggcctgaaggtgggaggatcttttgaaccccggagtttacgggtcctagcctgctgtgattgtgcctacgaatagcccctgcatacccacctgggccatatagcccagatcccctctcct

SEQ ID NO: 560120 - DNA, 84 bp, Homo sapiens
ggatttgctggtgcagtacaactaggcttaatagggacatgataaatttatttaaaatgagttatgatattagcaatatgaatc

SEQ ID NO: 560121 - DNA, 148 bp, Homo sapiens
tttcccccccgggggcccccggtttttttttttccccccctttgtttcccccccttttgggggggcccatgttaaattaaaacccttttttaagggggggcctttttttttactttgcccccggggtttccttttttttggtttcccc

SEQ ID NO: 560122 - DNA, 593 bp, Homo sapiens
cactatttcgtgcaataatatgcacagtgcacgtaaaagcaatcgcacagcaaatttctcataggcatctgggtttcgagtgtgatcattaataacatatacctttgctcttttcagggcaacataacaaccacccttcactgatagttgggaaaagaagattgggttatctttgccatatcatttagctggaagtgacatttaaaagcaccctgcatcactagtaatagtgtattacgctattctgcccttgtaatcggtgtccctgtaaaacaatccccacagattactttcagaaatagatgtatttctctacgtaagggccaggtttattttctccttttttgagatttctagaaaacaatgctgcttgcacatgttggttcttgaaaccttcactagaagaatttcaggtcataccaacatgtggataggctatagctgttcagaggtctcctgggggagcttaaaacgggggaaacactggttttcacagatgctccacatggctgtctttaaaagactcaaaacttttttttgtcctctatgttatgcttggaagctcccccccccacaagtgtgtccagtcgagt

SEQ ID NO: 560123 - DNA, 251 bp, Homo sapiens
ttagctgatgttcctatacccctatagcattctggtggctgtttagacttttttaggtaaatattctcaggctacagactatccatacacagagacatattacgctcagctatgcaggcaaaatccatctagagcctgacttggaatgaggaccgtgggaacagaagtcactactgctcattcccaggacatactaacatgagcaatgaagatggccacagaacaaggcaaagttacacacaggctttggt

SEQ ID NO: 560124 - DNA, 879 bp, Homo sapiens
aagccaggctagtaccggtaccggaaaacccgagacatacgacacccaggtcatacaaggacatgaccatggatctactctctgtgtcatctgcgactaccagtataatcgcatagagcggcagagttgttacctgcgatcctctgacctagagagcgaaggggaaaagcggcgagatagactagaccgctaacaccataccataaagccagctaggagcacctgcagtccaagtacatcggcacgggccacgccgacaccaccaagtagggagtaggctaggtagaaccagacaaccgcagactacgtaactagctacctacatagggccactatacgacctatctacaactaactatacgccatatgcggagaatagagagcaaagcgcgagtaccgctatcaactatgataggaacaagatagctatcagcctatgtaggaccgccagccgacaagcccgaggagaactgagactactgccttaccaccgcagtagcggggcacctactacccagcgtattctaccggttaagccaatcctactataagtatatcctagtactccaaaggaccggctactaccatggctacctgcgcctacgtgcttatccgcgtacagaagtgctatgcccggggagtcccgcctgacctgccttcatagtaggacccttagaacagcactgggagaccagcaggactcctgagaactgtgctggtggagaggtcctagagccggcgagcgtatgagaagagggcatggcgctaggagtgagatgggatttggcgtctcgtatttggcttaattggattgttcattgggctatttccagtaaaagtttagaacatcgttaacacaaaaaccaaatacacaccaca

SEQ ID NO: 560125 - DNA, 182 bp, Homo sapiens
cacatcaagttctgagctatgtggacaggaggccgatgaagagggaatctgtgccaaattctctctttttttttgatttttacctgaaacagagtctcgctctgtagcccagcccaggttgaattgcagtggcccaaactcggttcattgaaacctccacctcctgtgtccaagcgattctc

SEQ ID NO: 560126 - DNA, 268 bp, Homo sapiens
taaaggtgcatccttgaaagtattttagagcattgaatacttttcaaaatcagtgacgcataatatgttcgctccccataaaaagaaatgaattgccatgtttagagtccacaggactatattaccaaattgattactgggagactgacttgctcctatcaaaccccggaccggcacgcgagtaccaattcttcacttgcataggattttacatccacatcctctgctttgtaagtctgtaccgcctcctgctataaactgagtgtac

SEQ ID NO: 560127 - DNA, 546 bp, Homo sapiens
cggcgtcgtgtacactaacagcaataaccataaaatgacttgcatgcgccatccaacagttcttatcgatcctgcgacgtacatagaatagccaaacaatacttacacaaaagaacgcaggtagaggactaccttctcaatttcaaaacttactatgaagcctagaaaaattaagacatcgtagtaccagcaaaaggctagatacaaagatcaatggaacctaattaagagcccagaaataaactcttacatttacaggtaaattgatttttgacaagagtgccaaatcagctcaatggagacagaatagtcttttttatcaaatggtgtagggaacaaaagaatagccacaaacaaaaaaatgaaactgaacccttcttcacaccacacacaaaaattaactcaaaatggataactgatccaaatcgaaaaactaaaagtatgaaactcttagaagtaaatactctgggccttcgagggtgaggaattcctggactgaatggtggggaagctctaaggagagagtcaggctgaaactggggggat

SEQ ID NO: 560128 - DNA, 380 bp, Homo sapiens
cagtcgaaactcatgagatctttctatcttatttgtggtggatgataacacagcaggacacttccggtttattcacaatgaggctgcagacatctaccaggctttgagacaaactttaacttttcctatgaactcttctctaaagcaggtcacagggaaaaaaagggtttaaagagaaataacttctccgggcaaaaactgaggttagcgggcctatcagctgtttcttctcactccaccactgctgctgactggaggagcagcctggaaagcagccgccctcccgcaaacaggtaaaccacattacctattcctgtggcggaggcaaatggaaggtctaacctaacggggtagtgctgaagttcggggacaaaagccca

SEQ ID NO: 560129 - DNA, 751 bp, Homo sapiens
  misc_feature (7)..(7): n is a, c, g, or t
  misc_feature (100)..(100): n is a, c, g, or t
  misc_feature (102)..(102): n is a, c, g, or t
  misc_feature (112)..(112): n is a, c, g, or t
  misc_feature (123)..(123): n is a, c, g, or t
  misc_feature (125)..(125): n is a, c, g, or t
  misc_feature (152)..(152): n is a, c, g, or t
  misc_feature (154)..(154): n is a, c, g, or t
  misc_feature (187)..(187): n is a, c, g, or t
  misc_feature (190)..(191): n is a, c, g, or t
  misc_feature (197)..(198): n is a, c, g, or t
  misc_feature (220)..(220): n is a, c, g, or t
  misc_feature (239)..(239): n is a, c, g, or t
  misc_feature (252)..(252): n is a, c, g, or t
  misc_feature (260)..(260): n is a, c, g, or t
  misc_feature (268)..(268): n is a, c, g, or t
  misc_feature (297)..(297): n is a, c, g, or t
  misc_feature (331)..(331): n is a, c, g, or t
  misc_feature (334)..(334): n is a, c, g, or t
  misc_feature (341)..(341): n is a, c, g, or t
  misc_feature (343)..(343): n is a, c, g, or t
  misc_feature (347)..(347): n is a, c, g, or t
  misc_feature (352)..(353): n is a, c, g, or t
  misc_feature (357)..(357): n is a, c, g, or t
  misc_feature (360)..(360): n is a, c, g, or t
  misc_feature (364)..(364): n is a, c, g, or t
  misc_feature (382)..(384): n is a, c, g, or t
  misc_feature (386)..(386): n is a, c, g, or t
  misc_feature (400)..(400): n is a, c, g, or t
  misc_feature (460)..(460): n is a, c, g, or t
  misc_feature (473)..(473): n is a, c, g, or t
  misc_feature (532)..(532): n is a, c, g, or t
  misc_feature (537)..(537): n is a, c, g, or t
  misc_feature (621)..(621): n is a, c, g, or t
  misc_feature (665)..(666): n is a, c, g, or t
  misc_feature (674)..(674): n is a, c, g, or t
  misc_feature (684)..(684): n is a, c, g, or t
  misc_feature (747)..(747): n is a, c, g, or t
catttanctccaaaagattaacagtggtagcatttgggtggtctaacttgattctttctaacattcccatattttccttaataagcagtaattataattncnacgggaaatnatttcttttantncccagtgcagtgtcactgtcaaataancntcagtggctttggccccaattcttgtggtggcnttnnccgctnncccactccccacccatccccantagggcttgcgcacctgtngccctgctgggcncgtctgtnttgccccngccctcagcgtctcttcctctcgcttccngctatttcttttccctttccttcttgattcgggnggnggctttncntccncgggnnccancgntagngtccgtgaggtggcattnnntnttttttttttttgngacggagttttgctgttgttgcccaggccggggtgcggtggcgcggtctcatctcaccgntgcctccgccttntgggttctcgcaattctcctgcctcggcctcccatgtagctgtgattattggcgcttgnaccangcccggctaattttgtatttttagtagagatggggtttctccatgttggtcaggctggtctcaaactcccgacctccggtgatncgcccgcctcggcctcccaaagtgctgggattacaggtgtgagnnaccgcgcncagccttgangtggcatgttttcaaagaacatggtgcctcagttttggacacacagggactcaaatacaatcntttt

SEQ ID NO: 560130 - DNA, 590 bp, Homo sapiens
gtggtagttctagacgatcgctgagacatgattgagcacggccggctgtcccagagtgcccaggccccatgtcatttgtgcacatttgtgatgggtcacggtgtctcctcgtcacactcacttgcgagaagggaccgtatccgaacaaagaactagatgactcactgtagggtacacagtcgtactacacctccaggtagcttgtagcgtcccatgacagggttcagtgaaagtcatccgggcaggatacacagcattggccggggtgcggatgtcacaccttcagaggagaaacagggcattgggaaagaaacacatagacggggcggcgggggtgggggtgcatgctccagggtcatggtgtcatagacacccccaaattgggaaggggcagtggagctggaaaccaagtgatatagtttggatctgtgtccatacccaaatctcatgttgaattgtgatctccagtgttggaggtggggcctggtgggaggtgattggatcatgggggcagtttctaatgaatggtttatcaccatcccctccgtgctgttgagatctggttgtttaagagtgtgtagcacctccct

SEQ ID NO: 560131 - DNA, 911 bp, Homo sapiens
agggcccattacggccggggggggacaagaaaaaaaaaaaaaaaaaaaaaaaaaaaaaatttttgggccgcctgggccccgaaaaatttttaaaacaatccggtggggcggcggccgggggcccaagacagggtaaggttgaacccaggggctcatagctggctccccatagggagactccggggctcatgtgaccttacggggctgtgggtttccctaaaccaaaataaaaaacgcgccgggggggcaacacgcggagcgggtctggaaacaaactccaagatgagaggttccgggagcgccaactacacggggaactctataattaaacaggggagctccacgcggagctccgatactaaaatttacggccccgcccgggggaacaaaccagatacagcagtggagacaagcacacaagacaacagaagacgcggaaggaacaagcatcgccaaaaaagaggggcaataccaaagcacatgagaaaaagcgcgaaccgagcgaagaaaagacgacgacgccgtgcacaattaggagaatcgataacgaagcgcagtaaatggaacgaaggggagcaacaaacaacaagtagacccacaagaggagcaccaatcagaacaaaacaaagcggatgaaaaaacagcacacgagaaccaggagagcaaacaaaaaacatcaacagcaacgacaacaacacagaaggacagaagaagacacggaacacaagcagaaaagcgaccaacaatcggaaaaacaaggaggaaaaaagagccaacacaaacgagaacaacgaacgagccgaacgcacagcacacaagaaaacgagaaacaagaacacaaacaaccacaaaaaggacaaagacaagaaacgaaaaaacaacgaacacgaaaaggcaaagaccagaaagaa

SEQ ID NO: 560132 - DNA, 231 bp, Homo sapiens
cccctccagctgtccaacacttcccgtttattcatgccttggtaggggattcggcccttggtgatgagctcacctgagtccggatcccagtggaccagcacgtctgacttgattgtgaatctgccacagaatgcagcttctggtgctgtccacttgatgcggaacttggaaccttgtcaggggttgtacacttcgtccttgatgagacgcgccacgccccatgtgcggaga

SEQ ID NO: 560133 - DNA, 679 bp, Homo sapiens
taaaggagagagactttttccgcgtctctcgctccctgttaaagccgggtctagcacagttgcagacgccaccagcgagaaagagggagaggaagacagatagggggcggtgggaagaacgaataaagaaaggtacaaagtcttctaggagaacctttcacattgtgcaacaaagagacctaggggctggcagagagattccgtgggacgcagggctggaggtgtctattgtcgagcctcaggcggtcagggcctcgggcgcgagtcgagaccctgctcgactcctctcgcttctgaaaccgagcgttcaggagcggctttttaaaaatcgcaaggcacaaggacggtcacccgggcgactatgttggctgatttttcgccttgcccctctttaaaagcggcctcccattctccaaaagacatttcccctcctccctttgaagtgcattagtggtgatttctgcctcctttacttatgaacttactttaggtatggctttttcccccctttggaacttatgtgctgctgttaaacaacaacaaaaaaacaacaaaacacagcagctgcggacttgtccccggttggagccagtgccccgcctggagtggatgagcctctccatgagagatccggtcattcctgggacaagcatggcctagcatccgttcctacctaacg

SEQ ID NO: 560134 - DNA, 192 bp, Homo sapiens
tctgacggtcagcctctcacgactccccgcctttacacggttcctgccccgggtctggtgtcttctccgaccggtaccacgatgtatgttcggcgtggcgcctctaccgactgggactggcctgcacggatcgctgctctgtgcatgtctttgagtgccctcctccgacctcttctggcgtcactcttctga

SEQ ID NO: 560135 - DNA, 731 bp, Homo sapiens
cttgatacagaatattgttctccacacacaagtctcatcagtacatgcctgtactctctcacagctcatgatactacagcttctacaccaatggggagaagagggtttcctggctcatattgacagaactattgatttctacaagaaccagagggattccatattggcagctgcagacaagtggttacgtggcttggcagagtggcatgttcccaaagctggcatgtttctatggattaaagttaagggaatctccgatacaaaacaactgattgaagaaaaggctattgaaagagaggtcttacttgttcctggaaatggtttcttcattgatggttcagctcctacctccttcttcagagcatccttctctctggctactccagcacagatggatacagccttccagagattggcccaactgataaaagagtctttatgaagaaatcaaactcagcattggactcataatttttaaataaattacttctgtactttgcagaagaaatggttgttgctgtttgactgacaggatggatccaggttgtgaaacatctgtagcaatttccctgaaccactttaaagtccccttaaatccatcacattgccaaatagctttctgatctacttttgccctttgattaatttgcaactgacaaagcattaaattttattgtaaagagctctatagctgctttataatatccaataaatttttctcaaaactaaaa

SEQ ID NO: 560136 - DNA, 394 bp, Homo sapiens
aaggtgcatgcattcactctccaggctcagtgaagcccacagagctcacagagaaggtgcagggttcatggtgatttgagtttcccaaaagacatggctcctctgctggcccccacccaaggaatgaggtataaaagggagaggtctggtgtttgttatatgacttacagatgcccctccccattcatgctatttttttttattggaagaagtttcctccaggactccttggccacaaggcttcctcaagttcaccttccttgtcctgcattcaaggatcttcctcctcttattgcaaggctaaactctctcttctccctccctcagccagaacagatgaggaacccaaccttgaagatgcgtcgacgcggccgcgaatttagtagtagtaggc

SEQ ID NO: 560137 - DNA, 422 bp, Homo sapiens
  misc_feature (1)..(1): n is a, c, g, or t
nacacatataattatgatgcctgtaattgcatactaatccttacaaacaaacccactttgattaatctatatattccccaataagtcataatcaaatcacaattattcaatattgaattgtctatattttgttaagactttgcttccaatattcccaatggcattattaaacatttgtgtttactgtagctcaacaagtattatgaaggaacttttcaaccaaaagaaatagagctctctcctgtgtgatctctttttccccagaaagtttgttgagagaattaaatgcaataatgaacgtagtaaagtgctaagcttcatacctggcatatggtgagctcaataaatgttagctatgatattattatcagttatgtaaatcagttaaaaacaacaacagttcttcactgtttggtgcactg

SEQ ID NO: 560138 - DNA, 906 bp, Homo sapiens
gaatcacaaagaatctataaaatatgggtaaaaccaatccaggtgcagtggaggacgaaattaaggtacagaaatcagttgcctaggtgtacataagcaatcaccagtgtaaaaacgcatacactcaacatatacaaataccctgtatctcacgtaacaactagcggaactaacaacagagaaatgttcccacgctgactcgataagcacatacaacaatatacatgaaggaaacttgataatgtgacaaacaaagaagaaaagggaacgaacattcgactctaagaactagtgtagagccacctttgaacgttcttctaatacggaaaggccgtaagtactcagtaatagatgaatagtcaacgacctccctaaatttacgctataaaaatttagcgctgactcttgtccctccactttataactttgggagctaaacattgggtattcatggatcacaaagactgggaacaataaaacactgtgggacgactagagcgggcatgtcgagagagctgggcaagggttgacgacacgtaaactgtgggtattctgagccactatactgggtgagggggctcatttcggtataccaaatctcagcaatcatgcgaaaatatcccaatgtaacaaggagtgggcatgttgtccgctccttgcacagtctaacccatagatgtcgcaacttactgctaattaagtttaagtgactgagattgaccttaagaacacttgaagaatgatcttcaggtaggagactaccgaccatgattcttgcagaacagtgaccagggggcattccacggtcttcttaacaaactaaacaagtatagaacagccactatgaagcttttttcgccttccactattaacataggtctaagggcgaagtcacgccacgaatag

SEQ ID NO: 560139 - DNA, 505 bp, Homo sapiens
  misc_feature (80)..(80): n is a, c, g, or t
  misc_feature (195)..(195): n is a, c, g, or t
  misc_feature (197)..(197): n is a, c, g, or t
  misc_feature (380)..(380): n is a, c, g, or t
  misc_feature (389)..(389): n is a, c, g, or t
  misc_feature (397)..(397): n is a, c, g, or t
  misc_feature (412)..(412): n is a, c, g, or t
  misc_feature (457)..(457): n is a, c, g, or t
  misc_feature (481)..(481): n is a, c, g, or t
aggcagtgatgggtggggtgggaaaaagcaccatgtgttttcactctggtccatggaactggtagcctggtccccaggtntcaggctgtcccaggcctgatggtagggcttcactagggacctgctcctttctgcccaggagcttatctgcctcctgctgccatcaacctgctgtctatcgatggtgcccacggnancaggctgttcatgccaagcggtgcctgcaggctcttgccgagctgccctcagccccacctcggcatcctttctgtgctggtcagcagccaaagtccagagggggctgagtcagcaggggctgggcatgttcagtgctggccctggagcatgtgcacacccagttgggtttgttgaacagcacngggggtttnggcttcantttttcctctggaantcaaagtggggttgccagggagttgggggagagaccaggggagcngggacaagggcattttcgggagcnttcaaagggcagaggggtttttta

SEQ ID NO: 560140 - DNA, 117 bp, Homo sapiens
tgtagaaatcgcttgcaaagaatgctgttaagattgcaccgacaataccaccccaccgtgtaaaccaaacgtgctttaaaagccgatgactctttaatgcgtttggtttacacggtg

SEQ ID NO: 560141 - DNA, 424 bp, Homo sapiens
tataaggctatgaaagagaagacatctgaattcattggtaagacaagtggaaccaagccagtggctcatattgaccacatttactgctgacacgctgggttctgctgagttcgctgaggaggtcaatttaaatggttctggcaaactgctcaagatttacaggctgtgccagtcctggaaaaacagtttacaattgttgttcgaggttctaacaaactggtgcttgcagaagctgagcgctccattcatgatgccctatgtgtcatccgttgtttagtgaagaaagagggctcttattgcaggaggtgatgctccagaaaatagagttggccctacgcattcactgaatattcacgaacactgagtggtatggaatcgtactgcgttcgtgcctttgcagatctcatggaggtcatccatctac

SEQ ID NO: 560142 - DNA, 339 bp, Homo sapiens
tggccttggaattggactttaaatggggagcagacaagggaggatggggaatgtgggacccggtgtggtgggcattagggcttggaggggtggggattagggctccaaacccgaaagaaaatgtccccggtcccaggtggttaacaaagttttggcaggtaaaaaatggccgcgttgaaggccccctccttttggctgggaggggcagaactgtgggcagattttcaatgcctttttgaagttttgaccccccaaagaccttttgccttccccctcctccccccctgatgtccctctgtgtttgatagtgatgttggtgaaagtttgtagacccccgga

SEQ ID NO: 560143 - DNA, 385 bp, Homo sapiens
atttttccctttttccttccttatccctgcccaaaaagtagattaaaagatgggtttgccaaggttcttcccttttacaaactgcggtctatggggcgggatcttgtttttcccctactgctcccccaactatattatcatgcaaaagcgggattcttctttggtggagataaagatttcttgagttttgttttaaaattaaagctaaaggatctggtatggccttaaatataatatgcccccagggctttccggggccctgcatacaatttgaggccccccctcccagtttttatatagagggcgagaacctaagtttcagttgattttccaattgaaatgactaaaaaacaaagaagccccccttaaaccaatattgtttcta

SEQ ID NO: 560144 - DNA, 210 bp, Homo sapiens
cgaatcgcggcggggcgcatagggcgtgtgaaagatgacttccagatccttgatgtcatagtgaaaaggtggagggtcgagggctttgacctgatcctggatataagtgttaatgtccggaatatcactgccaaagctcttgcccttgtggcggcgctcgaagcccgccatctccagaagcaggtcatggtaaataaagcgattggccat

SEQ ID NO: 560145 - DNA, 322 bp, Homo sapiens
gtgctgttacggtatttttttttgtagctcctgtcagtctttcttatgagatctttgactgcaattgcatacaacaagccctgcacaggagagtcatacggtgattcccacttgatgaccacggaggctttgcccgtatgaaccacatgcagcttacgggtcgtaagcctgctgtccgggatcatcttcactacaacgcacccagaggatggcctctgctagggtaccactacacggaccagaaacaaatactgctcatccttactgacaatgaccgtcttgttgaggagtgaagcttgccaagctcttcggcttgcgatag

SEQ ID NO: 560146 - DNA, 160 bp, Homo sapiens
aataacatgggagcaggcaggctggacatggaaggtttgcactgaatttgggaagggacttacttagtaacgagccatgatcaggaagctaagaaagttacagtctcaggaatggagcttttaacttacatgtgccatattaaaggtaaaggtacttagg

SEQ ID NO: 560147 - DNA, 140 bp, Homo sapiens
agctcggtacgcggatacgagcacagttgctgagtatgaccacaatccaatcctccgaccatgagtcctcaacccctcagacctctcgagtccacctcttcccctcatcacggtagtcaacacaccacttctgacgtacc

SEQ ID NO: 560148 - DNA, 430 bp, Homo sapiens
  misc_feature (3)..(3): n is a, c, g, or t
  misc_feature (35)..(35): n is a, c, g, or t
  misc_feature (84)..(84): n is a, c, g, or t
  misc_feature (104)..(104): n is a, c, g, or t
  misc_feature (119)..(119): n is a, c, g, or t
  misc_feature (140)..(140): n is a, c, g, or t
  misc_feature (182)..(182): n is a, c, g, or t
  misc_feature (238)..(238): n is a, c, g, or t
  misc_feature (255)..(255): n is a, c, g, or t
ggnggcttatgccctataaacccaagcacttgggnaggctgaagtgggagggatcacttgagcccccaggaattcaaagatcanccctgggcaacagagcaaantccgtgtctcctaanaaacattttttaaaaattgantgtggcagcccaggcaccgtggctcatggctgtaatctcaanactttgggaggctggggcacttttggaggcttgtggatcacaaggtcaagagattnagaccatcctggccaanatggtgaaaccttgtctctactaaaaatacagaaaaatagctggatgtggtggcacgtgcctgtagtcccagctactcgggaggctgaggcaggagaatctcttgaacccgggagtcagaggttgcagtgagccgagatcgcgccactgaactccaccctggtggcagagggaga

SEQ ID NO: 560149 - DNA, 295 bp, Homo sapiens
gccccccgggcttgaaatttaggggtttttcccccgaaaaaatgtttagagattgaaaaaaaccacgcggggcctatgttttgaaaaaataaaaacccggctttttaaaaaaaggtttcccccaggttttttttttttttgggcccccaaaaaacccctttaataagtaaaagcagggataatcctttttttaaccccgggaaatttttgtttaaaagggccctttccgttttgcaaaaaaaggcatgggttttgggtacccttggggaaactaataacccccaattgtttttta

SEQ ID NO: 560150 - DNA, 425 bp, Homo sapiens
  misc_feature (24)..(24): n is a, c, g, or t
ctgctcagccactccctgtgagtncaatagttggcagcaaggagccagacgccacaacaagactatgagcagacttaacgctcctctcaagcagatgccttgttgtcctacaaagattggctactgctgccttacgcctaatgacctttggaattggaaaattcttctccccaagaaatgtatgtatcaagctataatgcacccagattcaccttgtgcagctttcatttcaattttgtctcttcctcttattttctttgcaaatggcttctatgtgtaacgactttcatagcttatcccagttcctacccagaagtgatggtaaattgccaagttctctgaaaaactcatggaagactaccatgtacaaaatctggggagacaggagtttaagactagccctggcaacatagtgagacctcata

SEQ ID NO: 560151 - DNA, 452 bp, Homo sapiens
gaactacctggatatgtagtacttctggcactatctggcatcggaactcctgcccaggattacacttgtcgtctttgaaaccggctcctccaacctgtgtgtgccctcagtctactgctccagtctatgcttgcaacaaccacaaccgcttcaaccctgaggattctaccacctaccagtccaccagtgagacagtctccatcacctacggcaccggcagcaatgacaggcatcctcggatacgacactgtccaggtttgaagtgcatctctgaaaccaatcagatcttcggcctgagcgagacggaacctggctccttcctgtataatgctcccttcgatggcatcctggggctggcctaccccagcatttcctcctccggtgcacaccctgtcttttgaaaaacatctggaaaccaggggcctggattactcaggacctctttctctggt

SEQ ID NO: 560152 - DNA, 191 bp, Homo sapiens
  misc_feature (183)..(183): n is a, c, g, or t
  misc_feature (187)..(187): n is a, c, g, or t
tcagcgccctggggcaatttgtttactcctccaacaaaccaagcctatagggatacaatgagaattcccatttaacagatgaagaaaaagaagctcatcaggagtcacttggtttctaaaaatattcattctggggagggggcaagaatagaaagaccagtagtctgacaaggaagaaggaangggntgaa

SEQ ID NO: 560153 - DNA, 1242 bp, Homo sapiens
tcatggcctggcttctcaccgccgcggagcaaagagggtcccgtggaagcgtgcagggtcggcgtccagtgatgcggcttctggggtgcatccgtgctggcgtgcatgatgtgctgtgatgcaaatgctgtgcccctgtgtgtcctgtgtgatgctgtgatgtgccctgtgtgtgtgcccctgctgtgtgcatgtgactgactgcttgacccctgaatggatgctctctgatgcactgcttgatgcatcaatatctgtgagtgatgtgctggtgctgtgctgtgcatgcacctttcgatggtgcctgtccacctgcctttccaccactacttcatgcaatggcctgaccacttcctgcctgtggctctggtgctctgtcatgcttgctccaggcagcccgacctgctgcctagctgcggctgcagctgcctcacggcgctctacctgctctgggagatgtacctgcacctgagcctgctggccgccaaccccttcgcctgccagcttcgcgcacctgctcaacccctgctgccgcccgccctgcggcggccaggaaccctgaccgacctcctgctctcaggatttttacctcctataactccaccagaaaagtttttactttcccagctgatgctggcacccccacgggaaactcttcaaaaaagacgcctcgccagatagcactgatggacgttggaaacatgggccagtctgtggacattagtgggcttcagttagccttggctgaacgccaatctgcattgccaacggcaaagcaaaagcgagcttccccaagtattctcctgtgacccagacccgggaatcttctaattctggatttggacagtcagtggcttctcaaatcacagaagcttagtcacgcgtgaccaaatgccacctatttgcaggccatttcgacccgcagttattctgtcagcggcttcaaatccgacatttggttggtggttgtaactgtggcatgggtctaaaagcccccgggggtgccgttacacagcggacacaggtgggaacaaaacgcaggtgtgtggtacagaaatagtcgtgtggtgtagcaacaatagcaaatgttgaccagaaccgataaagggcctttatatactcgtaaacgaacacatcttggtggttgatgtgtgtagaccccatgtatactcaggtgctgcccgcagagcatgtcagtgtgacatcacttgttcgtagagttgcattagtcacaaagctgtt

SEQ ID NO: 560154 - DNA, 274 bp, Homo sapiens
ctgaattctatgcaagggcaaagaaggggtgaggaagctgtagaagcaaaaggtggggctgggtgcggtggttcacgcctgtaatctcaggcactttgggaggccaaggcaggcggatcacctgaggtcaggagttcgtgaccagcctggtcaacatggtgaatacccatctctactaaaaatacaaaaattagccaggcgtggtgtcaggcgcctgtaatcccagctactcgctaggctagaggcaggagaatcgcttgaatccgggcagtgg

SEQ ID NO: 560155 - DNA, 356 bp, Homo sapiens
tacagagtgaatgttctgaacaagaaaagggcggaggatatcagcgactacatcctcgccaatcgtcacgactacgttttgccgtccctgtaccgcaagcgttgatacggccatggctttcgaacctatggatgggggaaaacagcttgggaccttgcacatccccatgagcgccatgatgctcattaacgatggccagcaccggcgtttcgctatcgagctggcgctcaaatcagacccatctctacaaaacgagacagccccggttcaaatccattttgaccaagggcttcgtcgatctcagcaaatttttgcagacatcaatagcaaagccgtcaagccatcgtcagcgctga

SEQ ID NO: 560156 - DNA, 586 bp, Homo sapiens
  misc_feature (2)..(2): n is a, c, g, or t
  misc_feature (31)..(31): n is a, c, g, or t
  misc_feature (44)..(44): n is a, c, g, or t
cntaaaaaaattctgggggcgataggtgtcntgaaaaaatgaanccgctgggtgagagtgacaagagagagatgtgattctagaaaatgcactcaaggaagcccctttgacatagttgtcatcttcactgttagaccctaatcaatactcttaatcaatagaagaagcagaagcctgaatccccgaggatggagtagagcagatatccagggaaaaaaacatttggtcagagaggagaacaagagggagcttgctgggggatggccagtgatcaagtgatgtaagtacctccttgctcccccaaatcacgccctctaacaacacaaccgcaatcgtatcttttgtcagcttccagttgtaggaattgcttatgagtgaataggatgagcaggagaaggtgcatggtggagaaattaggtcagcaagacagttgcggtaagattgtggaaagccttgaagtctcgtgcaaagggctgtgaattttattcactctgagatggggagcccctggaacatattcagtgatagcttctggctcatggtttttgttttttttttttaagtttaaatgtttttaatatttact

SEQ ID NO: 560157 - DNA, 240 bp, Homo sapiens
accacctgtatgccggcgctgcagagcacgttgagcgacgagatgtccctatgagcgagcgagcgcccgtcagtgatgaccagggcgatgcggttgatcggtctgggcggcagcagttggtcctgcgtgcactgcagagcctcccccgagatggtgccgcacgccatccactgcaggctcttgatggcttccttgagctcatgcacgttacggatgctggctctgcgcaagatcacgtgc

SEQ ID NO: 560158 - DNA, 426 bp, Homo sapiens
taagatcaagcgagcaggggattggtgccagcaggcgtgatacggagcggacagttgcagagagtgtgctgtgggaaaaactacaaggaaagacagggcggaaagacgattgcagatctcagaaagcagcagagggaaacaagcttttactgcgtccagactcaggcttcaacataataggatacaatatgactttcccccatatcataccaatggcgaaactgaggctgagtgagattcaatggcttgtgcaagggtcaggtctgtagagcccagtctcttacccctaaaccacaaatctctgataaagaataaagcagtagaggaggacagggcgtgatcaaaatcagtgggacagttaacggatgtgcataggacaaggagtagccacactacctgatttccaggaaagcaagggccaaggcc

SEQ ID NO: 560159 - DNA, 263 bp, Homo sapiens
accaaggccgctgatcgctggcatgtgccggatccgaacaatgcgcaggatctggagaagaagcgcgaaaaggcactgctgaatgatttcgagcagtaccagcaacacagcggccgtgagctcaatggagttccgactggtaggtgctgttagacagcttcaaggacgcttggagcaggaaggactaccagaccatcatcaaggtcgcccagaagatcccggacgaggcgctgcaggaagacgagaagctgctgctctggtat

SEQ ID NO: 560160 - DNA, 262 bp, Homo sapiens
ctattttccctgcttttcttttttaaaggggtctgttttgcagtggagaaaacattttggtgaccagacttttgcttaccttttcctattttggtgccaatttttgttttccccccattttaaagccataaacctgaagatgagtaaaactggtgggtttttaataaaacaacaacaaaaacagcagtttgtgataaaacaaaggtttaaatggaccctccccttttatgcccttcaaataattaaatttttttaagaatga

SEQ ID NO: 560161 - DNA, 141 bp, Homo sapiens
ttagaggatgcttggcgcatttttttgggtgcactatctcatgcaggtcccatcagtcaaagcttggataaagcaatcaaaaaaaaggccaagaatgagagaacaagagaggcaagcttcagggggtgggagatgatgttt

SEQ ID NO: 560162 - DNA, 311 bp, Homo sapiens
gcttcttgaagcggtgctggggtgagttgtcgttgtccttggtcaggccctgttcctcctggggctcgcggggcagctgcacgttctgccgcctcgagagcgtgatgcggatcgtcttcccgtgcagcttgtgcccgttcaggtgtctcatgtccagctgggcctggttgccgtccgccatctgcactagggcgttctccttcttattgaacaggatcttcacgcgctgcacgtcaccgtagacgccgaaaagaataaagaggctttggggtgtgactctctttgggttgaggttgctgaccagcaataca

SEQ ID NO: 560163 - DNA, 136 bp, Homo sapiens
tgggccggggaataaaataactttatttcatggtggggagcgggccgatgtccagcctcaaaacttcgggaacggcttctgggtgccggcagcctgtggtgcccttgaagcacgttgaacgcgcagagagaaatgg

SEQ ID NO: 560164 - DNA, 376 bp, Homo sapiens
tgtgggagatgggtctcaaggggccagcaggactttgcagagactggacaagcagaggaccagtttccatgtcagggggcagatgctctgatggggcggggctgatgtttctacagggtgaacatagagaggcaccgtgtctccggagggggtgagtggaggcagctagtgaaatgtcttcatagacagtgaagagctatggcaggcaaggtgggggtaggggggtgggcgagggtggacaacaaaaaaacatgatctcagtcttctcaagagaaagagagaaccgtgagaatctgggcttactggcaacaatttgcaattgatttcacatatggctagcagattcgaggggtaaagggcttgggcaccaggtggc

SEQ ID NO: 560165 - DNA, 363 bp, Homo sapiens
ggatcccctcattacatcgtatgcttctagtcctcagctcaaggagttacatcttttcatggaaccaaatacttatcctgcgtccctagtaccctcttggatgaccatttacggttaggtatcctctcctggattctccattaattccttatgcatatctcctatagagtgtaatgcttacactgtatcacaagtttgtgtttgtatttctatcatttgtcctagactaggaagccctctggagggcaagaagaaatcttgttagatttattaaatctagtacctagcacagtgcttggcacataaggtgagtttcctagatatatgctgatttaaagaataatagagagacagtgtgttcgt

SEQ ID NO: 560166 - DNA, 1249 bp, Homo sapiens
  misc_feature (278)..(278): n is a, c, g, or t
  misc_feature (315)..(315): n is a, c, g, or t
  misc_feature (424)..(424): n is a, c, g, or t
  misc_feature (507)..(507): n is a, c, g, or t
  misc_feature (510)..(510): n is a, c, g, or t
  misc_feature (606)..(606): n is a, c, g, or t
  misc_feature (636)..(636): n is a, c, g, or t
aagaacgctacttcccctatcatagaagagcttatcaccttttcatgattcacgccctgtcagtaatctcagtttatcccttagtctgcttgtccctagatccatgctcatgctccattttcctaaccactctacgatagctaagaactagagcttagattaactagacattcgtcacgaacgcgttcagcgacattatgatacccctgttctcgaggctagtctcctgccacaggcactagtcaagtctcttcagtgtcgctcgagtcagacacacntccgccaatccgcctacggctattctcgttttgtacnactatacaacgtagcagtagagttctagacgggattcccatcgcacgtgttacccagtcaaacattcaaagtgttggtcgctagccaaattgggtacttgagaacacgntacgggagctacgacaccggaccgtactgcgctcggacggtaatgcgtttgcgacacatcacttcactcataactttccgcanccnatgtatgtgccctatgagacctcaggctgtatcgtgtgctagcttcgcttgagctgcttgactaattccgaggtcatgtactcccggacttggaangcgctcgctcaatggcggtattaactaganttagcgatccacagagagaccgctctttgcacgtcatttgacgcatggtccctcagatttagggcttaaggacaccaggaatgcaagttcccgtgacgtactgaaagccagagagccactttgcaccgtctacaacgaccgggggtatactacggtcacatgctctgaaagtctgtggacgcaaaaccacagtttcatgcccatcgtcctagaattaattcccctagggaatctttgaaatagggccgtatttacccttatagaaaccgcgtctaacccctctagagcaaaaaagacaagccacatggccagcgacgaaaacaaacaaagggggggggggacactaagaaactagccgagggggggccaaaggaacagcaaaaaccgaggttgctggcaccagagggggccccactaggcgcacggcgcacataataaaagcaccgacgcgcggcccaggacaaacacgcggagacagcgggacacgccccgcagcagccctggggaaagacccatccgcggcggcgagaccagggcaccatcccgagagagcgcacgggagaccaagcacccgacacagaccacacccatgtccgagcatcgcgagattaag

SEQ ID NO: 560167 - DNA, 284 bp, Homo sapiens
cgcttaactcagccaacatttatgaagcgtctgctggtgcaggcctgttctaggcgccggggacaggccttgcgcggaacctgaaggaggggaggagcagctgtgggaaagggcgttccaggcagagggaacagccagtgcagagcgcctgaggccagctcagcttgagagatcaactgtgcccccctgggagccacaggactttggtcccttaaacagcaggagttcaaggccaggcccggggaagtttgcaatatcggtctcacggaatcccggggggccga

SEQ ID NO: 560168 - DNA, 282 bp, Homo sapiens
ccaggcacagttttagcactttgtgatttcttaattcttacaaccattctgtgaggtgggtactattatgagttcattttatagatgaggaacaaaggcaccagaggggacattatttacttcatgtctggaagctcataagtggcagagtcaactttcccatgcaatccaattcaagaattcaccttgtcaaccactagagattctgcctcttgtgcatattatataatttatggataacattataaaatgaataaaatatgaaatgtatgatatcctttt

SEQ ID NO: 560169 - DNA, 833 bp, Homo sapiens
  misc_feature (48)..(48): n is a, c, g, or t
  misc_feature (76)..(77): n is a, c, g, or t
  misc_feature (107)..(107): n is a, c, g, or t
  misc_feature (115)..(115): n is a, c, g, or t
  misc_feature (163)..(163): n is a, c, g, or t
  misc_feature (185)..(185): n is a, c, g, or t
  misc_feature (189)..(189): n is a, c, g, or t
  misc_feature (218)..(218): n is a, c, g, or t
  misc_feature (233)..(233): n is a, c, g, or t
  misc_feature (248)..(248): n is a, c, g, or t
  misc_feature (253)..(253): n is a, c, g, or t
  misc_feature (262)..(262): n is a, c, g, or t
  misc_feature (266)..(266): n is a, c, g, or t
  misc_feature (275)..(275): n is a, c, g, or t
  misc_feature (278)..(278): n is a, c, g, or t
  misc_feature (284)..(284): n is a, c, g, or t
  misc_feature (294)..(294): n is a, c, g, or t
  misc_feature (336)..(336): n is a, c, g, or t
  misc_feature (349)..(349): n is a, c, g, or t
  misc_feature (361)..(361): n is a, c, g, or t
  misc_feature (383)..(383): n is a, c, g, or t
  misc_feature (386)..(386): n is a, c, g, or t
  misc_feature (414)..(414): n is a, c, g, or t
  misc_feature (456)..(456): n is a, c, g, or t
  misc_feature (534)..(534): n is a, c, g, or t
  misc_feature (536)..(536): n is a, c, g, or t
  misc_feature (538)..(538): n is a, c, g, or t
  misc_feature (541)..(541): n is a, c, g, or t
  misc_feature (563)..(563): n is a, c, g, or t
  misc_feature (604)..(604): n is a, c, g, or t
  misc_feature (606)..(606): n is a, c, g, or t
  misc_feature (618)..(618): n is a, c, g, or t
  misc_feature (654)..(654): n is a, c, g, or t
  misc_feature (759)..(759): n is a, c, g, or t
  misc_feature (769)..(769): n is a, c, g, or t
  misc_feature (815)..(815): n is a, c, g, or t
gttgtttcattaaaacgtactgattttaaaaactaataacttaaaacngccacacgcaaaaaagaaaaacaagagnngtgcacaaaaaattctcctttccttctganggttttangatgcattgttatcattaaccagtcttttactactaatcttaaatggncaattgggacaaacagttctgngacngttcttccaccactgattaagagtggggnggcaggtattagggntaatattcatttggnctttnggggtttcngggnggacttggnggncttgcnagctccagcngccttcttgtccactgctttgatgacacccaccgcaactgtntgtctcatatcangaacagcaaagngacccaaaggtggatagtctgngangctctcaacacacatgggcttgccaggnaccatatcaacaatggcagcatcaccagacttcaagaatttnggggcatcttccagctttttaccagaacggcgatcaatcttttccttcagctcagcaaacttgcatgcaatgtgggcngngnggnaatccaatacaggggcatggcnggggcttatttggcctgggtggttcagggtaatcacctggncngtgaagccagcngcttccattggtgggtcatttttgctgtcaccagcnacgttgccacgacgaacatccttgacagacacattcttgacattgaagcccacattgtccccaggaagagcttcactcaaagcttcatggtgcatttcgacagantttacttccnttgtaacgttgactggagcaaaggtgaccaccataccgggtttganaacaccagtctccactcg

SEQ ID NO: 560170 - DNA, 204 bp, Homo sapiens
aatatctcctatgatagagaacatcaagtgtccatgagaaaaaaagatagtcataagaaatatcaggaaatcatgacccactgtgtcattggcattccaacagaatgtgttcttgagaaaatgttttatacaattctatggtaggccagtgcagcactattaaatatttcatgtaacgttctcgcttcctgagttagaactggg

SEQ ID NO: 560171 - DNA, 696 bp, Homo sapiens
  misc_feature (570)..(570): n is a, c, g, or t
  misc_feature (607)..(607): n is a, c, g, or t
  misc_feature (673)..(673): n is a, c, g, or t
  misc_feature (675)..(675): n is a, c, g, or t
  misc_feature (684)..(684): n is a, c, g, or t
aggagtggaattgctgggccatagggaaactatgttaaacttctgacacttctgcagggcgcctggaggccttggacccacagggcctggacctgagggctctgagccgcttccctgtgcatcagtgcacgcatgctcgcagcgccctccacccagggaactttgcttccacagccttccagatccctgctgggcttgtcatgaatcagcccacacgtgagcaatctgagacacacttaaatggcatctagcgtgggtccggctcccaaagggttagctcaggaggagcacggcagcagccctcctgcctgagtggagagacggggcagatgccaggcatgcctttcgtggttatttttattttgcatgggaaaccatgggaacacaacaaggagaaggcatgtcttccacctgctaggggaacagacctgggacagacagggtccttgggagaaggtggagcccgggaagtgacggctaagaatgtgctgggcagaggccaggggtagacccaggacttgggggtgtgcagtcgtccgattcctatgtggggggtgagggggtgctganaggagccagccccgcatggaacagtgtggccttcccngcagttcaacttggacactgtgctcagaggcacctggcaggctcctgtacccccggaagtctccanantaaaaagcnctttgctcccga

SEQ ID NO: 560172 - DNA, 603 bp, Homo sapiens
ctgactgggagcagagctcctatcagtgtcggtccgcacggggccgccctctcccctgcatctggctctgaatctgaatgtgcccttcttatgaggacaccagtcagtatggatccgagcctaccccgagtgacttcatcttaacttgattacatctgcaaagaccctgctgtccaaataaggtcacattctgaagtacggggggattaagattgcaaggtctgatcctgcggggacacactgtcagagtcatagcacccacctgtgagagggtgatgacctcaaggtcacacaaggtctaggtcgaagccaatgtttagtttcatttcctagatgatcctcagtcaagcagaagcacagacttgaatatctggaggaaatttattacatcaaagaatgacagtgccgggctgcttctactgttccttctgcttcagacttctctcccttcctcgacgaaccaatcctgtcctccttgggctctcagctcaagcataccgaccaaggagccctctctgaactcctaagaacaggtcaaaaaacccttaccaggagctctggttaccatctatgtctccctcactggcctttttaacaccctta

SEQ ID NO: 560173 - DNA, 299 bp, Homo sapiens
cttgtacctacagcgcttactgcgttttttatacagttaaccagacaggatctccctccgttgcacaggctggagtgcagtggaagctatctcagctcactgcaacctccgcctcctggactcaagcaatcctcccacctcagcctcccaagtagctgggactgcaggtgcgagccaccacgttcagctaatttttagtattttttgcagacacagggtttcaccatgttgttcaggctggtcttgagttcctgaactcaagccatctgcccgccttggactccagcgtgctgatacaa

SEQ ID NO: 560174 - DNA, 272 bp, Homo sapiens
acatgttcataactaacctgtcacaccctagtcaagacctctccccatgctccaatataactacttccacatctatctaacctcttacacgattcaacaaagctgacaatcttctataaaccatacatcaatcttctggcttctgaaatactacaatgccatttaattcgttttttcatgcatcactggttacagtttcagtatcttttcatggcttctccttctacagacctctaaaaggcaagtgttccttacagtgttatccgtgaggg

SEQ ID NO: 560175 - DNA, 108 bp, Homo sapiens
caggagctgtatgtcatcccccttcgtcacagtgatcttagtctggatagaattatcttcgtgagagcacgcttgttatgtagactgccgctgagagaggaggtcaca

SEQ ID NO: 560176 - DNA, 348 bp, Homo sapiens
tagcgtagacatccgccttcgtgctctctggtcatccctgttcccttgttttaaatttttttcccaaaaatagtcgacctggatgcttgcagtgttgaggactgagcggcggtgtatcacagtggtcacagcgagcaccaaggccaggtggctccagcagctggtcgatgccataggccaggccaccctcaaagggcaagtgtcgctgcacaatgcgagcatcatcctcacccaccatgagctcaccgggccgcgttcggctgcaggagaaagagatgggggtcccatgcatggttcgaagtgggcccaggttgggcaggtcagatgccaaggcctcgacattgcgaa

SEQ ID NO: 560177 - DNA, 116 bp, Homo sapiens
agcgcggtaccgtctgagcagctgggaaaaatatgatacccgtgttctgataatttttacaaaacttaaaaactatttttatttatgtatttatgagacagagtcttgctctgttg

SEQ ID NO: 560178 - DNA, 201 bp, Homo sapiens
caccaccaccctatatatagtgatgaacatacgactgtttgtgttcattcctgagttacttcactgagaatcatagtctccaatctcatccaggtttgctgcaaatgctattaattcattcctttttcatggctgagctagtattccatcatatatatcataattgtttcttgccttactcactgatctataggagtggtg

SEQ ID NO: 560179 - DNA, 2401 bp, Homo sapiens
aggggaacaggaaagaaaagctaaacctgcaacaaagtgtcctgtgcccagaacgcggttaggaagtgtgtgcatacgtctgaaccctaaatggttctcagttctgtaaacttctcctcccactgggtggagtagggcctttaagagcagctggaatgcagttcccctgatcagcgtagccagttgttgcctgtctgaacctctgccagtcctggagactggtgccctgagctccaaccagcgggcctcatcctacaccctcaccaccgcaacttctcacccgagcaagaagcagctcccagagagaaagaacgttcccacctgcctagccatgggagaggacgctgcacaggccgaaaagttccagcaccctgggtctgacatgcggcaggaaaagccctcgagccccagcccgatgccttcctccacaccaagccccagcctgaacctagggaacacagaggaggccatccgggacaactcacaggtgaacgcagtcacggtgctcacgctcctggacaagctggtgaacatgctagacgctgtgcaggagaaccagcacaagatggagcagcgacagatcagtttggagggctccgtgaagggcatccagaatgacctcaccaagctctccaagtaccaggcctccaccagcaacacggtgagcaagctgctggagaagtcccgcaaggtcagcgcccacacgcgcgcggtcaaagagcgcatggataggcagtgcgcacaggtgaagcggctggagaacaaccacgcccagctcctccgacgcaaccatttcaaagtgctcatcttccaggaggaaaatgagatccctgccagcgtgtttgtgaaacagcccgtttccggtgccgtggaagggaaggaggagcttccggatgaaaacaaatccctggaggaaaccctgcacaccgtggacctctcctcagatgatgatttgccccacgatgaggaggccctggaagacagtgccgaggaaaaggtggaagaaagtagggcagagaaaataaaaagatccagcctgaagaaagtggatagcctcaagaaagcattttctcgccagaacatcgagaaaaagatgaacaagctggggacaaagatcgtatctgtagagaggagagagaagattaagaaatctctcacgtcaaatcaccagaaaatatcctcaggaaaaagctcccccttcaaggtttctcccctcactttcgggcggaagaaagtccgagagggagaaagccatgcagaaaatgagaccaagtcagaagacctgcctagcagtgagcagatgccaaatgaccaggaagaggagtcctttgcagagggtcattccgaagcgtccctcgccagcgctctggtggaaggggaaattgcagaggaggctgctgagaaggcgacctccagggggagtaactcggggatggacagcaacatcgacttgactattgtggaagatgaagaggaggagtcagtggccctggaacaggcacagaaggtacgctatgagggtagctacgcgctaacatccgaggaggcggagcgctccgatggggaccccgtgcagcccgccgtgctccaggtgcaccagacctcctgagcttagagccaccgtgccatcctgtgctgtgctcaagcgggcagccagggctgaagaacaaactcttgcacatctccagcacgactcacccactcctgcgttcctgtccaggcagtaatcattgaccatatagtcatagtaagacacacgagaccaggctttaccatgaaagcgacctgtcacggactccacttttaatttgctcttaggttctatctctgtagaatgtctccaagattgaagaagaaactgagcagttgaaaaatgctaatctctttgacttagtcagaaaaaaacagaggataattaagatactagtcatgaaaagtgattcattcttttttgtcattccataagcttgctgaatagtgtaccggtaatatattgtatttccaccgtactctgtgaatctaattattattctttaagtgttgatatataatatacataaatatgtaagctaaacatataactatatgttttaagaagaaaacatctacgaaaggtaaaaagagatgatcagttggttgtttacttgctagaaaccattgttttattgcaaacgaaggaaaaatgaagagattataaaagtcagctaatgaagtaagatacgtagtaaagtcaggactattcaaaaagtaagaaagaaaatttggaaaatgagagaaacaggaaacaaagaatgccgaaaagaatgaaaacagagaaaaaatgtatgtgcttgaaagtaaaatacttacaatagtagcttaactatttcactctttaaataaaaatactaaagaagttcgt

SEQ ID NO: 560180 - DNA, 443 bp, Homo sapiens
  misc_feature (18)..(18): n is a, c, g, or t
  misc_feature (27)..(27): n is a, c, g, or t
  misc_feature (62)..(62): n is a, c, g, or t
aaaaaacccaccggggangtcccgggnccctgccttaagtaaaggcaagagaaagttgaacnccttaacaaattaatttggatcccatcccattggcctaatagtttgtaatattgttcccccacccaaatcctcatgttgaactgtaatcccctaatgctggaggtggggccctggtggaaagtgtctggcttattggggcagacctctcatgactttgtgttgtcttcagatggttagttctcatgagatctggtcatttaaaagtgtgtggcgccttctccccgaccttgctcccattctcaccatgtgatgtgcctgccttgccttcgccttccgccatgattggaagcttcctgaggcctccccagaagcagatgccactatgcttcctgtacagcctgcagaaacataagccaattaaacctcttttctttataata

SEQ ID NO: 560181 - DNA, 458 bp, Homo sapiens
tttacagtattaggagatatttatttagtacatacgataggtcatgctctgtctgagccctgggaatacagcatgtaacacagataaggtccttgcctttaaacagcttacatcctctctgaggattgacattttagtcaaatagcgagagccagctatgcaaagatctgttgaaacagtattctgagcaaagaaaacctctggtccaaaggcgcaagactggggattagcctggtgtgctgaaggaactgacagaggtcagtgtgtcaggagcccatgagagttttattggctagtctttgaagtgcattctgctcttccagcagaatatccagttggtcagatatcccatagcaatttcccttgcttcaatcacattggtacttctggaaatatggatatgcaatctccttaactggaatgtaacctcttgaagagcagacttatatttaatttgt

SEQ ID NO: 560182 - DNA, 3570 bp, Homo sapiens
aggggaacaggaaagaaaagctaaacctgcaacaaagtgtcctgtgcccagaacgcggttaggaagtgtgtgcatacgtctgaaccctaaatggttctcagttctgtaaacttctcctcccactgggtggagtagggcctttaagagcagctggaatgcagttcccctgatcagcgtagccagttgttgcctgtctgaacctctgccagtcctggagactggtgccctgagctccaaccagcgggcctcatcctacaccctcaccaccgcaacttctcacccgagcaagaagcagctcccagagagaaagaacgttcccacctgcctagccatgggagaggacgctgcacaggccgaaaagttccagcaccctgggtctgacatgcggcaggaaaagccctcgagccccagcccgatgccttcctccacaccaagccccagcctgaacctagggaacacagaggaggccatccgggacaactcacaggtgaacgcagtcacggtgctcacgctcctggacaagctggtgaacatgctagacgctgtgcaggagaaccagcacaagatggagcagcgacagatcagtttggagggctccgtgaagggcatccagaatgacctcaccaagctctccaagtaccaggcctccaccagcaacacggtgagcaagctgctggagaagtcccgcaaggtcagcgcccacacgcgcgcggtcaaagagcgcatggataggcagtgcgcacaggtgaagcggctggagaacaaccacgcccagctcctccgacgcaaccatttcaaagtgctcatcttccaggaggaaaatgagatccctgccagcgtgtttgtgaaacagcccgtttccggtgccgtggaagggaaggaggagcttccggatgaaaacaaatccctggaggaaaccctgcacaccgtggacctctcctcagatgatgatttgccccacgatgaggaggccctggaagacagtgccgaggaaaaggtggaagaaagtagggcagagaaaataaaaagatccagcctgaagaaagtggatagcctcaagaaagcattttctcgccagaacatcgagaaaaagatgaacaagctggggacaaagatcgtatctgtagagaggagagagaagattaagaaatctctcacgtcaaatcaccagaaaatatcctcaggaaaaagctcccccttcaaggtttctcccctcactttcgggcggaagaaagtccgagagggagaaagccatgcagaaaatgagaccaagtcagaagacctgcctagcagtgagcagatgccaaatgaccaggaagaggagtcctttgcagagggtcattccgaagcgtccctcgccagcgctctggtggaaggggaaattgcagaggaggctgctgagaaggcgacctccagggggagtaactcggggatggacagcaacatcgacttgactattgtggaagatgaagaggaggagtcagtggccctggaacaggcacagaaggtacgctatgagggtagctacgcgctaacatccgaggaggcggagcgctccgatggggaccccgtgcagcccgccgtgctccaggtgcaccagacctcctgagcttagagccaccgtgccatcctgtgctgtgctcaagcgggcagccagggctgaagaacaaactcttgcacatctccagcacgactcacccactcctgcgttcctgtccaggcagtaatcattgaccatatagtcatagtaagacacacgagaccaggctttaccatgaaagcgacctgtcacggactccacttttaatttgctcttaggttctatctctgtagaatgtctccaagattgaagaagaaactgagcagttgaaaaatgctaatctctttgacttagtcagaaaaaaacagaggataattaagatactagtcatgaaaagtgattcattcttttttgtcattccataagcttgctgaatagtgtaccggtaatatattgtatttccaccgtactctgtgaatctaattattattctttaagtgttgatatataatatacataaatatgtaagctaaacatataactatatgttttaagaagaaaacatctacgaaaggtaaaaagagatgatcagttggttgtttacttgctagaaaccattgttttattgcaaacgaaggaaaaatgaagagattataaaagtcagctaatgaagtaagatacgtagtaaagtcaggactattcaaaaagtaagaaagaaaatttggaaaatgagagaaacaggaaacaaagaatgccgaaaagaatgaaaacagagaaaaaatgtatgtgcttgaaagtaaaatacttacaatagtagcttaactatttcactctttaaataaaaatactaaagaagttcgtatatcctggaataacatgtcatcttcaaaatatttttattttctaatatttttaataataaacattttatagtgttaaagctgtatttttcttaataaataaaggacattacaaatatttctttaaggaagttcaaaaggatgttgtcttgttaacattggaacgaatataaatcttcaaaatacaattaatatatactgttttgtggaaacttagcctcatactattctttaatgctcttcaaatttaaactaacccttacattccatgtgatgtgatgtaggcttataagatgctaaaatctataggttttggaagtgaaagattctattttttctttttttgtacataatgggaatttcattccagattatattttatttacatattaatttcacagaatattaatatttcttaacttcttaaagcatgctagcgttttatgtatatgtacacatatattcagacagggtaattttatctgctgcctaacattgtactaaaatattgctttatctgtttttaattacaaaatgctaatgatttcttaaattatagtttaaagacaattggcccaggaagcaaatcccctgcctttagtatgaaccactataagtaaccttacaaatagagttaatccaagacaatattaacaaactgtgctttgtctttaataaaagggataggattaacaaacatattgatggcataacctattcagctatgtccttatttttgcaataatgtaacctcaaatattggattgttgaaccaacaatggctgtgttaaagaagattaaataaaccgaaaaataaaaagcatgaaaaaaaaaaaaaaaaaaataaaaaaaaaaaaaaaaaaaaaaaagaggggggaaaaaaaaaagaagaaaaaaaaaattaaagaggctgagccagcgtgagtcaacaaaaccaaagcgggccgcccgccacaaccaaccacggagcgacaccatacattaactcgaagaccaacacaccaggtgaaaaagagagaccgacaagacagccggcccgcaacacaagcttatcacaccacctacaggagcaggcgagatgacactaccacgagcgaaccagaagcaaaacaccagcccaatcgccaggcgggacagagtaaggaaagaccagcggaagcgcaaaacccc

SEQ ID NO: 560183 - DNA, 3553 bp, Homo sapiens
tttacagtattaggagatatttatttagtacatacgataggtcatgctctgtctgagccctgggaatacagcatgtaacacagataaggtccttgcctttaaacagcttacatcctctctgaggattgacattttagtcaaatagcgagagccagctatgcaaagatctgttgaaacagtattctgagcaaagaaaacctctggtccaaaggcgcaagactggggattagcctggtgtgctgaaggaactgacagaggtcagtgtgtcaggagcccccatccataccccctccagtgaaaagcaggatagggcaactccttcaggatgatggaaaatgcctcagactggctggctgtgtcactgtccttgacttctcctcacaactagtatgacaggttgatgtggccgagcgtcagaaaatcgagagaacagttagcagtgcttccaggtctccagagccacaatgcaggtgaacgcagtcacggtgctcacgctcctggacaagctggtgaacatgctagacgctgtgcaggagaaccagcacaagatggagcagcgacagatcagtttggagggctccgtgaagggcatccagaatgacctcaccaagctctccaagtaccaggcctccaccagcaacacggtgagcaagctgctggagaagtcccgcaaggtcagcgcccacacgcgcgcggtcaaagagcgcatggataggcagtgcgcacaggtgaagcggctggagaacaaccacgcccagctcctccgacgcaaccatttcaaagtgctcatcttccaggaggaaaatgagatccctgccagcgtgtttgtgaaacagcccgtttccggtgccgtggaagggaaggaggagcttccggatgaaaacaaatccctggaggaaaccctgcacaccgtggacctctcctcagatgatgatttgccccacgatgaggaggccctggaagacagtgccgaggaaaaggtggaagaaagtagggcagagaaaataaaaagatccagcctgaagaaagtggatagcctcaagaaagcattttctcgccagaacatcgagaaaaagatgaacaagctggggacaaagatcgtatctgtagagaggagagagaagattaagaaatctctcacgtcaaatcaccagaaaatatcctcaggaaaaagctcccccttcaaggtttctcccctcactttcgggcggaagaaagtccgagagggagaaagccatgcagaaaatgagaccaagtcagaagacctgcctagcagtgagcagatgccaaatgaccaggaagaggagtcctttgcagagggtcattccgaagcgtccctcgccagcgctctggtggaaggggaaattgcagaggaggctgctgagaaggcgacctccagggggagtaactcggggatggacagcaacatcgacttgactattgtggaagatgaagaggaggagtcagtggccctggaacaggcacagaaggtacgctatgagggtagctacgcgctaacatccgaggaggcggagcgctccgatggggaccccgtgcagcccgccgtgctccaggtgcaccagacctcctgagcttagagccaccgtgccatcctgtgctgtgctcaagcgggcagccagggctgaagaacaaactcttgcacatctccagcacgactcacccactcctgcgttcctgtccaggcagtaatcattgaccatatagtcatagtaagacacacgagaccaggctttaccatgaaagcgacctgtcacggactccacttttaatttgctcttaggttctatctctgtagaatgtctccaagattgaagaagaaactgagcagttgaaaaatgctaatctctttgacttagtcagaaaaaaacagaggataattaagatactagtcatgaaaagtgattcattcttttttgtcattccataagcttgctgaatagtgtaccggtaatatattgtatttccaccgtactctgtgaatctaattattattctttaagtgttgatatataatatacataaatatgtaagctaaacatataactatatgttttaagaagaaaacatctacgaaaggtaaaaagagatgatcagttggttgtttacttgctagaaaccattgttttattgcaaacgaaggaaaaatgaagagattataaaagtcagctaatgaagtaagatacgtagtaaagtcaggactattcaaaaagtaagaaagaaaatttggaaaatgagagaaacaggaaacaaagaatgccgaaaagaatgaaaacagagaaaaaatgtatgtgcttgaaagtaaaatacttacaatagtagcttaactatttcactctttaaataaaaatactaaagaagttcgtatatcctggaataacatgtcatcttcaaaatatttttattttctaatatttttaataataaacattttatagtgttaaagctgtatttttcttaataaataaaggacattacaaatatttctttaaggaagttcaaaaggatgttgtcttgttaacattggaacgaatataaatcttcaaaatacaattaatatatactgttttgtggaaacttagcctcatactattctttaatgctcttcaaatttaaactaacccttacattccatgtgatgtgatgtaggcttataagatgctaaaatctataggttttggaagtgaaagattctattttttctttttttgtacataatgggaatttcattccagattatattttatttacatattaatttcacagaatattaatatttcttaacttcttaaagcatgctagcgttttatgtatatgtacacatatattcagacagggtaattttatctgctgcctaacattgtactaaaatattgctttatctgtttttaattacaaaatgctaatgatttcttaaattatagtttaaagacaattggcccaggaagcaaatcccctgcctttagtatgaaccactataagtaaccttacaaatagagttaatccaagacaatattaacaaactgtgctttgtctttaataaaagggataggattaacaaacatattgatggcataacctattcagctatgtccttatttttgcaataatgtaacctcaaatattggattgttgaaccaacaatggctgtgttaaagaagattaaataaaccgaaaaataaaaagcatgaaaaaaaaaaaaaaaaaaataaaaaaaaaaaaaaaaaaaaaaaagaggggggaaaaaaaaaagaagaaaaaaaaaattaaagaggctgagccagcgtgagtcaacaaaaccaaagcgggccgcccgccacaaccaaccacggagcgacaccatacattaactcgaagaccaacacaccaggtgaaaaagagagaccgacaagacagccggcccgcaacacaagcttatcacaccacctacaggagcaggcgagatgacactaccacgagcgaaccagaagcaaaacaccagcccaatcgccaggcgggacagagtaaggaaagaccagcggaagcgcaaaacccc

SEQ ID NO: 560184 - DNA, 325 bp, Homo sapiens
accgattatcatcagcgccagcatcaccggggaccttagaaatgcaagttctcaggccccaccccagaccaaccgaatcagaaacggtgaatgaggcccagcaatctgtgctttaacaaaccttcaggtgactctgatgcatggacagtggttctcagccagtagcaatttggtcacttaggggacatttggaaatgtctgaagacattttgggttataaaggaagtgctaatggtatctagaaggcagaagccagggacgctgttaaataccctacagcgcacaggacagccccctctccacagggtaccgaagctcgacattc

SEQ ID NO: 560185 - DNA, 3385 bp, Homo sapiens
aggggaacaggaaagaaaagctaaacctgcaacaaagtgtcctgtgcccagaacgcggttaggaagtgtgtgcatacgtctgaaccctaaatggttctcagttctgtaaacttctcctcccactgggtggagtagggcctttaagagcagctggaatgcagttcccctgatcagcgtagccagttgttgcctgtctgaacctctgccagtcctggagactggtgccctgagctccaaccagcgggcctcatcctacaccctcaccaccgcaacttctcacccgagcaagaagcagctcccagagagaaagaacgttcccacctgcctagccatgggagaggacgctgcacaggccgaaaagttccagcaccctgggtctgacatgcggcaggaaaagccctcgagccccagcccgatgccttcctccacaccaagccaccaagctctccaagtaccaggcctccaccagcaacacggtgagcaagctgctggagaagtcccgcaaggtcagcgcccacacgcgcgcggtcaaagagcgcatggataggcagtgcgcacaggtgaagcggctggagaacaaccacgcccagctcctccgacgcaaccatttcaaagtgctcatcttccaggaggaaaatgagatccctgccagcgtgtttgtgaaacagcccgtttccggtgccgtggaagggaaggaggagcttccggatgaaaacaaatccctggaggaaaccctgcacaccgtggacctctcctcagatgatgatttgccccacgatgaggaggccctggaagacagtgccgaggaaaaggtggaagaaagtagggcagagaaaataaaaagatccagcctgaagaaagtggatagcctcaagaaagcattttctcgccagaacatcgagaaaaagatgaacaagctggggacaaagatcgtatctgtagagaggagagagaagattaagaaatctctcacgtcaaatcaccagaaaatatcctcaggaaaaagctcccccttcaaggtttctcccctcactttcgggcggaagaaagtccgagagggagaaagccatgcagaaaatgagaccaagtcagaagacctgcctagcagtgagcagatgccaaatgaccaggaagaggagtcctttgcagagggtcattccgaagcgtccctcgccagcgctctggtggaaggggaaattgcagaggaggctgctgagaaggcgacctccagggggagtaactcggggatggacagcaacatcgacttgactattgtggaagatgaagaggaggagtcagtggccctggaacaggcacagaaggtacgctatgagggtagctacgcgctaacatccgaggaggcggagcgctccgatggggaccccgtgcagcccgccgtgctccaggtgcaccagacctcctgagcttagagccaccgtgccatcctgtgctgtgctcaagcgggcagccagggctgaagaacaaactcttgcacatctccagcacgactcacccactcctgcgttcctgtccaggcagtaatcattgaccatatagtcatagtaagacacacgagaccaggctttaccatgaaagcgacctgtcacggactccacttttaatttgctcttaggttctatctctgtagaatgtctccaagattgaagaagaaactgagcagttgaaaaatgctaatctctttgacttagtcagaaaaaaacagaggataattaagatactagtcatgaaaagtgattcattcttttttgtcattccataagcttgctgaatagtgtaccggtaatatattgtatttccaccgtactctgtgaatctaattattattctttaagtgttgatatataatatacataaatatgtaagctaaacatataactatatgttttaagaagaaaacatctacgaaaggtaaaaagagatgatcagttggttgtttacttgctagaaaccattgttttattgcaaacgaaggaaaaatgaagagattataaaagtcagctaatgaagtaagatacgtagtaaagtcaggactattcaaaaagtaagaaagaaaatttggaaaatgagagaaacaggaaacaaagaatgccgaaaagaatgaaaacagagaaaaaatgtatgtgcttgaaagtaaaatacttacaatagtagcttaactatttcactctttaaataaaaatactaaagaagttcgtatatcctggaataacatgtcatcttcaaaatatttttattttctaatatttttaataataaacattttatagtgttaaagctgtatttttcttaataaataaaggacattacaaatatttctttaaggaagttcaaaaggatgttgtcttgttaacattggaacgaatataaatcttcaaaatacaattaatatatactgttttgtggaaacttagcctcatactattctttaatgctcttcaaatttaaactaacccttacattccatgtgatgtgatgtaggcttataagatgctaaaatctataggttttggaagtgaaagattctattttttctttttttgtacataatgggaatttcattccagattatattttatttacatattaatttcacagaatattaatatttcttaacttcttaaagcatgctagcgttttatgtatatgtacacatatattcagacagggtaattttatctgctgcctaacattgtactaaaatattgctttatctgtttttaattacaaaatgctaatgatttcttaaattatagtttaaagacaattggcccaggaagcaaatcccctgcctttagtatgaaccactataagtaaccttacaaatagagttaatccaagacaatattaacaaactgtgctttgtctttaataaaagggataggattaacaaacatattgatggcataacctattcagctatgtccttatttttgcaataatgtaacctcaaatattggattgttgaaccaacaatggctgtgttaaagaagattaaataaaccgaaaaataaaaagcatgaaaaaaaaaaaaaaaaaaataaaaaaaaaaaaaaaaaaaaaaaagaggggggaaaaaaaaaagaagaaaaaaaaaattaaagaggctgagccagcgtgagtcaacaaaaccaaagcgggccgcccgccacaaccaaccacggagcgacaccatacattaactcgaagaccaacacaccaggtgaaaaagagagaccgacaagacagccggcccgcaacacaagcttatcacaccacctacaggagcaggcgagatgacactaccacgagcgaaccagaagcaaaacaccagcccaatcgccaggcgggacagagtaaggaaagaccagcggaagcgcaaaacccc

SEQ ID NO: 560186 - DNA, 322 bp, Homo sapiens
ggtcgaccgacagagagagactccctctctgtcgcccaggctggagtgcagtggcaaatctcagctcactgcaacctctgcctcctgggttcaagcgattctcatgcctcaacctccgagtagctaggagtaaatgtatgtgccaccatgcccagctaatttttgtatccctaacgaagacagggtttcaccatgttggccagggtggtctcgaacttctggcctcaagcgatccgcccgcctcagcctcccaaagtgctgggattacaggcgtaacgactgcgacacgtggtttatcgctttctctgtgctcttccctctg

SEQ ID NO: 560187 - DNA, 1095 bp, Homo sapiens
  misc_feature (1032)..(1032): n is a, c, g, or t
  misc_feature (1051)..(1051): n is a, c, g, or t
  misc_feature (1053)..(1053): n is a, c, g, or t
  misc_feature (1056)..(1056): n is a, c, g, or t
  misc_feature (1062)..(1062): n is a, c, g, or t
aggggaacaggaaagaaaagctaaacctgcaacaaagtgtcctgtgcccagaacgcggttaggaagtgtgtgcatacgtctgaaccctaaatggttctcagttctgtaaacttctcctcccactgggtggagtagggcctttaagagcagctggaatgcagttcccctgatcagcgtagccagttgttgcctgtctgaacctctgccagtcctggagactggtgccctgagctccaaccagcgggcctcatcctacaccctcaccaccgcaacttctcacccgagcaagaagcagctcccagagagaaagaacgttcccacctgcctagccatgggagaggacgctgcacaggccgaaaagttccagcaccctgggtctgacatgcggcaggaaaagccctcgagccccagcccgatgccttcctccacaccaagccccagcctgaacctagggaacacagaggaggccatccgggacaactcacaggtgaacgcagtcacggtgctcacgctcctggacaagctggtgaacatgctagacgctgtgcaggagaaccagcacaagatggagcagcgacagatcagtttggagggctccgtgaagggcatccagaatgacctcaccaagctctccaagtaccaggcctccaccagcaacacggtgagcaagctgctggagaagtcccgcaaggtcagcgcccacacgcgcgcggtcaaagagcgcatggataggcagtgcgcacaggtgaagcggctggagaacaaccacgcccagctcctccgacgcaaccatttcaaagtgctcatcttccaggaggaaaatgagatccctgccagcgtgtttgtgaaacagcccgtttccggtgccgtggaagggaaggaggagcttccggatgaaaacaaatccctggaggaaaccctgcacaccgtggacctctcctcagatgatgatttgccccacgatgaggaggccctggaagacagtgccgaggaaaaggtggaagaaagtagggcagagaaaattaaaaaagntcccagcctttaaggaaantnggntaggcnttcaaggaagcttttttttttggcccagaacct

SEQ ID NO: 560188 - DNA, 917 bp, Homo sapiens
  misc_feature (165)..(165): n is a, c, g, or t
  misc_feature (199)..(199): n is a, c, g, or t
  misc_feature (201)..(201): n is a, c, g, or t
  misc_feature (225)..(225): n is a, c, g, or t
  misc_feature (248)..(248): n is a, c, g, or t
  misc_feature (260)..(260): n is a, c, g, or t
  misc_feature (274)..(275): n is a, c, g, or t
  misc_feature (297)..(297): n is a, c, g, or t
  misc_feature (305)..(305): n is a, c, g, or t
  misc_feature (312)..(312): n is a, c, g, or t
  misc_feature (325)..(325): n is a, c, g, or t
  misc_feature (341)..(341): n is a, c, g, or t
agtcagagcccgcctttaggagttaaatataatagaaaaaccaaaatgatatttttattttaggagggtttaaatagggttcagagatcataggaatattaggagttacctctctgtggaggtatgacttgtaatctcattttcctttcaaaaaaaaaaaaaaangctaagggggctggtggggatgtaaacatgtttncngatgcagaagggttaagggtaggnacagccttcctgacccaggggcntgaaaaccattnacagggattaatannttctcctacttccacaatggtngccaaaangtctggnatcccagcatttnggtttggcaggagaantggatgccatccctaagagctgggactcactggtgtctcttcatcacaagggagaagggagtccaaactttaatcactccattggtatggctcccggagataaaacagtaaaaaatccgcaagccatagttcactttaaacacaatttcaagctcactttggaagtacggggggccgggaatgctaggtgagcatgaagataaaccctgtgctactatgtagcaaccccaatgggaccttttgggagaaataggtctgagtcgggatctggggggacatcaataagagcccttcacataaaatttttgaatccaggagacgtgtcacgaggtgcaaaaaagttctcagattgggagaggtcccctcaacaattctggcggccttacttggaatttggacccctgcacgtgccattcagggatattcattccggaccgcaacaagggaagggatggtcccagacaacttcgggtaaaaaaacgacgaggacctggttgatgagaagggaggaacacaatgagaaacacacagacaaacgaaggacaaaaaaaaccaaagatgagacacacaacaaaa

SEQ ID NO: 560189 - DNA, 690 bp, Homo sapiens
  misc_feature (8)..(8): n is a, c, g, or t
  misc_feature (136)..(136): n is a, c, g, or t
  misc_feature (211)..(211): n is a, c, g, or t
  misc_feature (267)..(267): n is a, c, g, or t
  misc_feature (276)..(276): n is a, c, g, or t
  misc_feature (279)..(279): n is a, c, g, or t
  misc_feature (285)..(285): n is a, c, g, or t
  misc_feature (324)..(324): n is a, c, g, or t
  misc_feature (336)..(336): n is a, c, g, or t
  misc_feature (338)..(339): n is a, c, g, or t
  misc_feature (341)..(342): n is a, c, g, or t
  misc_feature (351)..(351): n is a, c, g, or t
  misc_feature (354)..(354): n is a, c, g, or t
  misc_feature (366)..(366): n is a, c, g, or t
  misc_feature (373)..(373): n is a, c, g, or t
  misc_feature (379)..(379): n is a, c, g, or t
  misc_feature (383)..(383): n is a, c, g, or t
  misc_feature (454)..(454): n is a, c, g, or t
  misc_feature (499)..(500): n is a, c, g, or t
  misc_feature (502)..(502): n is a, c, g, or t
  misc_feature (530)..(530): n is a, c, g, or t
  misc_feature (533)..(533): n is a, c, g, or t
  misc_feature (566)..(566): n is a, c, g, or t
  misc_feature (593)..(593): n is a, c, g, or t
  misc_feature (595)..(595): n is a, c, g, or t
  misc_feature (597)..(597): n is a, c, g, or t
  misc_feature (603)..(603): n is a, c, g, or t
  misc_feature (615)..(615): n is a, c, g, or t
  misc_feature (627)..(627): n is a, c, g, or t
  misc_feature (676)..(676): n is a, c, g, or t
gatttggncacacatgatagcttggttaaatacttaacagggcaatcacagggaagatgactagatttcctaacatccatgagtgaaatttatagaagtatactctctgacttgatataaaggaagattttaaaanacatgactgttcaggagtgttcaagtagggtcagatgaccagtgattggcaatacttcgtaagccggagcaagtnagatctgagccactgttctatcggtagggtgtctgtggtattccttggtcaaagangtactctangcnacttcngtctcacgaattactatcaccctcgtgggcatacatganggttaccctagngnngnngtttcgggnggnggttattttggntcctggngtagtnaganaggggccttcatgcagatacccttttcagttctccatacacccatatcacaagtggtcacaaaaacacccngtaacctttacttggctttacccacattaacaatatgctcaatannancagtttgactcccaagcctaggtcaggnctnagtgtttctcatgagccatagtcttaggctgangagccttgagagttggtggagggaganancncctgcncgcagggggctntgatcacagaantctgtagaaagagtgggatctaaagagtcctggggaggcaggcctaaangtccaggcctggca

SEQ ID NO: 560190 - DNA, 82 bp, Homo sapiens
  misc_feature (73)..(73): n is a, c, g, or t
tattgcttatttagatacaggaaagtgcagcacagagtacttacctgactttttcaagacccgtaagtaccanaatagtata

SEQ ID NO: 560191 - DNA, 1077 bp, Homo sapiens
gaagggcccgtcccgccttccccggtgcgccatgtgagccccagtgtgcggtttgcagaagcctgtgtgcagacgggtgcaggacggatgtgattatggaagctctgcggtcatacaaccaggagcactcccagagcttcacgtttgatgatgcccatagcgaggaggacctggaagagacatggcggatgctgctggatctccgtcctggaacagggcttgcctagcctctcctagcgtgatcatctggctgcgagatgttgtaccagaaatacctgtactcgcggggaccctgatagaatgacgctggcatcgccagttgcatccaagctcgcgctaagatgcctaggcaggggcgactaggctctggcttatgacttggagcgaatcttctgttctacctcgaaagtgcgtgccagatccccgaggatggtcctgccaagcaacgaatggggagtgtctcgtaacgtggggaaggtcgccgtacgacacgatgggcccttgtagactagagccctccgtgtcggtcaagcaaggccccattgtgttgcgttaccaagacttgcgtggggaccaggcaaggatgcgaccacgccccgtagtagggctgcacagcgctccaccaggatgcccgatgttgcgggggacatggctacccggtatgaagggacggagggccttcgccctcaacggagtgttcccatgctatggtgtcggacctttgccggggctcccatgcattccatggcttacaccgggtgacttcgcggacaacctacagtgttgccggccaaggcagcgcctgatattgaaggggacgccctgggaaatggggaggtgggcgggccactttgcatagaacgttgaccctctgacaatggggagcctgtgatcgcctggctaggagtgaacttccgtgagacgggggaaacccccccgagcccacgtgcatacctgttttgcttacccccaaggaagacaccggacggcggtgtccctgatggtgtgggaattccctcgagaagctgcgccccgtttaacaccaattccacccccgtgtgatttctccatcaccag

SEQ ID NO: 560192 - DNA, 315 bp, Homo sapiens
gtgaagcgggacaagagagtaaggagggaggtgcgacacactcgtaaacaacccgatcttgcaagaactcactcactattgcaaggacaggaccaaaaggatgatgcaaaatcattcatgagaaattcaccccccatgattcaatctctttccaccagggcccacctctaacacttggggacagcttttatcttggctttttcacttgcaggcccttccttaaggacttaacttgtgtaagctgactcttaggagatctaagagtgcaattaactctataagatactttgggggggagcaatattcacagattcc

SEQ ID NO: 560193 - DNA, 294 bp, Homo sapiens
aacttcagcctgggacaggcagagattccgtctcaacaaaagacaaaatacagtggaaccagcatgggcaacatagtgagaccctgtctccacaaaaaaaaaatagctgggtgtggtggccctgcttgtagtccagctacttttgaggctgaggtgaaggatcacttagccaggagttgagcttagtgagcttgatattcatatctcagctggcaaatgacccgtctcagtcacgatgttacagcgtagccatgagaaaacaaaacggttctttacatattttgcccaattttt

SEQ ID NO: 560194 - DNA, 669 bp, Homo sapiens
  misc_feature (567)..(567): n is a, c, g, or t
  misc_feature (647)..(647): n is a, c, g, or t
aaagatttggagacgtgatccccatgagtttggcccgcagagtcaggacaccaagtttcgggatttcttcctccctaaggtgctatccgcccccaccccccagactacggggacttccagcccctctctgtgtccccagcatcccacccacattagaagcggtctggacgctgtcccgctccctcaatcagtcaaagtcctgcatctctgcagactctttgggtcaggagaatcaaacgcatgtgccggaacttcctatcttaggaaacgtgagcccgcttggcattcgggcgtggggcggtggggcagaaatctgaggtcccccctcctgcctagaaggacatggaccccatgtctcccagacttgcgtggtcagagatgtgaaccttctatcccccgaagctgctgcatcagacgaccccaactcctgcatgcctgccacttgcccttacctggggcacactaggtgcggctgcagcgcctggggctttcaccaatcccccgaccctgctgatggcacacaacttcctgctcgctaccagggcgaccgaagtgtaccctatgctnggctctgggctgaggagaccgcagttctgctgcaagccccaggactgggagtcgcggaagtgggtgaatgaagagggccngtggagggtggtgcgtgttgcg

SEQ ID NO: 560195 - DNA, 1306 bp, Homo sapiens
gcgtccgtcgcgtgcccccccgctcttggtggtgtctcctctgtgtggtggctggccgggcgtctgctttgtgtttgcctccccgctcgtctggctatgtttgtgtgctctccttctgtgtcgcgggtgtgtgtgttctcctctttcttggtggggcgtcgctctggttgtttgtgtgccccctccgtgtttggtgtctccggcgggtgtcgttttgggttctcttgttttcttccgtcttgcggtttttgtgggctgccccctccccctcttcttgcgtggggcggcgcccctgtttgtgtgcgtgtgtcccaccatttgttttgttctccctcccggctggcgaggtactggttcctgggttgcggactaagtttgttttgtttttttgtctggtgcgttttgtttgctgctcttcgtgtgtctgccctcgctcccgtttagggggggttccgcgcccctctttgtggggtcctccccgccccttttgttcagatgcggttcgtcctccttctctgtctcctgtgggaggtcgctcctcgccgttcgagattgtggtgtggtcgcgccccccccgcgcacccaccgtttgcttctcgtgctccttgtcgtccggttccagccccccctctcactcctttgctcgtctcttttgtggtgggtgtcggtaacgtcttctcttctttttccttccgccgccgccgttatctcctctgtgttctctcttctctcttcttcactgaatcgcgcgcgctgtgtgtgctcagattgatgaagccgaaggtctctcccttctagtgtctcctctctccccggcgaggtgagtgtgttttttctcttggacgtccccgctctggctcgccccccctcttctcttctttctcccgtcacggccaggcacactcccttcctccccgccccgccgctctcctcccgtggttgcgtgtttttccccttcccgcgccactctctctctctctctgttgttgttctcgcgcgcctcctctctctcttattctcgcggtttttctcccccgctccgccgcccccccccctcccgcccccctcgcccccccctccctccttcataagagaggagcgcgcccctcctccctggcggcgccactccgccggtgtgttcgtcccccgtctctctttttttctctctctctctctctccgcgcgcgcgtggctgtgtggttgtgtttttcttgatgagagacaaacacgtctctccccccctcctctctcctcctcccccgcccccctcccccctccgttttgcaggcgaggagagagagaaata

SEQ ID NO: 560196 - DNA, 199 bp, Homo sapiens
aaagtcgcagttactctgtattgcccaggttggtctcgaactgctgagcttaagtgatcctcctgccttggcctcccagaatgctgggattacaggtgtgggctactgctcctggctgtgtcttcaatttccgccttcagtgttttgtaattttcgatgtacccttcttggttaaatttatttctgagtattttttttt

SEQ ID NO: 560197 - DNA, 506 bp, Homo sapiens
ccccctggctgcaggaattcggcacgatgagagagagagagagagagagagagagagagtgagagagagagactgggactgtcacaaggcagagggtggctaggccatatcccaggacccacttgtaattaataatgcttatgaagtatcatgttccactgtacactcattgtcattgataacatcttatcatgagatacgctttgagagcttacaaccagtctcaccaccatatattatctgtgaatttcctcgtcctaattagcctctcattgcttccaccgactggaccttatatcatcctttatctccaaccttaaatgacttacattccctgcctgtccatttcagagaccttccactatgaacgcattctctgtctcattgttcatccttgcttataatatgaattcagctactctttcttctattcgtcttttttacgatgtcccttgtttctctcaacatcatttattatcctgttccttttctctcggtgcccatct

SEQ ID NO: 560198 - DNA, 575 bp, Homo sapiens
  misc_feature (89)..(89): n is a, c, g, or t
tggctttcccagtatggtcctaaggccaaagcccagtcaaagcaatggctatccagaggtggaagtggtccagtcaaaccgaaacccgnctggtggagagcaaaggtaacgcccacaggttttgggaatgctcaagcccttttgcttgttgcccttttagagggccaaggagtgataacctctgcttattatgagaatgttttgagaaagttagcccaagttttagcagaaaacccctgggggggcttcccctggagagtttttttcccccgggccattttttttattacccaagggcaattttgcaagggttttgatgagaaatccttaggcatcccccttccagtcccgatttggccccttttgacttttttttgtttcctaattttaaaaatctgtagagggcccccctttttttttgtttaataatgtaaaaagactgccttgccatggttaaatttcccggccccccagttttttaaaaatgtattaaagggggggggtcatagcttccaaaagggttttgcctttggtaaagtttttgtggagaaataaagggttttttttgtttccca

SEQ ID NO: 560199 - DNA, 490 bp, Homo sapiens
atatgtaaaaaattaaaaaattaaagagcactatccgggccgggtgcggtggctcacacctgtaatcccagcactttgggaggacgaggcaggcagatcacccaaagtcaggagttcgagaccagcctgaccaacatggagaaacaccatctgtactaaaaatacaaaaaaattagcccaggcatggtggcgcatgcctgtaattccagctacttgggaggctgaggcaggagaatcgcttgaacctgggaggcggaggttgcagtgagccaagattgcaccattgtactccagcctggactagagtgaaactcggtctcaaaaaaatcactatccgctgggcacagtggctcacgcttgtaatcacagtactttgggaggactacttgaggccaggagttcaagaccagcctgggcgacacagggagactcccatctccacaaaaattcaaaagtttagccaggtgtggcggcatgcaccgccggtccc

SEQ ID NO: 560200 - DNA, 339 bp, Homo sapiens
  misc_feature (45)..(45): n is a, c, g, or t
  misc_feature (54)..(54): n is a, c, g, or t
  misc_feature (228)..(228): n is a, c, g, or t
  misc_feature (238)..(238): n is a, c, g, or t
  misc_feature (273)..(273): n is a, c, g, or t
  misc_feature (289)..(289): n is a, c, g, or t
  misc_feature (301)..(301): n is a, c, g, or t
  misc_feature (319)..(319): n is a, c, g, or t
tgagatggagtttcactctctcacccaggttggagtgcagtggtncgatctcgnctcactgcaacctccacctccagggttcaagcgattctgtctcaaaataaaataaacaaataaataaagttaaatatatgcacctaccctatgatccagcaagtccactcttagatatttacccagaagtaatgaaaccttaggtgaccaacaaagaccttgttcaaggaatgnctgaggagcngctttatgtcataatagttccaaaccaggggtgcncagggatgtcccttcnataggaggaacnggggcctggggcacagtngggttcacatttgttggtcc

SEQ ID NO: 560201 - DNA, 244 bp, Homo sapiens
gcgaggttcgtacattagtggtattccttcagtttttcggcacgaggttcaccactgctgaaacgtgtattttccgtttcattacagaggaagctgtgctaatgtcgccctggatttttcagaatgagatggccacagctgcctctttctcctccctggagaagagctatgaactgcctgatggccaagtcatcactattggcaatgagcgcttccgctgtcctgagacactctttcagccctc

SEQ ID NO: 560202 - DNA, 394 bp, Homo sapiens
  misc_feature (154)..(154): n is a, c, g, or t
tgaactacacagattccaacttcctaagccaaacagaaaatcattagtaggtctttaattctagattgaatttcccttatcatgaatgagatggtctgaaataaaatcaagttcatttttgccattgcactgaacgatgccaatgcctatcagnagacaggttctgtcttgcatttgcttgcactttagagtgctgcatgaaagcagtgtgcagagattttgaggcggtccaccatcagggcaggcagccattgggagccatcttcttcaatcatcttctccacagatcttcaagagcacggttctgtagtctccagaagtatctggattggatggccgagtatagagagtagccatagtgcttcttgaactcatgtctgatggtccaaaagat

SEQ ID NO: 560203 - DNA, 262 bp, Homo sapiens
cgcacgatgcgcgcctgctagcattcgtttgtccggtgtctatttgctacattgagattcgcccgggggaatagcgttatgtcgattcagagatgatatgtggtttgcgatgagtgggatgaagaacgagaggacgtccatgtttaattatgcctttttgtgttgaggtgatgatggacgtgtagatttcctgttgtgaaattgttttaggtcatagcttttctagtctggttaggttctcccgcggagtcccgcgcgccgg

SEQ ID NO: 560204 - DNA, 724 bp, Homo sapiens
aaaccctgcgtggcatccctgacgcaccgccgtgatgcccatggaagacaggtcgacctggaacgtccaactacttccttaagatcatccaaactatctggatgattatccgaatatgtttgcatggtgtggagcagacaagtgtgggctccaagcagagtgcagcagactccgcagtgtcccttcgcgggaagtgctgtggtgctgatgggcaagaacaccatgatgcgcaaggcgcagtccgagggcagcctggaatagacaaacccagtctctggagaaactgctgcctcatatccgggggaatgtgggcttagtggttcaccgaaggaggacctcactgagatacatgggacatgtttgctggccaataaggtgccagcatgctagccggcgtgctggtgccattgccccatgtgaagtcactgtgccagcaccaagaacactggtctcgggcccgagaagacctccttttctccaggcttgaggtatcaccactaaaactcgtccagggtcgaccattgaaatcctgagtgatgtgcagctgatcgagactggagacaaagtgggagccagcgaagccaggctgctgaacatgctcaaatctcccccttctccttgggctgtcatccagcaggtgttcgaacaatggcagcttctacaccctggaagtggtcgatatcacggaggcaactctggttctcgcctacgggggggtccgaag

SEQ ID NO: 560205 - DNA, 434 bp, Homo sapiens
aggtgttccagagtcagcgccaagctacgcggagaacgttcatccagaagtatcatactccaccgtggagccgggcgcagcgagacaggaaggccacgcataggtggatgagacagagggacgtgccgggtgtctatcatagaaggaaggccgatcacagcgtcgatcagactcgtcattcgaatgccagcacaaacgggagatcggggctcagctaggttatcgggacagtaatggaagatcctacatccagtccctgcatgtaatccgtgcaatcattcagaaatatttcgaatagccattgggtgggcatacatgctgacaagcgcagttcagcaacccaggggggcccccaatggaagatttgggaagtcggattcaatatggctaagtggaggtcctgctccgaagcaataactgtttactttccaatc

SEQ ID NO: 560206 - DNA, 678 bp, Homo sapiens
cccaggctggagcgcagtggcacagtcttgtgctcactgcaatctccgcctcccggtgttcatgcctgttctcctgcctcgtgcctacctcgagtgtgctggtgatttgctgtggtgccctgccaccactgccctggctgattttttttgtattttttatgtggatgacatgtggtttcacctgtgtttgtgccaggatggtctctgatctcctgaccctgtgatctgcctgcctctggcctcccaaagtgctgggattacaggcgtgagtcaccactgcctggccaattatttgtatcttatttggtagatgatgtggtgtttcactatgttggcctgtggctggtcttgaactcctgacctggtgatccacctgcctcggcctcccaacgtgctgggattacagcgtgtgagccactgctgcctggcgtacgacaacccaatcttcaacaaaaagcaacagatctcttaacaggcacatatcctgaagagggcatgctgacagttagccaggcaccttgggaacatgtggtcacaccttgactagtgcatcaggaaactcaacgacgtcctactacactaagatggacgaaacctagccagacgtgccactggcactgtacgttcctggctggtcttgaacaccgacgcatattgcgtagttcatgttatgatatg

SEQ ID NO: 560207 - DNA, 667 bp, Homo sapiens
  misc_feature (138)..(138): n is a, c, g, or t
catggtggctcacgcctgtaatcccagcactttgggaagctgaggcaggcggatcacctgaggtcaggagttagagaccagtgtgaccagtatggcaaaacccgtctctactatacgaaattagccaggcttagcggngcatgcctgtaatcccaactacttggcaggctgaggcaggacaatcgcttgaacccaggaggcagaggttgcagcagtgagccatgattgcaccattgcactctagtctgagcaataatagagcaagactctgtcttaaacaaagatgaagataggatactcagagttttttttttaaagggacatataatgaatgatagagcagtcacacagattgagatacatagtagaactgtgactgcaagaagctggatgaaaggcgcataggtaggtaagcctagtgatgcccgagctcttatgatcgagctctaagagtatagcttttggttctcagagtaacatacgccctagcccaattgttaccacacggttcacctggactccttgtccccttctagctataacggtaccatcagcttagtaattaaccactatcgctggccgccgattaaacggtacattaccggtcggcatctacttctgcacctcatcgggggcactctagcaacttcaacctccgtggcttctt

SEQ ID NO: 560208 - DNA, 160 bp, Homo sapiens
agctggcgttaaggccggtcgaaaactcccgtgtcgtggcggtattccctttaagattaccgtccagctgtacgtgccctcgccattgagctgtgggtagcggtcggcatcggtcagacgatatttcgccctgcctcctgcactttagcgtgccatggca

SEQ ID NO: 560209 - DNA, 262 bp, Homo sapiens
  misc_feature (179)..(179): n is a, c, g, or t
ttttttaaattgcaacacgaagtctgaggtgaatatcataagagggcttctggatagaaagtttcttccaagagttgcccaagttttaaagattaaaccaatattgcagctttaaagatgaacctaacttttgggaattcttcttcaaagaaaggaaaagtattgctccatctggcttnttcttaagactaaaaagcatacctgggcagaaaactctttattttaaaaatcaaccactgcagggtacaagtaaccatagtaa

SEQ ID NO: 560210 - DNA, 2545 bp, Homo sapiens
gtgtatggccacggcggtgggggcaccccagcaggatgccttccactttcgtgcccacctccaggggccagcaggggcctccgtggctggaccccaaacctcagaggcctttgccatcacggtgagggatgtaaatgagcggccccctcagccacaggcctctgtcccactccggctcacccgaggctctcgtgcccccatctcccgggcccagctgagtgtggtggacccagactcagctcctggggagattgagtacgaggtccagcgggcaccccacaacggcttcctcagcctggtgggtggtggcctggggcccgtgacccgcttcacgcaagccgatgtggattcagggcggctggccttcgtggccaacgggagcagcgtggcaggcatcttccagctgagcatgtctgatggggccagcccacccctgcccatgtccctggctgtggacatcctaccatccgccatcgaggtgcagctgcgggcacccctggaggtgccccaagctttggggcgctcctcactgagccagcagcagctccgggtggtttcagatcgggaggagccagaggcagcataccgcctcatccagggaccccagtatgggcatctcctggtgggcgggcggcccacctcggccttcagccaattccagatagaccagggcgaggtggtctttgccttcaccaacttctcctcctctcatgaccacttcagagtcctggcactggctaggggtgtcaatgcatcagccgtagtgaacgtcactgtgagggctctgctgcatgtgtgggcaggtgggccatggccccagggtgccaccctgcgcctggaccccaccgtcctagatgctggcgagctggccaaccgcacaggcagtgtgccgcgcttccgcctcctggagggaccccggcatggccgcgtggtccgcgtgccccgagccaggacggagcccgggggcagccagctggtggagcagttcactcagcaggaccttgaggacgggaggctggggctggaggtgggcaggccagaggggagggcccccggccccgcaggtgacagtctcactctggagctgtgggcacagggcgtcccgcctgctgtggcctccctggactttgccactgagccttacaatgctgcccggccctacagcgtggccctgctcagtgtccccgaggccgcccggacggaagcagggaagccagagagcagcacccccacaggcgagccaggccccatggcatccagccctgagcccgctgtggccaagggaggcttcctgagcttccttgaggccaacatgttcagcgtcatcatccccatgtgcctggtacttctgctcctggcgctcatcctgcccctgctcttctacctccgaaaacgcaacaagacgggcaagcatgacgtccaggtcctgactgccaagccccgcaacggcctggctggtgacaccgagacctttcgcaaggtggagccaggccaggccatcccgctcacagctgtgcctggccaggggccccctccaggaggccagcctgacccagagctgctgcagttctgccggacacccaaccctgcccttaagaatggccagtactgggtgtgaggcctggcctgggcccagatgctgatcgggccagggacaggcttgcccatgtcccgggccccattgcttccatgcctggtgctgtctgagtatccccagagcaagagagacctggagacaccaggggtggagggtcctgggagatagtcccaggggtccgggacagagtggagtcaagagctggaacctccctcagctcactccgagcctggagaactgcaggggccaaggtggaggcaggcttaagttcagtcctcctgccctggagctggtttgggctgtcaaaaccagggtaacctcctacatgggtcatgactctgggtcctgggtctgtgaccttgggtaagtcgcgcctgacccaggctgctaagagggcaaggagaaggaagtaccctggggagggaagggacagaggaagctattcctggcttttccactccaacccaggccaccctttgtctctgccccagagttgagaaaaaaacttcctcccctggttttttagggagatggtatcccctggagtagagggcaagaggagagagcgcctccagtctagaaggcataagccaataggataatatattcagggtgcagggtgggtaggttgctctggggatgggtttatttaagggagattgcaaggaagctatttaacatggtgctgagctagccaggactgatggagcccctgggggtgtgggatggaggagggtctgcagccagttcattcccagggccccatcttgatgggccaagggctaaacatgcatgtgtcagtggctttggagcaggctaggctggggctcatcgagggtctcaggccgaggccactgcagtgccagtgcccccctgaggactagggcaggcagctgggggcacttggttccatggagcctggataaacagtgctttggaggctctgga

SEQ ID NO: 560211 - DNA, 2850 bp, Homo sapiens
  misc_feature (2676)..(2676): n is a, c, g, or t
gtgtatggccacggcggtgggggcaccccagcaggatgccttccactttcgtgcccacctccaggggccagcaggggcctccgtggctggaccccaaacctcagaggcctttgccatcacggtgagggatgtaaatgagcggccccctcagccacaggcctctgtcccactccggctcacccgaggctctcgtgcccccatctcccgggcccagctgagtgtggtggacccagactcagctcctggggagattgagtacgaggtccagcgggcaccccacaacggcttcctcagcctggtgggtggtggcctggggcccgtgacccgcttcacgcaagccgatgtggattcagggcggctggccttcgtggccaacgggagcagcgtggcaggcatcttccagctgagcatgtctgatggggccagcccacccctgcccatgtccctggctgtggacatcctaccatccgccatcgaggtgcagctgcgggcacccctggaggtgccccaagctttggggcgctcctcactgagccagcagcagctccgggtggtttcagatcgggaggagccagaggcagcataccgcctcatccagggaccccagtatgggcatctcctggtgggcgggcggcccacctcggccttcagccaattccagatagaccagggcgaggtggtctttgccttcaccaacttctcctcctctcatgaccacttcagagtcctggcactggctaggggtgtcaatgcatcagccgtagtgaacgtcactgtgagggctctgctgcatgtgtgggcaggtgggccatggccccagggtgccaccctgcgcctggaccccaccgtcctagatgctggcgagctggccaaccgcacaggcagtgtgccgcgcttccgcctcctggagggaccccggcatggccgcgtggtccgcgtgccccgagccaggacggagcccgggggcagccagctggtggagcagttcactcagcaggaccttgaggacgggaggctggggctggaggtgggcaggccagaggggagggcccccggccccgcaggtgacagtctcactctggagctgtgggcacagggcgtcccgcctgctgtggcctccctggactttgccactgagccttacaatgctgcccggccctacagcgtggccctgctcagtgtccccgaggccgcccggacggaagcagggaagccagagagcagcacccccacaggcgagccaggccccatggcatccagccctgagcccgctgtggccaagggaggcttcctgagcttccttgaggccaacatgttcagcgtcatcatccccatgtgcctggtacttctgctcctggcgctcatcctgcccctgctcttctacctccgaaaacgcaacaagacgggcaagcatgacgtccaggtcctgactgccaagccccgcaacggcctggctggtgacaccgagacctttcgcaaggtggagccaggccaggccatcccgctcacagctgtgcctggccaggggccccctccaggaggccagcctgacccagagctgctgcagttctgccggacacccaaccctgcccttaagaatggccagtactgggtgtgaggcctggcctgggcccagatgctgatcgggccagggacaggcttgcccatgtcccgggccccattgcttccatgcctggtgctgtctgagtatccccagagcaagagagacctggagacaccaggggtggagggtcctgggagatagtcccaggggtccgggacagagtggagtcaagagctggaacctccctcagctcactccgagcctggagaactgcaggggccaaggtggaggcaggcttaagttcagtcctcctgccctggagctggtttgggctgtcaaaaccagggtaacctcctacatgggtcatgactctgggtcctgggtctgtgaccttgggtaagtcgcgcctgacccaggctgctaagagggcaaggagaaggaagtaccctggggagggaagggacagaggaagctattcctggcttttccactccaacccaggccaccctttgtctctgccccagagttgagaaaaaaacttcctcccctggttttttagggagatggtatcccctggagtagagggcaagaggagagagcgcctccagtctagaaggcataagccaataggataatatattcagggtgcagggtgggtaggttgctctggggatgggtttatttaagggagattgcaaggaagctatttaacatggtgctgagctagccaggactgatggagcccctgggggtgtgggatggaggagggtctgcagccagttcattcccagggccccatcttgatgggccaagggctaaacatgcatgtgtcagtggctttggagcaggctaggctggggctcatcgagggtctcaggccgaggccactgcagtgccagtgcccccctgaggactagggcaggcagctgggggcacttggttccatggagcctggataaacagtgctttggaggctctggacagctgtgtggtgtttgtgtcttaactatgcactgggcccttgtctgcgtcggcttgcatacagagggcccctggggttggccctccggcctggcctcagccagtgggatggacagggccaggcaggcctntgaacttccacctcctggggcctcccagacctcctgtgcccccacctgtgtgggcaggtgggccagtcttcgggtgatgggaccaaaccccttcagttcagtagagaaaggctaggtcctctacaaagagctgcaagacaaaaattaaaataaatgctccccaccctagaaaaa

SEQ ID NO: 560212 - DNA, 125 bp, Homo sapiens
ctaaatgcgttacctaaaatggctgttacctaaatcgctgttacctaaatggctgttacctaaatgggctgttacctaaatgggctgttacctaaatggtctgttacctaaatagtgtgttacct

SEQ ID NO: 560213 - DNA, 438 bp, Homo sapiens
atataccagcagatataagccacattacataaaaacatcaatgggcctgagaaataagaacagtaaacatcacaattgatgaggaaatatcaacttggagcactcaaggacatttacattatgatgaccatggagttatatgaacatttataactttatataatttccatattacatttctcatagtatggacaacttatagccactaactgaattctccaaatacacgtgaagtttcaaaaaagaggccacaaatatgtagttactgaagatgttgaataatcattttacaaagcagttatctgaatggggattagttggtgattgtatgtaacaaatatgctaaatgctttaaaactgtcagaattttagtaatatatttctacctccaaatatatatatattgtctattcactggataatgtgtgtagattttaa

SEQ ID NO: 560214 - DNA, 3039 bp, Homo sapiens
gtgtatggccacggcggtgggggcaccccagcaggatgccttccactttcgtgcccacctccaggggccagcaggggcctccgtggctggaccccaaacctcagaggcctttgccatcacggtgagggatgtaaatgagcggccccctcagccacaggcctctgtcccactccggctcacccgaggctctcgtgcccccatctcccgggcccagctgagtgtggtggacccagactcagctcctggggagattgagtacgaggtccagcgggcaccccacaacggcttcctcagcctggtgggtggtggcctggggcccgtgacccgcttcacgcaagccgatgtggattcagggcggctggccttcgtggccaacgggagcagcgtggcaggcatcttccagctgagcatgtctgatggggccagcccacccctgcccatgtccctggctgtggacatcctaccatccgccatcgaggtgcagctgcgggcacccctggaggtgccccaagctttggggcgctcctcactgagccagcagcagctccgggtggtttcagatcgggaggagccagaggcagcataccgcctcatccagggaccccagtatgggcatctcctggtgggcgggcggcccacctcggccttcagccaattccagatagaccagggcgaggtggtctttgccttcaccaacttctcctcctctcatgaccacttcagagtcctggcactggctaggggtgtcaatgcatcagccgtagtgaacgtcactgtgagggctctgctgcatgtgtgggcaggtgggccatggccccagggtgccaccctgcgcctggaccccaccgtcctagatgctggcgagctggccaaccgcacaggcagtgtgccgcgcttccgcctcctggagggaccccggcatggccgcgtggtccgcgtgccccgagccaggacggagcccgggggcagccagctggtggagcagttcactcagcaggaccttgaggacgggaggctggggctggaggtgggcaggccagaggggagggcccccggccccgcaggtgacagtctcactctggagctgtgggcacagggcgtcccgcctgctgtggcctccctggactttgccactgagccttacaatgctgcccggccctacagcgtggccctgctcagtgtccccgaggccgcccggacggaagcagggaagccagagagcagcacccccacaggcgagccaggccccatggcatccagccctgagcccgctgtggccaagggaggcttcctgagcttccttgaggccaacatgttcagcgtcatcatccccatgtgcctggtacttctgctcctggcgctcatcctgcccctgctcttctacctccgaaaacgcaacaagacgggcaagcatgacgtccaggtcctgactgccaagccccgcaacggcctggctggtgacaccgagacctttcgcaaggtggagccaggccaggccatcccgctcacagctgtgcctggccaggggccccctccaggaggccagcctgacccagagctgctgcagttctgccggacacccaaccctgcccttaagaatggccagtactgggtgtgaggcctggcctgggcccagatgctgatcgggccagggacaggcttgcccatgtcccgggccccattgcttccatgcctggtgctgtctgagtatccccagagcaagagagacctggagacaccaggggtggagggtcctgggagatagtcccaggggtccgggacagagtggagtcaagagctggaacctccctcagctcactccgagcctggagaactgcaggggccaaggtggaggcaggcttaagttcagtcctcctgccctggagctggtttgggctgtcaaaaccagggtaacctcctacatgggtcatgactctgggtcctgggtctgtgaccttgggtaagtcgcgcctgacccaggctgctaagagggcaaggagaaggaagtaccctggggagggaagggacagaggaagctattcctggcttttccactccaacccaggccaccctttgtctctgccccagagttgagaaaaaaacttcctcccctggttttttagggagatggtatcccctggagtagagggcaagaggagagagcgcctccagtctagaaggcataagccaataggataatatattcagggtgcagggtgggtaggttgctctggggatgggtttatttaagggagattgcaaggaagctatttaacatggtgctgagctagccaggactgatggagcccctgggggtgtgggatggaggagggtctgcagccagttcattcccagggccccatcttgatgggccaagggctaaacatgcatgtgtcagtggctttggagcaggctaggctggggctcatcgagggtctcaggccgaggccactgcagtgccagtgcccccctgaggactagggcaggcagctgggggcacttggttccatggagcctggataaacagtgctttggaggctctggaaaaaaaaaaaaaaaaaaaaaaaaaaaaaaaaaaaaaaaaaaaaaaaaaaaaaaaaaaaaaagaaaaaaaaagagaaaaaaaaaaagaaaaagcaaaaaaaacaaaacaaaaaagaaaaaaacaaaagagaggggggggggggggagaaccgcccgggggggggaagcggcgacggcagcgcaggcgagggagagcaagggggagcaacaggcaccacagtagtatagagggcgcacctgagagggaacaagcaggcgaggggagggacaaccggggagaggccgagagagagaggaaagcaacggaggggcgcaagaaagagcggggggcgcaagacggcgaggaggaaggagagggcggccgcaacagccacgacggacgggagcgcgacggcacacgccgcgagccacacgacgggcggctgagcgaccaggacgggcagaggggggagagaagaagaaaaccacagcacgaggagcagcgacgccgggggg

SEQ ID NO: 560215 - DNA, 904 bp, Homo sapiens
acatgagaagtatgacaacagcctcaagatcatcagctaatgactcctgtcaccaccaactgtttaggacccctggtgcacaggtcaatccatgacatacttaggtaatcgtggaagagactgcatgaccacagtccatggcatcacatgtcacccataagactgtggatggtccctccgggaaattgtgacgtgatggctcgtggtgttcctcctagaacatcattctgcctggcctcttacttggcgcataggctaaaggcatgtggagccacgggtcatctccctgatacgtagtctcggtgatagttccacctgtccaatggccgttgcgctgtgcccactgtctgaccgtggttcaggtcggtggaccggggaccctgctcgtcatagatgggatagctgcactgatatagtgatgacctatctcagaaaggtggtgagaaacaaggcagtccagagatgggcccccatcgaagggggcaatctccatgggcattacaacttgagcaccaaggggggtctccgtctgactttccacgagccgaccatccactcgctctcggcttgggaccgcatggaggcctgtgtcactagctccatcaaacgacgcgagctgtgtgatctatgctccatgttgcgctgggttgatgaacgaccgaattttgtgctacgagctaggagggtggtgtcgcctcatggacccaacattggtacgtccatgtagttacagaaccctggtaccaagcaggttgctcacgcattgaggcatcaatgagtggaggagcagagacccttgcactgttgggggaagtgctcagtgcaatttggcacgaaccccctgcaattatgggagttgaccctcctacggaatttggctgttgactccttgaaaaaggggatg

SEQ ID NO: 560216 - DNA, 2646 bp, Homo sapiens
gtgtatggccacggcggtgggggcaccccagcaggatgccttccactttcgtgcccacctccaggggccagcaggggcctccgtggctggaccccaaacctcagaggcctttgccatcacggtgagggatgtaaatgagcggccccctcagccacaggcctctgtcccactccggctcacccgaggctctcgtgcccccatctcccgggcccagctgagtgtggtggacccagactcagctcctggggagattgagtacgaggtccagcgggcaccccacaacggcttcctcagcctggtgggtggtggcctggggcccgtgacccgcttcacgcaagccgatgtggattcagggcggctggccttcgtggccaacgggagcagcgtggcaggcatcttccagctgagcatgtctgatggggccagcccacccctgcccatgtccctggctgtggacatcctaccatccgccatcgaggtgcagctgcgggcacccctggaggtgccccaagctttggggcgctcctcactgagccagcagcagctccgggtggtttcagatcgggaggagccagaggcagcataccgcctcatccagggaccccagtatgggcatctcctggtgggcgggcggcccacctcggccttcagccaattccagatagaccagggcgaggtggtctttgccttcaccaacttctcctcctctcatgaccacttcagagtcctggcactggctaggggtgtcaatgcatcagccgtagtgaacgtcactgtgagggctctgctgcatgtgtgggcaggtgggccatggccccagggtgccaccctgcgcctggaccccaccgtcctagatgctggcgagctggccaaccgcacaggcagtgtgccgcgcttccgcctcctggagggaccccggcatggccgcgtggtccgcgtgccccgagccaggacggagcccgggggcagccagctggtggagcagttcactcagcaggaccttgaggacgggaggctggggctggaggtgggcaggccagaggggagggcccccggccccgcaggtgacagtctcactctggagctgtgggcacagggcgtcccgcctgctgtggcctccctggactttgccactgagccttacaatgctgcccggccctacagcgtggccctgctcagtgtccccgaggccgcccggacggaagcagggaagccagagagcagcacccccacaggcgagccaggccccatggcatccagccctgagcccgctgtggccaagggaggcttcctgagcttccttgaggccaacatgttcagcgtcatcatccccatgtgcctggtacttctgctcctggcgctcatcctgcccctgctcttctacctccgaaaacgcaacaagacgggcaagcatgacgtccaggtcctgactgccaagccccgcaacggcctggctggtgacaccgagacctttcgcaaggtggagccaggccaggccatcccgctcacagctgtgcctggccaggggccccctccaggaggccagcctgacccagagctgctgcagttctgccggacacccaaccctgcccttaagaatggccagtactgggtgtgaggcctggcctgggcccagatgctgatcgggccagggacaggcttgcccatgtcccgggccccattgcttccatgcctggtgctgtctgagtatccccagagcaagagagacctggagacaccaggggtggagggtcctgggagatagtcccaggggtccgggacagagtggagtcaagagctggaacctccctcagctcactccgagcctggagaactgcaggggccaaggtggaggcaggcttaagttcagtcctcctgccctggagctggtttgggctgtcaaaaccagggtaacctcctacatgggtcatgactctgggtcctgggtctgtgaccttgggtaagtcgcgcctgacccaggctgctaagagggcaaggagaaggaagtaccctggggagggaagggacagaggaagctattcctggcttttccactccaacccaggccaccctttgtctctgccccagagttgagaaaaaaacttcctcccctggttttttagggagatggtatcccctggagtagagggcaagaggagagagcgcctccagtctagaaggcataagccaataggataatatattcagggtgcagggtgggtaggttgctctggggatgggtttatttaagggagattgcaaggaagctatttaacatggtgctgagctagccaggactgatggagcccctgggggtgtgggatggaggagggtctgcagccagttcattcccagggccccatcttgatgggccaagggctaaacatgcatgtgtcagtggctttggagcaggctaggctggggctcatcgagggtctcaggccgaggccactgcagtgccagtgcccccctgaggactagggcaggcagctgggggcacttggttccatggagcctggataaacagtgctttggaggctctggaaaaaaaaacaataaaacaaaaacacaacacaacaagaaacatacaaaaaaaaataacataaacgacaaatcccaaaaatcgaacaaacacaaaaacaaggg

SEQ ID NO: 560217 - DNA, 82 bp, Homo sapiens
ttgggaggctaaggcggaaggatggctttaggccaaaagcttaagactccccggggtaatacagtgagcccttatctctcca

SEQ ID NO: 560218 - DNA, 2680 bp, Homo sapiens
  misc_feature (2506)..(2506): n is a, c, g, or t
gtgtatggccacggcggtgggggcaccccagcaggatgccttccactttcgtgcccacctccaggggccagcaggggcctccgtggctggaccccaaacctcagaggcctttgccatcacggtgagggatgtaaatgagcggccccctcagccacaggcctctgtcccactccggctcacccgaggctctcgtgcccccatctcccgggcccagctgagtgtggtggacccagactcagctcctggggagattgagtacgaggtccagcgggcaccccacaacggcttcctcagcctggtgggtggtggcctggggcccgtgacccgcttcacgcaagccgatgtggattcagggcggctggccttcgtggccaacgggagcagcgtggcaggcatcttccagctgagcatgtctgatggggccagcccacccctgcccatgtccctggctgtggacatcctaccatccgccatcgaggtgcagctgcgggcacccctggaggtgccccaagctttggggcgctcctcactgagccagcagcagctccgggtggtttcagatcgggaggagccagaggcagcataccgcctcatccagggaccccagtatgggcatctcctggtgggcgggcggcccacctcggccttcagccaattccagatagaccagggcgaggtggtctttgccttcaccaacttctcctcctctcatgaccacttcagagtcctggcactggctaggggtgtcaatgcatcagccgtagtgaacgtcactgtgagggctctgctgcatgtgtgggcaggtgggccatggccccagggtgccaccctgcgcctggaccccaccgtcctagatgctggcgagctggccaaccgcacaggcagtgtgccgcgcttccgcctcctggagggaccccggcatggccgcgtggtccgcgtgccccgagccaggacggagcccgggggcagccagctggtggagcagttcactcagcaggaccttgaggacgggaggctggggctggaggtgggcaggccagaggggagggcccccggccccgcaggtgacagtctcactctggagctgtgggcacagggcgtcccgcctgctgtggcctccctggactttgccactgagccttacaatgctgcccggccctacagcgtggccctgctcagtgtccccgaggccgcccggacggaagcagggaagccagagagcagcacccccacaggcgagccaggccccatggcatccagccctgagcccgctgtggccaagggaggcttcctgagcttccttgaggccaacatgttcagcgtcatcatccccatgtgcctggtacttctgctcctggcgctcatcctgcccctgctcttctacctccgaaaacgcaacaagacgggcaagcatgacgtccaggtcctgactgccaagccccgcaacggcctggctggtgacaccgagacctttcgcaaggtggagccaggccaggccatcccgctcacagctgtgcctggccaggggccccctccaggaggccagcctgacccagagctgctgcagttctgccggacacccaaccctgcccttaagaatggccagtactgggtgtgaggcctggcctgggcccagatgctgatcgggccagggacaggcttgcccatgtcccgggccccattgcttccatgcctggtgctgtctgagtatccccagagcaagagagacctggagacaccaggggtggagggtcctgggagatagtcccaggggtccgggacagagtggagtcaagagctggaacctccctcagctcactccgagcctggagaactgcaggggccaaggtggaggcaggcttaagttcagtcctcctgccctggagctggtttgggctgtcaaaaccagggtaacctcctacatgggtcatgactctgggtcctgggtctgtgaccttgggtaagtcgcgcctgacccaggctgctaagagagcgcctccagtctagaaggcataagccaataggataatatattcagggtgcagggtgggtaggttgctctggggatgggtttatttaagggagattgcaaggaagctatttaacatggtgctgagctagccaggactgatggagcccctgggggtgtgggatggaggagggtctgcagccagttcattcccagggccccatcttgatgggccaagggctaaacatgcatgtgtcagtggctttggagcaggctaggctggggctcatcgagggtctcaggccgaggccactgcagtgccagtgcccccctgaggactagggcaggcagctgggggcacttggttccatggagcctggataaacagtgctttggaggctctggacagctgtgtggtgtttgtgtcttaactatgcactgggcccttgtctgcgtcggcttgcatacagagggcccctggggttggccctccggcctggcctcagccagtgggatggacagggccaggcaggcctntgaacttccacctcctggggcctcccagacctcctgtgcccccacctgtgtgggcaggtgggccagtcttcgggtgatgggaccaaaccccttcagttcagtagagaaaggctaggtcctctacaaagagctgcaagacaaaaattaaaataaatgctccccaccctagaaaaa

SEQ ID NO: 560219 - DNA, 399 bp, Homo sapiens
agaggatccccctacgtgctcgattcgtatactcatagtgggcttctaactactggtacgcaagatgacttctgattggtaatcttaggtaaattatagataaatgaacacggccagtaatcatacactaagattaataaacagcacttcaaaattaaccgcataagggctgtgcttgcagcaaggtttcacaagacaaggcacccagattttttcttcccacgtctagctggcagagcagctctcgtagccatttcaaaaacctctctcactccatcttgggtcttggctgaacactccatgtacccaaaagcgccaatcctgtaagccatatctctgccttcttcaggtttcaccggctcctgcttcatcttggctagctcccgcctagtgtgctca

SEQ ID NO: 560220 - DNA, 2375 bp, Homo sapiens
gtgtatggccacggcggtgggggcaccccagcaggatgccttccactttcgtgcccacctccaggggccagcaggggcctccgtggctggaccccaaacctcagaggcctttgccatcacggtgagggatgtaaatgagcggccccctcagccacaggcctctgtcccactccggctcacccgaggctctcgtgcccccatctcccgggcccagctgagtgtggtggacccagactcagctcctggggagattgagtacgaggtccagcgggcaccccacaacggcttcctcagcctggtgggtggtggcctggggcccgtgacccgcttcacgcaagccgatgtggattcagggcggctggccttcgtggccaacgggagcagcgtggcaggcatcttccagctgagcatgtctgatggggccagcccacccctgcccatgtccctggctgtggacatcctaccatccgccatcgaggtgcagctgcgggcacccctggaggtgccccaagctttggggcgctcctcactgagccagcagcagctccgggtggtttcagatcgggaggagccagaggcagcataccgcctcatccagggaccccagtatgggcatctcctggtgggcgggcggcccacctcggccttcagccaattccagatagaccagggcgaggtggtctttgccttcaccaacttctcctcctctcatgaccacttcagagtcctggcactggctaggggtgtcaatgcatcagccgtagtgaacgtcactgtgagggctctgctgcatgtgtgggcaggtgggccatggccccagggtgccaccctgcgcctggaccccaccgtcctagatgctggcgagctggccaaccgcacaggcagtgtgccgcgcttccgcctcctggagggaccccggcatggccgcgtggtccgcgtgccccgagccaggacggagcccgggggcagccagctggtggagcagttcactcagcaggaccttgaggacgggaggctggggctggaggtgggcaggccagaggggagggcccccggccccgcaggtgacagtctcactctggagctgtgggcacagggcgtcccgcctgctgtggcctccctggactttgccactgagccttacaatgctgcccggccctacagcgtggccctgctcagtgtccccgaggccgcccggacggaagcagggaagccagagagcagcacccccacaggcgagccaggccccatggcatccagccctgagcccgctgtggccaagggaggcttcctgagcttccttgaggccaacatgttcagcgtcatcatccccatgtgcctggtacttctgctcctggcgctcatcctgcccctgctcttctacctccgaaaacgcaacaagacgggcaagcatgacgtccaggtcctgactgccaagccccgcaacggcctggctggtgacaccgagacctttcgcaaggtggagccaggccaggccatcccgctcacagctgtgcctggccaggggccccctccaggaggccagcctgacccagagctgctgcagttctgccggacacccaaccctgcccttaagaatggccagtactgggtgtgaggcctggcctgggcccagatgctgatcgggccagggacaggcttgcccatgtcccgggccccattgcttccatgcctggtgctgtctgagtatccccagagcaagagagacctggagacaccaggggtggagggtcctgggagatagtcccaggggtccgggacagagtggagtcaagagctggaacctccctcagctcactccgagcctggagaactgcaggggccaaggtggaggcaggcttaagttcagtcctcctgccctggagctggtttgggctgtcaaaaccagggtaacctcctacatgggtcatgactctgggtcctgggtctgtgaccttgggtaagtcgcgcctgacccaggctgctaagagagcgcctccagtctagaaggcataagccaataggataatatattcagggtgcagggtgggtaggttgctctggggatgggtttatttaagggagattgcaaggaagctatttaacatggtgctgagctagccaggactgatggagcccctgggggtgtgggatggaggagggtctgcagccagttcattcccagggccccatcttgatgggccaagggctaaacatgcatgtgtcagtggctttggagcaggctaggctggggctcatcgagggtctcaggccgaggccactgcagtgccagtgcccccctgaggactagggcaggcagctgggggcacttggttccatggagcctggataaacagtgctttggaggctctgga

SEQ ID NO: 560221 - DNA, 711 bp, Homo sapiens
tcctcccggtcgccaccgaggtcgcacgcgtgaaacttctccgccgcctccgccgaaaacgccgccagaatgcgctaagtcgcctcctaccggtctggctgccctagggggcaactcctcccccaggcgccaaggacatcaagaagatctttggacagcgtgggtatacgaggcggacgacgaccggctcaacaaggttatcagtgagctagaatttggaaaaaactttgaagacgtacatgtgcccagggtatgggcaagcttgccaagtgatacctgcagggagtggggctgtagccggtctcatgcttgccccaggcttcttgaaagcccctgtgcatgctagggttcatgcccccatgcatgcacgcagaaggaaggaaagaaaggactgagaaagaaggaggagtcgtgaaagaagttcagagtagatgcacatgtggggaattgtgggccatttgagggacataaaaatctccgtggcatcccccgtgccacaaagttaaaacggccttatgtaataaacaagcagttccaaaaaaaagaaaaaaagaaaaagagacgacgagcacacgtgactagcaaaaaagaataatccccagagagagggggccacccagagataacacgagccgaatcaccccgagacttacgactggaaaaacaaagcggtggccccccatagagagaaggaggcagaaaataaaaacg

SEQ ID NO: 560222 - DNA, 815 bp, Homo sapiens
  misc_feature (8)..(8): n is a, c, g, or t
  misc_feature (15)..(16): n is a, c, g, or t
  misc_feature (815)..(815): n is a, c, g, or t
cctaggtngtctcgnngcggcggagattcccgtgaagcgacgaggagagagagccagcagccaacccctacgacttacaggaggctgcgtgcgcaaaacctcccagcgccggcgcctcgtacagcagtgctaaccgttcaacgaggcattcaccgccgtcagaaggcgctggagtctgcggggcagaatgggccaagcacgcactctggggctggcaccggcaggcactgaagctgcggacctgatctccgcagaggctgcctgctgcgctcggccctcaagtgcccgggccggccttcgtgctccgaaacaagagacctgggagccctcgggaaacctcccccgacgctctctctcggaactcccgcaccctcctttctcaccagcccgccagttgtggcaaccctgtgcttgttcccctaatctatcactttgttctttttttttgtgactcctgtggactccactgcgcctgggatctcgccaacccctccctcattttggggtgactgaattcaaaaatttttttttattggaaaccggttttcttgggcaacaaaacacttgctagcggctgaattttaaagaaaaaaaccccggcaggggtggtgaagaatttgcaatgataatttcatatcgacgctcgcttttcctttggcctttggctagtaccgtccactattcaacgccttcgctttgaaactaccaaaacacacaaatcaaacggccattattacttctccaagttaaatactttagtcttttattacactacttgagctatagtctcttattacctctcactcacccacccn

SEQ ID NO: 560223 - DNA, 363 bp, Homo sapiens
ttggccggacactagtgctggcaggacactagtgcttggcaggacactagtgcttggcaggtcaggttcctcattttagggagattttaactttaagtgggctcgagcaagtgttaattacctggacagttcatgcctgtggaggccgaccctccctgtggtgctgggtccatgagatacagactctcctgcctccctgctccccagatccccggggtctcctgctcaaatcttgggctggggccagggtcactaagaaatctgctttctttgaacactaaccagttcaggcgtacacaggagttgcagtctcggggtgggggcatgggttgggttcaaccccagagtgtttcctctgtcctg

SEQ ID NO: 560224 - DNA, 1476 bp, Homo sapiens
acttaggctcaagttgtcaaaaaagccgggtttataacgacggcatatatacgctagacagctgtgatcgaagtctgactgtgcacagcgtcgctgctgtgctctgatgcatgactaatgtgccgctaagcgtgctgctcatgtccgagcgccgagaacagtgaacaaagcaacccacaggcgacagcccatgctcaccctgaccgtgtggcaggaggcttcctgagcttccttgaggccaacatgttcagcgtcatcatccccatgtgcctggtacttctgctcctggcgctcatcctgcccctgctcttctacctccgaaaacgcaacaagacgggcaagcatgacgtccaggtcctgactgccaagccccgcaacggcctggctggtgacaccgagacctttcgcaaggtggagccaggccaggccatcccgctcacagctgtgcctggccaggggccccctccaggaggccagcctgacccagagctgctgcagttctgccggacacccaaccctgcccttaagaatggccagtactgggtgtgaggcctggcctgggcccagatgctgatcgggccagggacaggcttgcccatgtcccgggccccattgcttccatgcctggtgctgtctgagtatccccagagcaagagagacctggagacaccaggggtggagggtcctgggagatagtcccaggggtccgggacagagtggagtcaagagctggaacctccctcagctcactccgagcctggagaactgcaggggccaaggtggaggcaggcttaagttcagtcctcctgccctggagctggtttgggctgtcaaaaccagggtaacctcctacatgggtcatgactctgggtcctgggtctgtgaccttgggtaagtcgcgcctgacccaggctgctaagagggcaaggagaaggaagtaccctggggagggaagggacagaggaagctattcctggcttttccactccaacccaggccaccctttgtctctgccccagagttgagaaaaaaacttcctcccctggttttttagggagatggtatcccctggagtagagggcaagaggagagagcgcctccagtctagaaggcataagccaataggataatatattcagggtgcagggtgggtaggttgctctggggatgggtttatttaagggagattgcaaggaagctatttaacatggtgctgagctagccaggactgatggagcccctgggggtgtgggatggaggagggtctgcagccagttcattcccagggccccatcttgatgggccaagggctaaacatgcatgtgtcagtggctttggagcaggctaggctggggctcatcgagggtctcaggccgaggccactgcagtgccagtgcccccctgaggactagggcaggcagctgggggcacttggttccatggagcctggataaacagtgctttggaggctctgga

SEQ ID NO: 560225 - DNA, 2022 bp, Homo sapiens
gtgtatggccacggcggtgggggcaccccagcaggatgccttccactttcgtgcccacctccaggggccagcaggggcctccgtggctggaccccaaacctcagaggcctttgccatcacggtgagggatgtaaatgagcggccccctcagccacaggcctctgtcccactccggctcacccgaggctctcgtgcccccatctcccgggcccagctgagtgtggtggacccagactcagctcctggggagattgagtacgaggtccagcgggcaccccacaacggcttcctcagcctggtgggtggtggcctggggcccgtgacccgcttcacgcaagccgatgtggattcagggcggctggccttcgtggccaacgggagcagcgtggcaggcatcttccagctgagcatgtctgatggggccagcccacccctgcccatgtccctggctgtggacatcctaccatccgccatcgaggtgcagctgcgggcacccctggaggtgccccaagctttggggcgctcctcactgagccagcagcagctccgggtggtttcagatcgggaggagccagaggcagcataccgcctcatccagggaccccagtatgggcatctcctggtgggcgggcggcccacctcggccttcagccaattccagatagaccagggcgaggtggtctttgccttcaccaacttctcctcctctcatgaccacttcagagtcctggcactggctaggggtgtcaatgcatcagccgtagtgaacgtcactgtgagggctctgctgcatgtgtgggcaggtgggccatggccccagggtgccaccctgcgcctggaccccaccgtcctagatgctggcgagctggccaaccgcacaggcagtgtgccgcgcttccgcctcctggagggaccccggcatggccgcgtggtccgcgtgccccgagccaggacggagcccgggggcagccagctggtggagcagttcactcagcaggaccttgaggacgggaggctggggctggaggtgggcaggccagaggggagggcccccggccccgcaggtgacagtctcactctggagctgtgggcacagggcgtcccgcctgctgtggcctccctggactttgccactgagccttacaatgctgcccggccctacagcgtggccctgctcagtgtccccgaggccgcccggacggaagcagggaagccagagagcagcacccccacaggcgagccaggccccatggcatccagccctgagcccgctgtggccaagggaggcttcctgagcttccttgaggccaacatgttcagcgtcatcatccccatgtgcctggtacttctgctcctggcgctcatcctgcccctgctcttctacctccgaaaacgcaacaagacgggcaagcatgacgtccaggtcctgactgccaagccccgcaacggcctggctggtgacaccgagacctttcgcaaggtggagccaggccaggccatcccgctcacagctgtgcctggccaggggccccctccaggaggccagcctgacccagagctgctgcagttctgccggacacccaaccctgcccttaagaatggccagtactgggtgtgaggcctggcctgggcccagatgctgatcgggccagggacaggcttgcccatgtcccgggccccattgcttccatgcctggtgctgtctgtctggggatgggtttatttaagggagattgcaaggaagctatttaacatggtgctgagctagccaggactgatggagcccctgggggtgtgggatggaggagggtctgcagccagttcattcccagggccccatcttgatgggccaagggctaaacatgcatgtgtcagtggctttggagcaggctaggctggggctcatcgagggtctcaggccgaggccactgcagtgccagtgcccccctgaggactagggcaggcagctgggggcacttggttccatggagcctggataaacagtgctttggaggctctgga

SEQ ID NO: 560226 - DNA, 184 bp, Homo sapiens
  misc_feature (23)..(23): n is a, c, g, or t
  misc_feature (64)..(64): n is a, c, g, or t
  misc_feature (124)..(124): n is a, c, g, or t
  misc_feature (130)..(130): n is a, c, g, or t
  misc_feature (159)..(159): n is a, c, g, or t
  misc_feature (179)..(179): n is a, c, g, or t
gaacctgaggagcccggaagcantgacatcaccgttcctcctcccagctaccgaagcgccgcgngagcgctcacaaacacggcttctcctggtacgggctggttacgccctccagctgcgcccnctacangacgacagacgcgtcccccagcccttctnctgtcctaccacttgtgtcngccat

SEQ ID NO: 560227 - DNA, 213 bp, Homo sapiens
tgttggtcacagctactaggaatgaggtgatttctgagggctgagaaaaaacacaggatcttggccagacagaccagacagactgcattggttgaaaagattgccataccacattctcatttgagagttggggttgagggcaaacatagaacccaggtttgggctttacaaaccagtgtcccggaagccctcctttcgggagatcttgttaga

SEQ ID NO: 560228 - DNA, 398 bp, Homo sapiens
tgtgcgttgggaggcagaggtgtgtggatcgtttgagctcaggagttcaaggccagctttggaaacatagggagacccgtctctataaaaaaaaaattagccattatggtggcacacgcctgaagcccaagctatcccagctgaggtgggagggttgcttgagcctgggaggctgcagcgaaccgtgatcacgccactgcactccagcctgggtgacagagcaagaccctgtctcaaaaaaaagaacagccttgtgttaacaaccaaatgcaatatatgtacttttagatcctgatttgaaccaaataattgtaaaaagacatttttgggacaatccaggaaatttaaatatgtgtaagacatttaattaggtaagtttcctacctgcgaacctatga

SEQ ID NO: 560229 - DNA, 276 bp, Homo sapiens
agtgaggcagggagagtgcttgaacctgggaggcggaggttgcgctaagacatggatcgcgccatatgaactcctagactgggtgacaggagtgaaaatctgtatcaaaaagaaataaaaaaacgaggtcaagtagtaagagaagcggtaagagtgacgggaacaggagtcatcgacctcatgggagaggagacaatggaggtggtgatgcatcgctgaagcagccacacacgctttattctcgcgaggacagcagcttgtcagcgcacgggcatg

SEQ ID NO: 560230 - DNA, 1219 bp, Homo sapiens
tggctcccagtcaatgaaagggaccctttattgaggctccagggccacggggcctggcgcaggcaggctgcccttcaaggaaagaacaacctttaatttgcaccttcttctggggaccgcaggttgtcggtgtgcaccacacttctctcttgcggcagttgacagccacgagggtgaaggcgagctatagccacttgcggcagatcatctgtgtcgcacgttgatattcctgggcaagctggcgcgacaagaaggcctcaatattgccacctcgacaggcgcaacaccaggtgccagggttggactcttatctggcatgttgtagtctgaacacagttgcggccatcctccagctgtttgccaggcaatattatcagaacgcctgcctggtccacggctgggatataacccctcctcttgatcccttgaaacatcttcgcggcctctcgcactattttctccacagtggtgctccactggagctctccgacacctccacaggcgctgcatggctactgagaccccgttgagagggagtccttccaccacaaaaacatcgtgcttgtgtttgtgcagctccggcagcgaccgcgcgcccaccaaagccgagccccgtgggtttgcgcgttagccattgggcgttactcgggtgttccatttacaggcgcttagtgttcaggccgcacttgcccgggagcccttttcgcgccgcttttcccccaggggatcccggattgtcgtgcgcccgatgtgacccaggcacttcatcagagcaagcagcgaggatcttcgtgaatccacgagaggggacccccaagaaacaaagcggctcgagaaacttatgtggcaagaccggctccttacgatggaacttccgcaccaagcgttttcccgtggataggatgattaccaacaaaagttgttgccccctccaagtaatatagcgcaagatcttgcccttcccattatgaagcgtttacagaaggtgggcactcccgagggaacagcgtagttttcttcttaaaccgtgtatgttggtaaaacctcccttatgtacacacgactgtgaccccgcgaaagaaacgcttttctcagtgctaaaacattccctcacatttctttgtgacaacagcaacccttgcggttatagaacacgttgttgggatcccatgtgttgagagacaataattcctcagggaccatggtgaaacgaacctca

SEQ ID NO: 560231 - DNA, 194 bp, Homo sapiens
agaaccccagtttcatcagcttttttagacaccacaggtttagcagtttgaacaaactgaaactttatacttctgtgtgagctgtactcaagtttcagataatcatcgccatgtggaggctttttgttaatgcagaagacatttcaaaatattgtatttgtatctgccttcactgctgccaatttagtagcatc

SEQ ID NO: 560232 - DNA, 196 bp, Homo sapiens
aacattccagctgtttaattctggcagatctgatgctgatatgatgctgtatgatctataaaaaaaaaataaaagtacaaatccatatagtgaaatagtccaataataaaatacataacacattaagtactcagctaagaaaagggcactataaggatacaaaacacttcccagacagcagacagtcctgagaatg

SEQ ID NO: 560233 - DNA, 737 bp, Homo sapiens
  misc_feature (17)..(17): n is a, c, g, or t
  misc_feature (25)..(25): n is a, c, g, or t
tccatttggtccccccntgagttantggatatctgtcgacccacgccctcgcgtgacgcgtgggaggcattcaggactaaaggaccaagggggcggtggacccagtcattgtaccatgctgagcacagtgcacacatggtgctgcagcatgcttcttccagtgaaactgacacagggagctcagcagggctcagatcctgggacccctgtggccagtgcctgccctccaccttgagtgccatactcccaacagactccaggtacccacctggtggcattgtgcctgctcagtgaaacctctttgctccacgacagcatgggtgctatcagctgctggcccaatggccacggagcgctgggttctgcaagcagggctcagcctcagctggcgtataaagacccctggaatgacatccatacatggtgaccctgacacgggccactgtttgccacacttgaggcaacgcttgggtgctcccaatggttcaaaatagctttattcattatgacactgggccaggctctacgaacgacccatggcggcagcgttcccaccgcagggtgtcccccccacctttttacaacgtgcgctgaccggttagaatgacaatccatggtattacaaagggcccacaaaagtgtgcccgacgtgcagcaggtcttgggggccatccgcgcttgggactcctaggcgattgtcccaccaaaacctggctgcgtgctgtacccgaagctcc

SEQ ID NO: 560234 - DNA, 154 bp, Homo sapiens
cggtcgcctctcgacgactcccccccccctcctatactgccggtagacggcttcctacgaccgtgtgacccaccgtcggcttggacttaacggcgacccgcgactttctacggactacgtccgtacgaccttacgacacttgtgacacgactga

SEQ ID NO: 560235 - DNA, 86 bp, Homo sapiens
gaagagcagaagggcttgccattcaagctaagaaggaacgggaaatccaggaaagagaaatgaaagtgaaactggaacgccaagcc

SEQ ID NO: 560236 - DNA, 397 bp, Homo sapiens
ctcccctcccccgacctctgctgtggcttttcctgacgggaaatccatgggacaagccgtgctcggtgcaggctcccgctctgctgagccctggggccaggggagggggccaggtcgccagcggcgcaaacgcggtgggggcgcaagtgcgtgtttgctggagcccagagctcccgtctggggtgaaagggtcgtggcacccagaggtgaggtttgttcacagccctcgggtaccaccaggcgccctcgggtaccaccaggcgccctcgtgggcgctgggagcagctccgggcgcctggcgcggctcgtgggcgtccctctcgcgagctgagcgtgggcgtcggcctctgggtgctgtcccgacccccacgaggctggtgccgggagatgctgtggc

SEQ ID NO: 560237 - DNA, 83 bp, Homo sapiens
agggtaggaggtgctggtggggaggaatggcgagtgactgctaatgggtatggggtttctttaagtgcagaaagatacttgtt

SEQ ID NO: 560238 - DNA, 188 bp, Homo sapiens
gcttgagcctaggaggtcaaggctgcagtgagccatattcattcccttgccctctggcttgggtgacacaatgagatcctgtcttaacaaagatacacagatgaatagataatcctcatcttcagagcagcctcacaacttaggtggtggatgacttgtgcataggtacattcatgctaccaaggcag

SEQ ID NO: 560239 - DNA, 156 bp, Homo sapiens
attccttaacgcctgcttcactagtattggtattttccacatccactaagactatcatattgtctgaattgcttggggaaactgtagggggaacctgtagacttgcactgttggcattcgcccttggtactgaacgtcgtgactgaaaaaaccgtg

SEQ ID NO: 560240 - DNA, 782 bp, Homo sapiens
tacgggtgaaatccggccctgagcatgtcgaaggtcaagtctacagggcccggaagcgcgttcacggttgcgggaggacccccgggtgtcccaatggggagggctaagacgcctgcggcgttacgctgccatgccaggcctcgcgggagccaattccacccgcgcgctggttgcgagccaacgtggccatagcgcaagacacggtcgtgcctgggccacacacacaggccgtcgttaaacacccggaggtaggcaggcaagggcaaggccaagacgctagagctcgccccgcatgcccattgccggggggaaccccgagatcgtgcccccgagccccgggtcccaggtaaggtcccacatccagccagccccagtgagcacctacgtgcgtaggtccaagacacacgaggcaagagccacgctgagtcctcctacccagtcgcccacataaacgggggggtcaccgaaggagacgagcgttagctgatgcctgggaggagcaagggtcgagggctgggcgaacccaggagttccccctccccttcccatataagcatgagggtactataaggtgttttgggtttttatagtgttattattattgttatttttttttccagtagtacgtaggcttgtgcttttaagaaaggggatatttaaaaaaagaaaagacaaaagtgtttgttaacaacaaagccaacacccacacctgtgtctgtatatagtcagcttatgctcgtgttcaatcgtctgatctcattacgacaatgggaaatgcgatt

SEQ ID NO: 560241 - DNA, 108 bp, Homo sapiens
gcccctaaagcaattctctgttccaggggagggagttacctggcattgaatgctgcaggctttacgacttattccaaggaagttcttgattatgctaaagataatata

SEQ ID NO: 560242 - DNA, 576 bp, Homo sapiens
agcatgcaacacttggggttgtgactgaggggacaggcggaagggaaagacgaaagattagggatgggttgcactgggcacagagactaggaagggactgatgtgtaaaggaatgcctggacttcaagtacctcagaccatttgcccattttacgacaagaattatttagatcttgtaggaatggaaaaattgaaagtgccgttttccggctatttggaactactgtcgagcttgtattggagtcaagcggcattgcagaagaaagtaaggcatttaggttttaggtcaggtgtgagttgaagaggttttaagtttttgagaacacaggctaagggagaagaaggaagaatggaaggtggaagcttacccatagtgaaggaggcaagcccagagaaaagagtagaaacacagagaaggggtggggggttcttgccctccagaaaagcagagaaggggtaggggcatggaaataagaggtcagggtgcggaaattagggattgggcacagagatagaggtggcgtgtggaaatagtgatggggggtcttgccctaagaagcggactgctgctagata

SEQ ID NO: 560243 - DNA, 532 bp, Homo sapiens
actagttctagtaagcctctacctgcacgacaacacataaaaaaaaaaaaaaaaaaaaaaaaaaaaaaaaaaaaaaaaaaaaaaaaaaaaaaaagggggggggcgtttaaaatttttcctgggggggcctttatttgcgttccccgttttttttttaaaagggggcccctttgggggggttttttaaaaattttggggggggggtgttattaacaaatgtttgtgttgtgggaaaaactgtgtagacgtcttggaggattcttgtcggaagagaggagacaccttttatttttgtggggggggggtcgacaatatattggggaaaaaaccattttctcctacaaaagtagatttttaaaggctctcgtagtgggagaaatattataaaaattttaaagaggtgttataatgtgggtgtatacacaagcgcggaaatatgtgtggcggattagaaagagttgtggcgtacacaggagtatttgatttatagaaaaatttttttcaccgagggctttgttagataaaaggggtg

SEQ ID NO: 560244 - DNA, 209 bp, Homo sapiens
tgtagagactaccaggctccatataaacgatatttggtgtgcagctcggtgctcacgtggggacggaacttgtacagggaggcatgcaccgcagtgttgaatacacgtcgaccaggctccatctaaacgatctttggaggtcagcacggttctcacgtgacgacggatcttgtacacggagtcatgcaccgcagtggtgaatacacgtg

SEQ ID NO: 560245 - DNA, 434 bp, Homo sapiens
  misc_feature (101)..(101): n is a, c, g, or t
agtcagagcacagaatccttcacagcgctaggcacctatgtaatgcatgtaatcctgtagaattgacttctctcacatctcctgtcttcccacctctgccncctcgggtctacatccattatgttaatgagctgtacctcagatatctgtgaaaagaccgatcaacgcagctggttgcacttcaagagctctagagtgtgtcaatcgagattagttcagaggtccttgaaaatacacttgttataaagattaaagattaagaactgttacaacctgtcctggtttaacagtggtatagagtgtaggctctggaacaccatatgctaactacgggagcctggaggcgctatcgatagaagacctagtgctagtcattcaacgtcctcagtgcctgccattcctcatatgtgtcgagtgtctgtaagagctcgtgc

SEQ ID NO: 560246 - DNA, 149 bp, Homo sapiens
tacgaggattacctgggaagctttaccaatttcaggcccttccttaggccaggtacttcagatcctcagagctccccagggggctccactccacagccaagggtaggaggtcctggtctaggtttgtgaggtcacctccttttacacct

SEQ ID NO: 560247 - DNA, 262 bp, Homo sapiens
gatctggagtatgttatgactacgagtcagttggggtgataaaaatttggaatacatatttgatgatgcacaacatctgaatgtaattatgcctctgaatttatgttaaacatgttaacatggcaagcttattacatatgcttttaccacaataaaacattgtaacattaatcatagaaccaaaaccataaaaccatttttttaatctgtatatatttcacagagtacaaaggtgcaacattttcggttcacatgggatata

SEQ ID NO: 560248 - DNA, 141 bp, Homo sapiens
tacgctcagccaactgttctagacttcaatgctccagtgctatgcataaattttagattcgccgtttgcggaactctccctcgtgcatcgatggtaccttcatctttataatcatgtttcgacactttataatcatgtttg

SEQ ID NO: 560249 - DNA, 534 bp, Homo sapiens
  misc_feature (507)..(507): n is a, c, g, or t
acaaccaaagtgatgatcacacggaccgaggtcaatgacaacccaccaaagtttccgcagagcggtataccagaggtctgtgtcagaagcagccgtcccgggggaggaagtaggaagagtgaaagctaaagatccagacatgggagaaaagggcttagtcacatacaatatggtggagggagatggtatggaatcattggaaatcacaagggactatgaaacacgggagggggtgataaagctgaaaaagcctgtagatttggaaaccaaaagagcctatagctggtggggagagtgcatgccaaagaccttgatgctgccaacagccggataaggtattccatcgatggtcacacggacctcgagagatttttcactataaatccagaggatggttttattaaaactacaaaagctcgggatagagaggaaacagccgggctcaacatcagtgtctttgcagcagaaatccagaatcggcatcagggaagccaaagtcccagtgcncattagggtccttgatgtcaacgataa

SEQ ID NO: 560250 - DNA, 1168 bp, Homo sapiens
gaagaagcccacgcagattttaattcccactctagattctggcttcatcgttatgaagcatatgactgatcccgctggcatacgtatctagaactcacgcatggacgaactgcgacacgaagcttcgatgagcagctgttagagctttttgaatttggtggaccagaagtcctgaaattgcgatcagatattgcagtaccgattccaaaagaccatcaggttctaatcaaggtccatgcatgtggtgtcaaccccgtggagacatacattcgcatctggtacttatagtagaaaaccactcttaccctatactcctggactcagatgtggctggggtgatagaagctgtaggacgataaatgcaatctgcttacaagacaaggtgacagagactaaactagcagcacgatctctgcgcgggattatgcagagtatgctctatgcagcaagaacacactgtatacaaactagctgaaaaactggacattctacacacggagctagacaatcggcataccatatacatcctgcataatcgaagcatctgatacaacagtgccagatgtgaaagctggagcgagtgaccgggacaaagggagaagcgcacagacacacggaaacacaacaatgacacaacagcacacacatacgggcaccacaagacttaaggcaacacaagacagcagcacacctgacgagaacggaacacaacaaagaccggacaggccaaccacgagaacacaagaacgaagaaaaacacgaagcaagcgaaaaacaatagaatacacaaaacaacgacaagaaggagaagaaagaaaacagagcgaacgtaatggaaaaggaacagcaaagaggaagcacacgacgagaggaaccggaagacaacaggcaaaagaagaagaccaggaaaacgggagagcggcagccaagcgaccgggaagaaagaaagaaaaagagacagcgcggcacaggaagagagcgcaacaagggagacagcaacacaagcgcacagaagagaggaacagaaaccgagacgaaagacaggagaaacgagacacaaggaagaaaagcggcaacacaccaaccaaagaaatgcgcggcaaggagacagacggagagcagaaaaccgccgcagaaggacgaaacgagaaggagagagaagaagaga

SEQ ID NO: 560251 - DNA, 765 bp, Homo sapiens
gtatagtatagcactaagtttggaccccaatgaccagaagtctctagaggggatgcatgaagatggagaaggaggagagtcccacggagtgccactcaggaggaggatgtggactgactactggaatgggagtggggaagaaggggacctgtgtagaggcagcgcacagctgaggctggcccgacgttggtggctgaccagtgaggcgagttgcgtctcgcgcatgcgacgtgtatgtgggtggcgtggtagctcctatggcctgccagtggcctgcccggctctgagctacttccgtggactgactggtaaccgtaggagcctgctctcaagcaagggacgatcgattctagcatggttgatatgctaggcaaggggtcttctgcaccaccgtgcagcatccacaaattccttcagctaggtcgagttctgtatctcgtaacacatgacgagcctttgaccgaaccttcgctatgtatcgtaccctatcacatcccgctgcgtccgagccagggtaggactgagggagtgccccgagtacccacgcatcatgtcggggcgtatctgggccaatgagtagcttttatatatacactaattgctgagatccaaaagctcaaggaatagacagtgttctgtgacatggattggtttgaaggagttacccaccatcccagcacgataatgtcatctcccaagtggatggcagcacgatctgggcctagggagcttcctggttccagaagtcaattggccctgggctat

SEQ ID NO: 560252 - DNA, 253 bp, Homo sapiens
gggttcaagcgattctcctgcctcagcctcccgagtagctgggatgacaggcgcccactacttccggctaatttttgtatttttagtacacatggggtttcaccatgttggccaggctggtctcaaactccaggcctcatgtgatccgcccgcctcccaaagtgctaggattacaggtgtgagccactgcactctgccagaacttcatactacttctctgtccactggtttacttacattataaagattctag

SEQ ID NO: 560253 - DNA, 174 bp, Homo sapiens
cctggaggcgtgaatggccaggcctattggttgaattagataggctgactcgtttcgattataactagtatggtggatatcgcgtgtatgatatgccttgctggtaagaagtgggtctagggcatttataatctatagagcgaaagccttttttcactgcgcccgctcataagg

SEQ ID NO: 560254 - DNA, 118 bp, Homo sapiens
tcgagtagggtatcgtagcagaggcgagctatggggagagctcctgagtgggagcctcctcctgccatggtctgcttgcatgtcttagaggaagcatccgcctcaaagtaggtgctaa

SEQ ID NO: 560255 - DNA, 143 bp, Homo sapiens
agtctggagtagaatgaaggaaactgcaaccagcatgataatagtgtgttcatattagataaaagtagaaggcacaggagaggtagcaaagagacaggcatttcttcaggtttacttcaacacatacggtgaaacaaaacaca

SEQ ID NO: 560256 - DNA, 687 bp, Homo sapiens
ttccccccggcgtccaagtatttactgactcgccccactccccggagccatatgaatgatctgcctcagtgctctgagccctaggattcatctgtcttttcaccgtaggtggcctgactggcattgtattagccaactccgtcactagagcatcgtgctacacgacacgtactacgttgtagctcacttcccctatgtcctatccataggggctgtatttgccctcataaggaggcttcattcactgatttcccctattctcaaggctacaccctatgacccaacctacgcccaaatccctttcactatcatattcatcggcgtataatctaactttcgttcccacaacactttttcggcctatccggaatgccccgacgttactcggactaccccgatgcatacaccaccatgtgacatcctatcctatctgtaggcgtcattctatttctctaacagccagtaatattaataattttcgatgatttgagaagccttccgcttcgaagcgaaaagtcctaatagtagaagaaccctcccataaacctggggtgacttatatggatgccccccaccctaccacacattcgaagaacccgtatacattaaatttagaccaaaaaggaaggaatcgaacccccccaagctggtttcaagccaaccccctggcctccatgactttttcca

SEQ ID NO: 560257 - DNA, 151 bp, Homo sapiens
gagatttagcaacatagggtcattctctaatccaggcaattgtcttctcaacacataggttccgttaatccaggcacctttggctctgactgggtctccatggttacgtgagtgcatttatctagtagagactagataccagtcataggat

SEQ ID NO: 560258 - DNA, 107 bp, Homo sapiens
gggtcgacacggccgtgtattactgtgcaaaagaagggggatacagctatggttcctttggtgcttttgatatctggggccaagggacaatggtcaccgtctcttca

SEQ ID NO: 560259 - DNA, 130 bp, Homo sapiens
  misc_feature (3)..(3): n is a, c, g, or t
tgngaaaatggggaggtcatcaaggcttgggacattgcatagcaccatgaaggtgtgggaggtgtgcacatcacctgcaaaccagaatattgcctacggtcagcaggcagtcctccaaagatttccccca

SEQ ID NO: 560260 - DNA, 422 bp, Homo sapiens
aacactgcgatgctgctagacattacgatgaggtatatgtccagataagcccatccatctatatgaaaataccctaagtgaaaagtgcatatcaatatagcctaacccaccaaacatcatagctcagcctggcctaccttaaacatgctcggcaacactgcaccttagcctaaagcttgggcaaactcatctaacacaaagcctatagaacaagaacagagtagaatatctcatgtaacttacttaatactgtactaaaaagtagaaagaatgattgcataaggtacccaaagtaatagatttctactagaatgcatatagctaacacaccatcataaagtagagccatcataagtagggaaccatactgtacggcgtacaaaataatacataatataaattgctactcccagcctaggctg

SEQ ID NO: 560261 - DNA, 444 bp, Homo sapiens
ggatcagccagttagaaccatatcagcttttaaatccaagaacagttagaattccacatctcgaatttctacaccaagagggaattagtagagtttctacataattggaaaaacatttttctgaaagaacgagtctttagaaggataactctctgcttaagaacatgattagctttctaataatgccattaactatagagatatataatcaagatgtttccacatttacttacgtgagttaaggtagtcaataggcttgtgattaccctcccgagcaagtacgaaaaaagacaaggttattgcaactgctgtgttcactgttcgcagttacttcttctggtgtcttccccagggatgggttcacttccattatatctaatcctgagagtagccctgtttagtagatttcttctgtgatgtagagaccttctctgtatgtcagac

SEQ ID NO: 560262 - DNA, 815 bp, Homo sapiens
  misc_feature (246)..(246): n is a, c, g, or t
gtgccgcaatcccaacgccgggggcagccccgctccggtgcgccgctcggccggaggctctcggcacggtgcatgtaaaattggagaagaaggacaaggagcgggatacacgagaaggagacgagtgccctagcccgggagcgcaagcctcaaagaagcgccattgtcgctgcgccgcgctccgccctagcgttgccgcgctcgtctcgccgccatgcaacctgtcttcgtggagcgtctagcccncagagtcctttggagccatggcgcattcctcgtccgctccatcatccctggtctactacggctcgtgctctcccccgtgctcccagcctcagtgggccttggctctccatgtctgtcctcctcatgccagcgtccccccgagggcatcaccttgcatcccccaaggcggcggcgcttcgcgcaggacagggaggagcgcagcttcgagtggcctctctggttgcctgctcggcccgtgcgactgggagaccataggctctcgctgtgcccggttctcgcacagagaggtcgcccaagcgcccatccgttcgccggcatcttcgtgcggcgcgctcgtccatcgctccgcggtgcggctcgagggctactggtgggactccagcatcggcaggccccacagctgtcccttggcacggtgacaacgccccgtgcggctctgtgcatgtttgggccctcatgcctgcgacccagggcgcacgtggcatcgcctccgcctccttgtgcctaggaccctgcctctgacgcgcggtatcgatgactgctctcctcagccggggctgcctgcacct

SEQ ID NO: 560263 - DNA, 572 bp, Homo sapiens
aggaagaggtggtggagagttcggggcggggggcaaccagaatcgtcgtcgattatctacaaaatatactggaccctgatgaatgtccactggctctccaggcggcattagcttatgcccttctgtctagagccaccataattcctactctcgaagaaccagcatattctttatggggggggtctacagatgcatttcccaataagagggggcgactacagacatcccatccatacctggaaccagtttcactcaaatctctctggaccagtcatgggataagtaacccagctcttctttggacatcagtattaagtgacttacactagctgtcaccagtaaaccaggctctaccatatcatacgacctccttggtcccatggtctacctttccgcctcaataactctactcggtctgctcgctatctccaatcttttttaaacatgggacggttataaattctgggaaacaatctactgacttgcaccaaacaccaatagcgggcgcatataacttcatagcctgccttataccaccttccccctggcttaaataaaggagccttatcatt

SEQ ID NO: 560264 - DNA, 430 bp, Homo sapiens
gaacgttaacacaacccgacaggttgcccccttcagcttctatacaacctactatcccctttccccaggggtcctgtcctccactccagatcattcctttagtcatagagctgggcagtgaagtggatatcactgaaagagataaggaagccagactacactgcttacgttgccatgatccctcagtgcataaaggagagaagacaccccttcagataatgatagtggcatctgtatgagcccagagtcctatctggggtctcctcagcacagcccctctaccaggggctctccaaataggagcctcccatctccaggtgttctctgtgggtctgcccgtcccaaaccttacgatcctcctggagagaagatggtagcagccaaagtacagggtgagaaactggataagaagctgaaaaaaatggagcaa

SEQ ID NO: 560265 - DNA, 117 bp, Homo sapiens
cccccgagctagcccagcaggccacaggtccctctttccctcctcaccctcttccccctgtcgggctggttggggaggatggtgaccttgggagtcgccctgtcgggctagtcgggg

SEQ ID NO: 560266 - DNA, 1824 bp, Homo sapiens
  misc_feature (66)..(66): n is a, c, g, or t
  misc_feature (70)..(71): n is a, c, g, or t
tcatggtatggaatttgactgtgaaagttgattagagaccttgagggaaagcctccctggagatcnagannatcagatttgctatgctggcttagaactgtgtcctatcctactacagatgtgtctgtcagccatgaagagatgttttaggtgtctcttccagaagttgatttccgctaataacccacagtggatctatgaataccagagttgtacgtgattttccaagtgaataggcgccattgttttggttttaaataccctttccagtaatgactggtattttttaaaaacctaccctagcatgttgatcaggctaaattaagttcctctctcaagccttattgatggctcagtgcccattatattttaactacaggtaacagcagtttgtcctaaatgcattagtttgcacttgtccaggttgtagctcttttatgcctctgctttttcccacatggtcttatgagaacatattgcatatattcccttcagctgagcatttcaatacccagacaagtgtttgtcattttaggcctcatcacatacttgaaattccaagtcctttttaaaagaaatgttaagtagctggtgttgctactagatccctggattattccacttgtccatccataaaagttcctgtttattctctaccttctgtttctatttctaagccaatgctttaagacataacatctgctccagcctgttcactatccatgtggttttaaactcttaactttacttcttagcttcatccctgtaagtaagtgctctctacctcacaggggtcttatgagggggaaaaaataagatgtttaagggttgttttaagagagagatccttcttttaaagtgattttatcaaagccccttgggttagaaatgaaaaactctatagctatttttttcctattctcgttttgctatttttatttctgaaaagtgatctgtctgaaaagagccttatatctggttttaacttctcctcattgacccttttcacagtgaaatctctactttatccatgctctgaactttttatttatggagcccaaactaattttcccacaacaaatctcacatacttttactcctatcattaaacaaattaatgtcctccacaaagaaacatctggctcttcctacaagaagtcagaagctaatgaggtctcactctggccctggcaagatctcacagtgtgccttggttctccctgtgtaaactgaggtagtccggctattccccagcgcccaggtgttgtgagtcctaataaatggtgaaaagcattttgcaaatgttctgtactatataaatgcatagtgcctaatatggagagtcttcaagcaaaaatgtgctctagctcaattcagaatactaattcacccattgttttcaaaagaaatgttttactaacctgtttttttttcttttgtaaaattagtttctagtcatttgaactgtttttattttgtgtatagaagtgatcaatagtatatattcttgcttgtcagagaatacccaagttgtattgttaaatgttaaaacaatggggttacataacagtatagttggatagggaggaagattctagctcaaaagttgcaaaatacagaaatacaaagattagctttgaattggagattgtactataaatagtagatgttaatgtggtggtttctagatatatactttatttttaagttacaagaaattgtcttttatttttgcagttttgaactatatgattctttacatgttttaaataaagtttttatcaactaaaaacaccacaaacggaaaaaaaaagaaaaaagaga

SEQ ID NO: 560267 - DNA, 115 bp, Homo sapiens
cgttaagtgctagcttgttagtcttgaatcctcaggcaagtcactttattgcctggctgcctcagatctcttactgttaaggtgggcatagatgaagtataaatgcgttgagtgt

SEQ ID NO: 560268 - DNA, 1214 bp, Homo sapiens
  misc_feature (898)..(898): n is a, c, g, or t
  misc_feature (930)..(930): n is a, c, g, or t
  misc_feature (965)..(965): n is a, c, g, or t
  misc_feature (1033)..(1033): n is a, c, g, or t
  misc_feature (1036)..(1036): n is a, c, g, or t
  misc_feature (1064)..(1064): n is a, c, g, or t
  misc_feature (1084)..(1084): n is a, c, g, or t
  misc_feature (1122)..(1122): n is a, c, g, or t
  misc_feature (1143)..(1143): n is a, c, g, or t
  misc_feature (1146)..(1146): n is a, c, g, or t
  misc_feature (1149)..(1149): n is a, c, g, or t
  misc_feature (1151)..(1152): n is a, c, g, or t
  misc_feature (1155)..(1155): n is a, c, g, or t
  misc_feature (1214)..(1214): n is a, c, g, or t
tggtgtgttgttgttcggtgtggggcgttgtctctggtctctgttggtttggtggtgtgttgtgtgggtggggggggtggtgcgggtgtgccggggcggtgtgttggcgcgctgggtgttgccttgcgtgggtctgtggggtgagcgtggggtgttggttgagtggtgtttggtctggggggactgcgtgattttgtgccctgtggttgtgagggggtactgggtgttgtttgcttgggggtgtgggttgggggcgggtgcgtagttgggacgtttggttggcgtctgcggctgtatctgtgttgttgtgttgtgtccgttgatataatcgggtttacttttaattaactttacccttgatgtatttctgtaccatagtagcgattgttaggttgacaactataggtaactgcggaagtgattccacatagtgttgtttcttctgattgcatggcttggtatttgcgtttcgtgcccgcggtaaacttttcatcgggtgctctataggtcacgctagggccctgtgggttggctgtaatgtcgtgcctcgtagtgttctcagtattttcgcctgccggtctgccgccatagattgatgtgtcgtggtcgtcccgtcctgccacgcatgtcctggccaccgtctcgagtacctcatgcactatcgtctctgatccagtgtgatggtccctagtcttgatagagtaaagtagaagcaagaagttcccgtgtgtttaaggccgtgtcattcaagagccaggtggtcgcggggacaaacgacgttcatcaaggtgcactgtcggcgatcgaggactgtgcgtacaccttgcgagtgttgccaatgctgctgccctgcatgaataacaagccctgtgagcctgtatgctaatctaccagaccnacaaagccaagcatgatgagctgacctatgtnctgatcctgactttggacaaggcccttcagccagnagactgacaaagtcatcctccgtctaccagagcgtgcacttgtgatcctaaaataagcttcatctccnggntgtgcccttggggtggaaggggcaggantctgcagctgcttttgcatntctcttcctaaatttcattgtgttgatttcttcctccnataggtgatctaatacttcanatngtncnntangcagctgtgcgtgtgctcgactcgttcgcgcgagtgtggttggtgttgtgtggtttggn

SEQ ID NO: 560269 - DNA, 842 bp, Homo sapiens
  misc_feature (54)..(54): n is a, c, g, or t
  misc_feature (87)..(88): n is a, c, g, or t
  misc_feature (105)..(105): n is a, c, g, or t
  misc_feature (115)..(115): n is a, c, g, or t
  misc_feature (132)..(132): n is a, c, g, or t
  misc_feature (139)..(139): n is a, c, g, or t
  misc_feature (148)..(148): n is a, c, g, or t
  misc_feature (153)..(153): n is a, c, g, or t
  misc_feature (162)..(162): n is a, c, g, or t
  misc_feature (164)..(165): n is a, c, g, or t
  misc_feature (169)..(169): n is a, c, g, or t
  misc_feature (178)..(178): n is a, c, g, or t
  misc_feature (185)..(185): n is a, c, g, or t
  misc_feature (188)..(189): n is a, c, g, or t
  misc_feature (260)..(260): n is a, c, g, or t
  misc_feature (264)..(264): n is a, c, g, or t
  misc_feature (270)..(270): n is a, c, g, or t
  misc_feature (305)..(305): n is a, c, g, or t
  misc_feature (370)..(370): n is a, c, g, or t
  misc_feature (375)..(375): n is a, c, g, or t
  misc_feature (430)..(430): n is a, c, g, or t
  misc_feature (480)..(480): n is a, c, g, or t
  misc_feature (553)..(554): n is a, c, g, or t
  misc_feature (663)..(663): n is a, c, g, or t
  misc_feature (676)..(676): n is a, c, g, or t
caggagtaggcctggacccaagtgaagcgcaggtggggtgtgaatcctagcgcngctggcttctcaggcataggtggtgacatactnncgccccacgttcccgangtaggaaccntcccactcactcatganctcaaancctacaggncggcnacacacatngnngggngcgaaaganacatccnggnngggcagccccaccgcagtccaagccagcagcagcttctccacaaaatcttccatcatctgatggctgtggntttnggttgntgccaagcgcaggagctcttcatcccgggggacanttgggtagttgatggcctgcacatagatgccatgcttggagagcaggagatcacagagcttgctnttgantgctgcattgcccacccggatggggatgatgtggctggggcaggggatgacaggnaggcccctgtccatgagtagctggcgcatgttcttgatattgcgctggtnggctcgcctcagggcttggccctcctctcccttgagcagccgcacagattctagagctccagagagcaccatnnggggcagagaagtggtaaagatgaagcctgcagcataggagcgcaccatgtccaccaagtcacgggtgctggcaatgtagccgcccacacagccaaaggccttgccaanagttccagagatnatgtcaatcttatgcataattccatcacgctccccaatcccagcgccccggggacccatacagtcctacagcatggacctcatccacgaaggtcagggccccatactggtgggacacatcacacaactcctcgaggggacagatggcaccatccatggagtggaca

SEQ ID NO: 560270 - DNA, 470 bp, Homo sapiens
  misc_feature (172)..(173): n is a, c, g, or t
ccatagaaagaaaatctaaattaatctagtaagtgtatgacctctcaccattttaagaggtatcagattcatttgcactattaggaatgctagttttgtgcaaaaataatgccttacctgttttttcccgcatttaggttgaaaagctttcaaatgttccaagttatgctgnncccaaaaaaacccaaccaaaacccaaaccaaaaatattaaaaaaaaccccccccaaaaacaaaacccccaaaaataaaaagccccccctttttattcctgcttcgaaatgcaaatggatagagcccggtttttctgacagtataatgatagctttgtgagttagtttcatgtcatgctgggaactctttatgaggtggccataaccagcccaaacacccccttgcgttttattagtatggaaccatttgcatttgttttttttaagctttatctttccttgtgcatcctggccaaga

SEQ ID NO: 560271 - DNA, 377 bp, Homo sapiens
ggatgaatagtggagtaggaatatcagtagtgcatcggagcagagaatagctgggcccatgttcacttccaaatctgaatagaaaccatcatagtgcctcgtagtcctggaaacattcagacaacagaattcagggaaaagtggtccagcctagccatgtcaacatattataaagctatcacagttcaccctgtatcagcctggcacctatatacagccctatttaaatgtgacttaatatccaagataaggacaaccttatgcttgcatctacagtgataaaactaatctgtgtacagactgaaaacattctctccccgttctccaaaagtgtctctttttggtcttgagtgatattctttctgctccaactcata

SEQ ID NO: 560272 - DNA, 207 bp, Homo sapiens
gcgtctctagaggttccccgcacgctctctctgtggtgggaactgggttctgggttcacctctgctgctcatggaacgtctctcagttgattatggccaccaagtccaagctggagttctctatttaccctcgcgccccaggtttccacagcatgtatttcatgcccctacaacgtccatccctcaccacccactaccacagagtcg

SEQ ID NO: 560273 - DNA, 128 bp, Homo sapiens
tgtactaccccctataccttctgcataatgaattaactagaaataacttatgcaatggagagccaaagctaatgacccccgaaaaccagacgagctacctaagaacagctaaaagagcacacgtggta

SEQ ID NO: 560274 - DNA, 1451 bp, Homo sapiens
  misc_feature (41)..(41): n is a, c, g, or t
agaaaccacgccgtgcccccttcagcttttcccccctccgncgcatttttccatctccccttgagtgagtggatgtcccgttgccttttctcagctttgcgcgacgtggtcccacaaccgttgcctttttaagagaggcccggcccatccagagggggtggggcagaggcggagtctgaggagctggggaaggaacaaagcgaggcctgcgggcggcggctgggctccggcggggccgcggggtgcggggcctgcgggcggcggcccgggcggagcgttggagggaaggaggtggcatcgccgtccgcgccggccccggccatgaacgggctgccctcggcagaggcgccgggcggggcgggctgcgctttggccgggctcccaccgctgccgcgcggcctcagcggcctccttaatgcgagcgggggctcgtggcgggagctggagcgcgtctacagccagcgcagccgcatccacgacgagctgagccgcgccgcccgcgccccggacgggccccgccacgccgccggcgccgccaacgcgggacccgcagccggcccgcgtcgtcctgtcaacctcgactcagcgctggccgcgctgcgcaaggagatgttgtctgcaggtggggctgcggcagttggacatgtccttgttgtgccagctgtggggcctgtacgagtcaatccaggactacaaacacctgtgccaagacctgagcttctgccaggacctgtcatcctccctccattcggacagctcctacccaccggatgcgggcctgtctgacgacgaggagcctcccgatgccagcctgcctcctgacccgccaccccttactgtgccccagacgcacaatgcccgtgaccagtggctgcaggatgccttccacatcagcctctgaagggctggggggcagggggcatgcacccatgcaaaaggctcagaaactccccctccggcaagccctcagacttcggagcctgcgccttcccccctaccgcctcacctcacaggagggccaggcatgtattcctcagaggcgaaactgccaaactctttctcctgtcttgggttggctggcactggggcgggcatctagggtacagcctctgctcatggcactgggcctccagttcttccacatgtgtgcacccccagcttggccaaccctcagccttgcggtggggcccgaagcatcttcccttccgcttggcgtctctgggattgggatgagtgcctggctcccatctcctcctcaccttttgttgctatcggcagctgctggctcaggggcatcccacctccgggctctgggttcctctgccctggaagggctccaggacccgtcccaataaccacccacggccaggagggccaaggccccgtgctggatatttaaatttaggggccggtctccagggcgcgtagataaataaatacactcagcgtca

SEQ ID NO: 560275 - DNA, 1402 bp, Homo sapiens
  misc_feature (41)..(41): n is a, c, g, or t
agaaaccacgccgtgcccccttcagcttttcccccctccgncgcatttttccatctccccttgagtgagtggatgtcccgttgccttttctcagctttgcgcgacgtggtcccacaaccgttgcctttttaagagaggcccggcccatccagagggggtggggcagaggcggagtctgaggagctggggaaggaacaaagcgaggcctgcgggcggcggctgggctccggcggggccgcggggtgcggggcctgcgggcggcggcccgggcggagcgttggagggaaggaggtggcatcgccgtccgcgccggccccggccatgaacgggctgccctcggcagaggcgccgggcggggcgggctgcgctttggccgggctcccaccgctgccgcgcggcctcagcggcctccttaatgcgagcgggggctcgtggcgggagctggagcgcgtctacagccagcgcagccgcatccacgacgagctgagccgcgccgcccgcgccccggacgggccccgccacgccgccggcgccgccaacgcgggacccgcagccggcccgcgtcgtcctgtcaacctcgactcagcgctggccgcgctgcgcaaggagatgctgtggggcctgtacgagtcaatccaggactacaaacacctgtgccaagacctgagcttctgccaggacctgtcatcctccctccattcggacagctcctacccaccggatgcgggcctgtctgacgacgaggagcctcccgatgccagcctgcctcctgacccgccaccccttactgtgccccagacgcacaatgcccgtgaccagtggctgcaggatgccttccacatcagcctctgaagggctggggggcagggggcatgcacccatgcaaaaggctcagaaactccccctccggcaagccctcagacttcggagcctgcgccttcccccctaccgcctcacctcacaggagggccaggcatgtattcctcagaggcgaaactgccaaactctttctcctgtcttgggttggctggcactggggcgggcatctagggtacagcctctgctcatggcactgggcctccagttcttccacatgtgtgcacccccagcttggccaaccctcagccttgcggtggggcccgaagcatcttcccttccgcttggcgtctctgggattgggatgagtgcctggctcccatctcctcctcaccttttgttgctatcggcagctgctggctcaggggcatcccacctccgggctctgggttcctctgccctggaagggctccaggacccgtcccaataaccacccacggccaggagggccaaggccccgtgctggatatttaaatttaggggccggtctccagggcgcgtagataaataaatacactcagcgtca

SEQ ID NO: 560276 - DNA, 426 bp, Homo sapiens
  misc_feature (68)..(68): n is a, c, g, or t
  misc_feature (241)..(241): n is a, c, g, or t
  misc_feature (276)..(276): n is a, c, g, or t
  misc_feature (278)..(278): n is a, c, g, or t
  misc_feature (329)..(329): n is a, c, g, or t
  misc_feature (351)..(351): n is a, c, g, or t
  misc_feature (354)..(354): n is a, c, g, or t
  misc_feature (404)..(404): n is a, c, g, or t
  misc_feature (426)..(426): n is a, c, g, or t
atcgcttgaacctgggaggcagaggttgcagtgagctgagatcccaccactgcactccagcctgggcnacagagtgagactcgtctcaagttaggctgggcacggtggcttacagctgtaatcccggcactttgggaggcccaggcaggcggatcacctgaggtcaggagttcaaaaccagcccggccaacatggtgaaaccctggctctactaaaaatgcaataattagccaggcgtggnggtgggcacctgtaatccagctactcgagaggctnangcataataaattgctcgaacctgggaggtggaaggttgcaagtgaagcccnagatagcacccattggacttcnaancctggggttgaccagaaccgaggacttgcatctttaaaattaaattaaanttaaaaaaattttaaaggtttn

SEQ ID NO: 560277 - DNA, 1109 bp, Homo sapiens
taacaataattagtgatagttaccaattatggcagtagttaccatatattttcaaatgttttgctgacgttacttcatttcatccggctaaatggataaccccattttttgggtgagggtcatgactaaagttgcatagcttgcaggtggtgcctgatgtccacaaaaacttcgtttaggaaggtgcggggaagatgggctggggcccactattccagggggcggggctgggctggggtggcctggaccccaactccagcccaccctcagttgtctgcaggtggggctgcggcagttggacatgtccttgttgtgccagctgtggggcctgtacgagtcaatccaggactacaaacacctgtgccaagacctgagcttctgccaggacctgtcatcctccctccattcggacagctcctacccaccggatgcgggcctgtctgacgacgaggagcctcccgatgccagcctgcctcctgacccgccaccccttactgtgccccagacgcacaatgcccgtgaccagtggctgcaggatgccttccacatcagcctctgaagggctggggggcagggggcatgcacccatgcaaaaggctcagaaactccccctccggcaagccctcagacttcggagcctgcgccttcccccctaccgcctcacctcacaggagggccaggcatgtattcctcagaggcgaaactgccaaactctttctcctgtcttgggttggctggcactggggcgggcatctagggtacagcctctgctcatggcactgggcctccagttcttccacatgtgtgcacccccagcttggccaaccctcagccttgcggtggggcccgaagcatcttcccttccgcttggcgtctctgggattgggatgagtgcctggctcccatctcctcctcaccttttgttgctatcggcagctgctggctcaggggcatcccacctccgggctctgggttcctctgccctggaagggctccaggacccgtcccaataaccacccacggccaggagggccaaggccccgtgctggatatttaaatttaggggccggtctccagggcgcgtagataaataaatacactcagcgtca

SEQ ID NO: 560278 - DNA, 434 bp, Homo sapiens
  misc_feature (29)..(29): n is a, c, g, or t
tcatgcaagcaactggcatttccttttgnttcaaagcagagagctacaggttaaaaggttaggatatctcccacaggtagctactgtatgttccaccttatcttatgtaaagtgcccagcttactgagcataagccaatgcatacttgactattcccctacctgctcattttgtcttggaacatctgaatgacaagttcctctttcccctccagcccacttttcccctttagatactgaagccctcaaagtcatcttgggagaaaggcacagacaatagactgtttctgtgattctgtgttttttttttttcctcccaggcattctccttagcctggcaaaataaatttctaagttgattaaaacctgtcatagatactttttggtttccaaaatattataaatggtggttctattttcaggccaaaagcctag

SEQ ID NO: 560279 - DNA, 603 bp, Homo sapiens
aaaccacagtggccaggcatttctccaggcctgcctcccccaggagctggctgcaagtgccagaaacctagccactgggtcaaggaatgcccacagcccaggattcctcctaaaccgtgtcccatctgtgcaggaccccactgaaaatcggactgttcaactcacctggcagccacttccagagcccctggaactctggcccaaggctgtctgactccttcccagatcttcttggcttagcagctgaagactgacactgctcgatcgcctcggaagcctacaagaccatcacagatgctctgggtaactctcagagtggaaagtaagtctgtcaccttcttaatcaatatggaggctacccactccacattaccttcttttcaagggcctgtttcccttgcctccataactgttgtaggtattgacagccaggcttctaaacctcttctccccagctctggtgccaacttagacactactcttttaagcactccttttagttatccccacctgcccagttcccttattaggctgagatattttaactaaattatctgcttccctgactattcctgggctacagccacacctcattgccacctt

SEQ ID NO: 560280 - DNA, 213 bp, Homo sapiens
tcgctccagacattgtggaaatattcgtttaagacctccacgaaattgtgaatggactccaggtagccaggttgttgtcattgacatccacacagattcagaagtagcaggccagcatagcggcggtaaatgatcttaaagtcccggaactccacaaagttggtgtgtatggcgtctcggacggtgaccacggcatgcacctcctcgatcagc

SEQ ID NO: 560281 - DNA, 1654 bp, Homo sapiens
  misc_feature (41)..(41): n is a, c, g, or t
agaaaccacgccgtgcccccttcagcttttcccccctccgncgcatttttccatctccccttgagtgagtggatgtcccgttgccttttctcagctttgcgcgacgtggtcccacaaccgttgcctttttaagagaggcccggcccatccagagggggtggggcagaggcggagtctgaggagctggggaaggaacaaagcgaggcctgcgggcggcggctgggctccggcggggccgcggggtgcggggcctgcgggcggcggcccgggcggagcgttggagggaaggaggtggcatcgccgtccgcgccggccccggccatgaacgggctgccctcggcagaggcgccgggcggggcgggctgcgctttggccgggctcccaccgctgccgcgcggcctcagcggcctccttaatgcgagcgggggctcgtggcgggagctggagcgcgtctacagccagcgcagccgcatccacgacgagctgagccgcgccgcccgcgccccggacgggccccgccacgccgccggcgccgccaacgcgggacccgcagccggcccgcgtcgtcctgtcaacctcgactcagcgctggccgcgctgcgcaaggagatgttgtctgcaggtggggctgcggcagttggacatgtccttgttgtgccagctgtggggcctgtacgagtcaatccaggactacaaacacctgtgccaagacctgagcttctgccaggacctgtcatcctccctccattcggacagctcctacccaccggatgcgggcctgtctgacgacgaggagcctcccgatgccagcctgcctcctgacccgccaccccttactgtgccccagacgcacaatgcccgtgaccagtggctgcaggatgccttccacatcagcctctgaagggctggggggcagggggcatgcacccatgcaaaaggctcagaaactccccctccggcaagccctcagacttcggagcctgcgccttcccccctaccgcctcacctcacaggagggccaggcatgtattcctcagaggcgaaactgccaaactctttctcctgtcttgggttggctggcactggggcgggcatctagggtacagcctctgctcatggcactgggcctccagttcttccacatgtgtgcacccccagcttggccaaccctcagccttgcggtggggcccgaagcatcttcccttccgcttggcgtctctgggattgggatgagtgcctggctcccatctcctcctcaccttttgttgctatcggcagctgctggctcaggggcatcccacctccgggctctgggttcctctgccctggaagggctccaggacccgtcccaataaccacccacggccaggagggccaaggccccgtgctggatatttaaatttaggggccggtctccagggcgcgtagataaataaatacactcagcgtcaaaaaaaaaaccaaaaaaaaactccggggcacctatccgggggccggaaaaaggggtccgcaatgggccctgctcaaagctgtccctggaccccactttcttgttccacgcggtgaaatccccgggtccccttatgtcgggtcgttttaattcgataaccagtaactgagaattctccatcacaaaaccaaacaccacaacgga

SEQ ID NO: 560282 - DNA, 1368 bp, Homo sapiens
  misc_feature (41)..(41): n is a, c, g, or t
agaaaccacgccgtgcccccttcagcttttcccccctccgncgcatttttccatctccccttgagtgagtggatgtcccgttgccttttctcagctttgcgcgacgtggtcccacaaccgttgcctttttaagagaggcccggcccatccagagggggtggggcagaggcggagtctgaggagctggggaaggaacaaagcgaggcctgcgggcggcggctgggctccggcggggccgcggggtgcggggcctgcgggcggcggcccgggcggagcgttggagggaaggaggtggcatcgccgtccgcgccggccccggccatgaacgggctgccctcggcagaggcgccgggcggggcgggctgcgctttggccgggctcccaccgctgccgcgcggcctcagcggcctccttaatgcgagcgggggctcgtggcgggagctggagcgcgtctacagccagcgcagccgcatccacgacgagctgagccgcgccgcccgcgccccggacgggccccgccacgccgccggcgccgccaacgcgggacccgcagccggcccgcgtcgtcctgtcaacctcgactcagcgctggccgcgctgcgcaaggagatgttgtctgcaggtggggctgcggcagttggacatgtccttgttgtgccagctgtggggcctgtacgagtcaatccaggactacaaacacctgtgccaagacctgagcttctgccagcctgcctcctgacccgccaccccttactgtgccccagacgcacaatgcccgtgaccagtggctgcaggatgccttccacatcagcctctgaagggctggggggcagggggcatgcacccatgcaaaaggctcagaaactccccctccggcaagccctcagacttcggagcctgcgccttcccccctaccgcctcacctcacaggagggccaggcatgtattcctcagaggcgaaactgccaaactctttctcctgtcttgggttggctggcactggggcgggcatctagggtacagcctctgctcatggcactgggcctccagttcttccacatgtgtgcacccccagcttggccaaccctcagccttgcggtggggcccgaagcatcttcccttccgcttggcgtctctgggattgggatgagtgcctggctcccatctcctcctcaccttttgttgctatcggcagctgctggctcaggggcatcccacctccgggctctgggttcctctgccctggaagggctccaggacccgtcccaataaccacccacggccaggagggccaaggccccgtgctggatatttaaatttaggggccggtctccagggcgcgtagataaataaatacactcagcgtca

SEQ ID NO: 560283 - DNA, 453 bp, Homo sapiens
ggctatttaccagtgcgggaaaggacaatgcggtgattactgtctggtcggaacagatttgcacaatgaccagaagtgggaaaagcaggctggacacgtgggacatgagggctggggactacgtgttgtgaatgcgagcggttaagtcctggtcatcgcctcaagagcccgtggagttgtatgcttggccccaaaacctaccacaaattcatgggcttcaagtcctttgccgaactcccccaaccccctctgctggtcgaactgacagtagaggaggggcagcggctcaaggtcatctattgctccagtgctggcttccatgctgtggatatcgactcggggaacagctataacatctacatccctgtgcacatccagagccagatcacgccccatgccatcatcttcctccccaaaaacgacggcatggagatgcttgctgtctcacgagga

SEQ ID NO: 560284 - DNA, 160 bp, Homo sapiens
agcgtccacatccttcttcagagtcacaaattcattctctgctgctgtgcgctgtggatttcatcctcatatgtgttcttgaagtcctccgagcaggtcctgcatgcctctgagctctgagtccaggcggacccggttccccgcgctgcgaaccgtatgc

SEQ ID NO: 560285 - DNA, 287 bp, Homo sapiens
  misc_feature (208)..(208): n is a, c, g, or t
  misc_feature (287)..(287): n is a, c, g, or t
tagaggtctccattcatgctaccagtcgtatacagtcattagctacccccaagtgtatgggccggacagagagtagcatctgtgcggatatgattcaggaggaggtggtcagggaccctatctgaggggggtcatccatgggggcgagaagggtttgactgtaatgtgctatgtacggtaaatggttttatgtactatgtactgttangggtggataggttggtgggtatcctagtgggtgaggggtggctttggagttgcagttgatgtgtggatatatgtgcttn

SEQ ID NO: 560286 - DNA, 1482 bp, Homo sapiens
  misc_feature (41)..(41): n is a, c, g, or t
  misc_feature (1210)..(1210): n is a, c, g, or t
agaaaccacgccgtgcccccttcagcttttcccccctccgncgcatttttccatctccccttgagtgagtggatgtcccgttgccttttctcagctttgcgcgacgtggtcccacaaccgttgcctttttaagagaggcccggcccatccagagggggtggggcagaggcggagtctgaggagctggggaaggaacaaagcgaggcctgcgggcggcggctgggctccggcggggccgcggggtgcggggcctgcgggcggcggcccgggcggagcgttggagggaaggaggtggcatcgccgtccgcgccggccccggccatgaacgggctgccctcggcagaggcgccgggcggggcgggctgcgctttggccgggctcccaccgctgccgcgcggcctcagcggcctccttaatgcgagcgggggctcgtggcgggagctggagcgcgtctacagccagcgcagccgcatccacgacgagctgagccgcgccgcccgcgccccggacgggccccgccacgccgccggcgccgccaacgcgggacccgcagccggcccgcgtcgtcctgtcaacctcgactcagcgctggccgcgctgcgcaaggagatgttgtctgcaggtggggctgcggcagttggacatgtccttgttgtgccagctgtggggcctgtacgagtcaatccaggactacaaacacctgtgccaagacctgagcttctgccaggacctgtcatcctccctccattcggacagctcctacccaccggatgcgggcctgtctgacgacgaggagcctcccgatgccagcctgcctcctgacccgccaccccttactgtgccccagacgcacaatgcccgtgaccagtggctgcaggatgccttccacatcagcctctgaagggctggggggcagggggcatgcacccatgcaaaaggctcagaaactccccctccggcaagccctcagacttcggagcctgcgccttcccccctaccgcctcacctcacaggagggccaggcatgtattcctcagaggcgaaactgccaaactctttctcctgtcttgggttggctggcactggggcgggcatctagggtacagcctctgctcatggcactgggcctccagttcttccacatgtgtgcacccccagcttggccaaccctcagccttgcggtggggcccccggggaaaaaaaaaggggncatttcttttcgaagcatcttcccttccgcttggcgtctctgggattgggatgagtgcctggctcccatctcctcctcaccttttgttgctatcggcagctgctggctcaggggcatcccacctccgggctctgggttcctctgccctggaagggctccaggacccgtcccaataaccacccacggccaggagggccaaggccccgtgctggatatttaaatttaggggccggtctccagggcgcgtagataaataaatacactcagcgtca

SEQ ID NO: 560287 - DNA, 256 bp, Homo sapiens
cttactttgatgtgtgcaactgttggcgctctggacacatgctggccagatgtagtttgcagacatgctctcaagatgggacaactaacaggcttctccatgatagggaatcctgttcgaacattgcaatccttgtatgcacagagtcctagacttgcacaggagcaccaagacacgcgtgctagacaggattctgagacatcacggatctgcactctcaagggtggccccatgtgctcgagggcgtcttggtggg

SEQ ID NO: 560288 - DNA, 268 bp, Homo sapiens
tactcgatccagtgtattggcaacagctaacactgagtgttcccgctgtactgagaatcatgctaggtgttttgcttatctcagtgaatccttgcagaacccctgtgagcaagatcccaatgttctcattttacagatgaggaaactgggactcagagaggttgaatgacttgcataaggtcacacagctagtaggagtcagaacaaggatgcaaacctggtattcttaagcactgtgatataccttttttgcggttttacttgtgaa

SEQ ID NO: 560289 - DNA, 328 bp, Homo sapiens
  misc_feature (61)..(61): n is a, c, g, or t
tgcagatgggccaccttccgccatcaattacaaaagtaagggcctgggcccctgcccaaancattcactgtctggcccacccagcccccacccccgaagtttgaaagatgcctttcctgaaatggacaggtgctgggtactccactggcccacccctgggctgtccgtctggtgcgggataccccaacaagggcccccgaggaggagaatccctgtcccccaatccccccccatcatgccattccgtctggtcttgtgccagtcagaacacagctcccaaggccagcacccctttgggtaaataaaagacagacatctgcagactttt

SEQ ID NO: 560290 - DNA, 694 bp, Homo sapiens
  misc_feature (93)..(93): n is a, c, g, or t
  misc_feature (118)..(118): n is a, c, g, or t
  misc_feature (140)..(140): n is a, c, g, or t
  misc_feature (149)..(149): n is a, c, g, or t
  misc_feature (239)..(239): n is a, c, g, or t
  misc_feature (249)..(249): n is a, c, g, or t
  misc_feature (251)..(251): n is a, c, g, or t
  misc_feature (305)..(305): n is a, c, g, or t
gcctcgagcctgtgccgccgccgacgccgcttgtgggcccgactccgctctgtctgcttcgccaccttctccccgagcactgcccggccggcngcatggctaacgtggctgacacgangctgtacgacatcctgggcgtnccgcccggngccagcgagaacgagctgaagaaggcatacagaacgttagccaaggaatatcatcctgataagaatccaaatgcaggagacaaatttacngaaataagtntngcatatgaagtactatcaaatcctgagaagcgtgagttatatgacagatacggngagcaaggtcttcgggaagcgcagcggcggccgtggctggcatggatgatattctactctcacatttctccgcgctggcggactcgctccggcttcatgggccaatcagagtagaagtcgacctggccgcacgaaccagcgacaggacctgactgcatccactcaaagtatctctagcaagatctgtataatggcaagacaaccaaactacaacttagcacagactgtgctctgtagtgcactgcagtggccaaggcggacagtctggagctgtccaacacgtgtacgtgctagtcgaggttcgaagtgtgcgcatcctgcctcagaccagcatgggcctcccaggcactggcacaacacgactgcccgtctggcgtgccccggctagc

SEQ ID NO: 560291 - DNA, 143 bp, Homo sapiens
tccgggtaagcctatactgggggcggggcgcttcgtgtggagcttccacctgcatgtacctggctccccaacgtgcacggcaggagctacggcccagcgccgggcgctggccacgtgcacgttggggacccggtacatgcaag

SEQ ID NO: 560292 - DNA, 422 bp, Homo sapiens
aaattcttgctaactcaattttatcatcagtagtttaatatttaaattgcttgcaactttaaaaacagcaccaaagttacctatgtagccatgtggtaactatcacaactgagatgttataaaatgcttctccatatggcattttaactcacttctgcctagtgtttcatcctcagtatctcattagggtccgttagacccaatctcagtttctgagtttctgttttaagtagtactatttataaaaattgatatctcatgacttttttcctctttccaacgagccaacaaacacaccacaacaccacatatttaacacaacagcataacattctatactccacttcccatctggatctactcgacctctttacgaatataacacaacttctgctctttcatcacacatacgacattaactc

SEQ ID NO: 560293 - DNA, 202 bp, Homo sapiens
attttgcggaaactaaacacaagtattcaggttgtgttgctttctgccacaatgccaactgatgtgtttggcaggtgacccgaaaattcatgagagatccaattcgaattctggtgacaaaaggaagaattgacccttgaaggaatcagacagttttatattaatgttgagagagaggattggaagttggatacacttgtga

SEQ ID NO: 560294 - DNA, 110 bp, Homo sapiens
  misc_feature (19)..(19): n is a, c, g, or t
aggtgatctccggattagncgacttaaacagcctcataagatgaggatctgcaaatacagcatcaggtatctatgtttttcttagcaataactcaaaaaaaggggggcgt

SEQ ID NO: 560295 - DNA, 322 bp, Homo sapiens
  misc_feature (210)..(210): n is a, c, g, or t
  misc_feature (217)..(217): n is a, c, g, or t
  misc_feature (276)..(276): n is a, c, g, or t
  misc_feature (283)..(283): n is a, c, g, or t
agagctagcaccatgagcttcaataccctgtcttgtctgccgccatgtaagacatgcctttggcttccgccatgattgtgaggcctccccagccacatggaacagtgaatctattcaacctccttttctttataaattacccagtctcgggtatgtctttatcagcagcgtgagaacaatagggtttcctgggatgcaggattttcagtnctcacancaggggagtcccagacaaggtggggcaaattggttgaccctagtcattagtaaggttanaagggantttcacgtgaagagatcagggaatgcttcgtggcccgcg

SEQ ID NO: 560296 - DNA, 549 bp, Homo sapiens
cagctttgctgggcccgcagaggtgcccaggcggctctgcccggaaggggttcaccccaataaccggagaatctccggtcgccacagccaagcacagcgcacgcccgggaaccccaaggaacacaagagaactctgaaatggggaaggaccctgagttgtggagaaagagcgggaggaagggtcacggagggtccggagccacactcggatcaggcgcgtccacgctgacaagcccgggaccaggtgccggcgataggcagcgccgtcctggacagtcccttccctttcccctacccgtcccctccccggcgagcaccgaagccaactcgggtcccgcgccagaattgccccccggcgccccctcacctaaaggcgggtccttccttaggagccctgccctgggcagacgccgccgcggagctgccgctgctgccccttttgttgaagagcttctggagcagggtcggggccatgatgccgccgccgcagctccggccgtggcgctcggggggccggcggctcagcgcgcagccgggggcggcggccgc

SEQ ID NO: 560297 - DNA, 1184 bp, Homo sapiens
ggatagagacgagagagaactagttgtgaggatgagtatctaactaagacgctacagagatgtgaggaacgaattgtgtcctcattcaagaaggatgtggatgaacgcttacaatgataagcatagggtagacgctggcatgtctgccgccctggaaacgggcttggaacccgagcagagatcagacctctcgctcatggcacatgtctactaatggagaggacggacgatcccgggattacttgacagctcgccatgatcgtcgtgcagcacgatccttgctggtggcatgctcctcactaggatcgaaacgaaggcgcagacgtactgcatggaatcgaattgggaccgaaggcactccaagtgtggaccttgaatgtgcttcagaggggacctagcaaaggctaaccgaagggcaagtaattttggcccaataggccaggcaaggcccgggggccttgaaagggcttgagaagcaattgttacacgcgaagacaattcaaaatggtcatgaaagggacaggtcatggctcagtgaagcacaatgggctttgtggagagacaggctgacagagggagtcgatgagacgccattgacagggtcagcaacaaatagaggaacgtggagaaaatccttcttgaaaaagatgaacacccgagaaaactaatcctagccagagtcactccacaggggtcgtacgaacggatttcagaagggtgcccttcaaaaaggggcccaaggaagggggcttcccccttggggaaggagccctggcccaatttggccaaggaattcgcctggatgacaaagcggttagggaagaatgcctatgggccctattcaaaacgggaattggccaaaaccggccccaaaaggttttgttccgagaaagcttggggaggggcctggccccttagcaagctgtgtggcccatatgccagaggaccaattgggctgcagtggcaagcgttgcagttgaagttacccaaaggaacgcttgcatagaaaccggttcaaggccttgggcccttgggaccaattccggaggaattcgcccaaccgttaccaagggaaaggcttgcttgtgaagggggccgaggggaaggaagcccgtggctgggaaagtcctgggggaattgcaaaaaaccattggaggttatttcaataccggaaaaggacccaa

SEQ ID NO: 560298 - DNA, 331 bp, Homo sapiens
ggtggccaggctcctcctccaggcaggactgacgtggttcctcgcaactatatggctgagcggcgaatccattgacaagtccatgcatgaagcagcataaagaggcaacttgagctggttgagagagtgtttggacaacagagatgagtgttagtggcttagaaaaagctggaagcactgccttatactgggcttgacacgggggacacaaagatatagaggaaatgctatttactcaaccaaatatagaactgaaccagcagaacaagttgggagatacagcttagcatgctgctgcctggaagggtaatgcagatatcgcgtcagttag

SEQ ID NO: 560299 - DNA, 127 bp, Homo sapiens
  misc_feature (24)..(24): n is a, c, g, or t
tgctgatgccacatccgcttgagnttggcaggcgagtgaagatgttgcccaaatcctggaccataacagtgtccttctcatacctaaaatggctgggcacccctccagcacacggtgcgttggccca

SEQ ID NO: 560300 - DNA, 535 bp, Homo sapiens
gggcttatttgttaggaacctgccgtccctgtataagtggggacggattcatcttttcttgggacaggcgggggcactctggatatgacctgatcggtgccgccttcaggaagagggtgttacttcccccagttcccccaggagtttgcccagaatgtgggccgcatgttcaagcaattcaacaagttaactgaggcaagggcagaggtgcagtccataatgggcctgcagggtttttttaaaaggggcatgaaagaggccttcggtgacaccaagttttttgttgtggtggtggagccccccccaatgagcctgcctggtgttggcctgagttcccaggagctgtttgggggccctggtgatggcccctgagggtggagcccccatggccagcccagcctggttttgttttttgtccggtcaccccatccccactcccctgggggcctgattcccactccctgggggccccatcccccagttcctcccaaaatggtttttatttttggggatttaataaaaacttccccagtta

SEQ ID NO: 560301 - DNA, 638 bp, Homo sapiens
  misc_feature (437)..(437): n is a, c, g, or t
  misc_feature (625)..(625): n is a, c, g, or t
  misc_feature (628)..(628): n is a, c, g, or t
tggggaggagaggagggttccaagcctctttcccaattaaaaggcccccttttgggaagaggtatagttttgggcccacggggcatggaaagtataaaaggtgtttgtggaagggggccgggctccttaggggtcctattttgcttcttgggtttgagtgtccagccggttggcaccttccatgtacccaggggagattccagccaaacacccgcccccgggccgtggttaagaagttgtttcttgttgccagcatgacctaccctcgcttttttgatgccatccggtgccacctccttttgtttttggaccctttagcctttttgcccttccattttttgaccccggcccccgccctccccacccagttccgttttttgttatttgggggaggaaaaaaattcttgatcattggccaaagggatttacccctgganaggccaagtgccttttaggaagttaggaggttgaggcccagcctgtgcaaaaagggtgggtcccccccccagatccaaggggaaattgcaggtcaagggttgataacggccatgcaggatgtttgatgttgggtcccccgttgtttgccgcccccccccccgccattttgtataataaagctccctgngtntttttatgta

SEQ ID NO: 560302 - DNA, 623 bp, Homo sapiens
cgcggactatttgtttgcagcttccacacacgcacctacctactacctctcctccatgcttactgggtatagaaaggtgagctatgcgtagaagaagctacttgggactattcagagtgctgatactttgaacgactaagcactatacgataaccagtctgaagactgcaaggagagactttgtctcctacacatactataagacaggtaaactaccgggtctgtacttgacgtctagtgcatatgaaatgacggtatttaatacaaaactacagaacatgcaaaattgtgggctgagatgttaagtattacttcaggggagaacaaacttacttaacctttcgctaatgcatgtagtaccagaaagcaaacatggttttagcttcctttactcaaaatatgaacattaagtgtagtgactttgtctgccacgtggttcagaaatacattataaataacctagttaaaaaaagaaactgtgaaccatcttggtcagtctatcctattctatgtatatatgtaattccctcaagcaatcgcttcataattatagggtataacaaaaggtcgagaaagaaacgcgcaggcgaaatagcctctactgcatcaccagcaacatcagg

SEQ ID NO: 560303 - DNA, 186 bp, Homo sapiens
tcacgtaggacgacaggccatgcctttcaagtgcatgcagctcacctgattgcatcctcaagtttccgcacagtgcccaccagaagttgtgcgacaggcctggcagaaggcagacatcaatactcatatactgacagggaatacagagctacacttcgtactactggtactagctatatacctgag

SEQ ID NO: 560304 - DNA, 235 bp, Homo sapiens
cattcacgcaactgccacgctggcagctgatcggcgggtttctggggccgatgtacgtggtggtattgaccctggccacaccgcacatcggcatcgcgatgaccatgatcgcgatcctctcgggccaagtgggcaagagtgtgttgatcgaccacttcggctggttcggcacggagcgcaaatgggtcaatggagaagcgctaggatcgcgtaggcgtagattgtggcggatctg

SEQ ID NO: 560305 - DNA, 199 bp, Homo sapiens
  misc_feature (2)..(2): n is a, c, g, or t
  misc_feature (4)..(4): n is a, c, g, or t
  misc_feature (22)..(22): n is a, c, g, or t
  misc_feature (35)..(35): n is a, c, g, or t
  misc_feature (39)..(39): n is a, c, g, or t
  misc_feature (42)..(42): n is a, c, g, or t
  misc_feature (58)..(59): n is a, c, g, or t
  misc_feature (61)..(61): n is a, c, g, or t
  misc_feature (84)..(84): n is a, c, g, or t
  misc_feature (86)..(86): n is a, c, g, or t
  misc_feature (142)..(142): n is a, c, g, or t
  misc_feature (170)..(170): n is a, c, g, or t
  misc_feature (186)..(186): n is a, c, g, or t
  misc_feature (193)..(194): n is a, c, g, or t
  misc_feature (196)..(196): n is a, c, g, or t
gnantcctgctactaattttgncggagagtgtttncccnggnttcaatgtgggctgcnncnttttgtgctccttctctggtttncngtgtaatgagttcataagctaaattttcagaaagaattttgtttaagattatgccncttatctacttgagagcaacatgtcttntcaatcatgggattgncacatgnnanata

SEQ ID NO: 560306 - DNA, 536 bp, Homo sapiens
tgaggatcccctatgtctcgatcgttatcatcatacagcatatccaggcttctgggtcaaagcactccactcatcagttcctcaaccaccccagaatttcaattttgatcaaccgacgtgatgaagaacttttccggttaattggaaccaatctggcaggtccaggatctcagacatatctccacgggctacaaaatgaagctgtacttccagactaacccctacttcacaaacatggtgattgtcaaggagttccagcgcaaccgctcagataatcaagaatgatctgtgggttaaccctctacgctactacctgagagaaaggggctccaggataaagagaaagaagcaagaaatgaggaaacgtaaaaccaggggcagatgtgaggtggtgatcatggaagacgcccctgactataatgcagtggaagacattttcagcgagatctcagacattgatgagacaattcatgacatcaagatctctgacttcatggagaccaccgactacttcgagagcactgacaatgagataa

SEQ ID NO: 560307 - DNA, 969 bp, Homo sapiens
  misc_feature (1)..(1): n is a, c, g, or t
  misc_feature (408)..(408): n is a, c, g, or t
  misc_feature (421)..(421): n is a, c, g, or t
  misc_feature (486)..(486): n is a, c, g, or t
  misc_feature (726)..(726): n is a, c, g, or t
  misc_feature (752)..(752): n is a, c, g, or t
  misc_feature (764)..(764): n is a, c, g, or t
  misc_feature (774)..(774): n is a, c, g, or t
  misc_feature (780)..(780): n is a, c, g, or t
  misc_feature (783)..(783): n is a, c, g, or t
  misc_feature (787)..(787): n is a, c, g, or t
  misc_feature (796)..(797): n is a, c, g, or t
  misc_feature (802)..(805): n is a, c, g, or t
  misc_feature (812)..(812): n is a, c, g, or t
  misc_feature (816)..(816): n is a, c, g, or t
  misc_feature (832)..(832): n is a, c, g, or t
  misc_feature (835)..(835): n is a, c, g, or t
  misc_feature (837)..(837): n is a, c, g, or t
  misc_feature (839)..(839): n is a, c, g, or t
  misc_feature (869)..(869): n is a, c, g, or t
  misc_feature (893)..(893): n is a, c, g, or t
  misc_feature (902)..(902): n is a, c, g, or t
  misc_feature (946)..(946): n is a, c, g, or t
natcagtagtgaagattcacttctacttaataacagcaaacttaatttctgaggggaaaaaaatggcgaagtcttatcccaaacaaatagcaagagaggtatcatcaaagagctaaaattttctttggcatggtaaagggggaaattgagtttaccaacttatttacatgacatttctctatattggtgagttatgcaatgccattttgttacataaagttgtttgatgttttttaatatgccttcatataaatattttattcaatatgttgtatttgtgaatttaacaaatgatattaaacacaaactacaatgcagacagacaaactctttgtatgccaattagcaatacataccaacagttcttgatacacaggtacctactacatgcagctcatcattgctgtnctcttcccatgcnacaggtgagaccagacacaaagtaaatgacctaactcaattacaaataacaaggacccctctgcnatatgtctaaacatatattagaagaaagtatttgacatccttcatagggataaatgcccttatagacaccccatatataaaacacaacagagatacacatttacataaatctcagtcatttacaaaaataaatcttgtcttaatttaaaccaataaacagacttgcaggggaaaaagaaaccagcaagtagggctaattatcagtaacaaatagatgggggtgtttgctctgtgtgtgtntatatatatatatatatatatatatntatatatttgtntaaagttttnttttgntgntgtnagttgtgtnnataannnnatttgantgtnttaaaagtaagtaaantantnanatagttggcacatattatgggatctatgtnttctgaaaataattggttaatggnagtaatctnatatattttaactgttcctgtaaaaaacaataggcttaagatgnaatacaacaaataaaaatgacaa

SEQ ID NO: 560308 - DNA, 122 bp, Homo sapiens
ggtgatttagaggatccccggctggtgtattcgtcctggtgctctggtgctagggattcgtgctggtgctgccgctgcgccctgagtcactgcctgcgcagtcctgccgctcctgctccatc

SEQ ID NO: 560309 - DNA, 241 bp, Homo sapiens
actagcgccttcaactggtaatccagtcagtaggcaactacaggggtacgccactgactgaaggcacaggaaggttggcagaaggaggaccacaaggctgttctctagccttcacctatggccaaaaatcattttgaggcacctcatagagattccagtgcgttaccaggagagcttgaagctcgaggtctcagagactgcaggctggatcaaggcctcatatgcaactgcctggccacca

SEQ ID NO: 560310 - DNA, 164 bp, Homo sapiens
ccggcccatgtcggcgctgtggtcgaggctcatcattgccttatctagcaattccgttcgctaatctataggaaggcatgaatgcgtacagtgactcctttacccttgagctcgttcttttcaatgacgtcttcttctattgagaagtatatttcagtgtcacc

SEQ ID NO: 560311 - DNA, 163 bp, Homo sapiens
atcgaactctactcccgctaatagctttgggatgagtgactgatcaagcctgcgcgacctcgccttaccccccactattaagctactgggagaactctctgtgctaataaccacgtactccagatcaaatatcactctcctacttacaggactcaacatacta

SEQ ID NO: 560312 - DNA, 431 bp, Homo sapiens
  misc_feature (19)..(19): n is a, c, g, or t
aaaaggtccatttaaaacncaacatagacagattgattttaatatgataaaatataaaagctcactgataggttttcagatttcatgttgcatctaaccagtacaaaaactaccacttgttgagttttggtatagtatcacaaaggaatagccacagttatctgaagagggtattaaaatcgtcctttcgtttccaactgtgtgaagctgaatttttaaatacattttaaccaaaacaacgcatcccaatagattgaatgaagaacatatatgggaatctggctgtcttcaattaagacagaagctgaggccaggcatggtgactcaagcctgtaatcccaacaccaccttgggagactgaggtgggaggattacttgagcccaggagttcaagaacagcctgggcaacatagtgagtccttgtctctgct

SEQ ID NO: 560313 - DNA, 276 bp, Homo sapiens
  misc_feature (104)..(104): n is a, c, g, or t
  misc_feature (157)..(157): n is a, c, g, or t
  misc_feature (170)..(170): n is a, c, g, or t
  misc_feature (193)..(194): n is a, c, g, or t
  misc_feature (219)..(219): n is a, c, g, or t
  misc_feature (244)..(244): n is a, c, g, or t
acgcgtccatttaaacaaaattaggtgtagggcccttttcccaaatgtatgtgtgacttgtccccgtacttaggccaattgcgcacgcatcccccacgtatatncaattatatttttcaaaacagtaccccgcaatattatgccttaatatgccctnacccatagttccnatttgtcatggctccggaatatnnttcggttgtttggtgttggtaccgnaagccatacgggttttcaaattttntttgtaggaccggtttggtttccatcggttaa

SEQ ID NO: 560314 - DNA, 1348 bp, Homo sapiens
ccggtaaaagagctgttccccatccccaggagctcctgtcctgtcagcctttgctgtgcgcctgtacctcatacaggagtactcgtgtcaccccgtgtgactcccctctgccatcgtgtgcttcacgtggccgcatgcatgcgcgcctctctgcatggtctctctggagaaaagagagatgtgtcgcctccggccagatccgactgtgggacaccccatacacacaagagaacacaatcgcaaagaaaataacactaaaagacgacacagaaacaccataacacgaaacaaacacaacacaaaacaaaaacaacaaaccccaacacagaaaacacaacacaacaaacgaaaacagagaccaaacacacaacgaccacaaaacaaaaaaaaacaacaacaaaaaaaaaacaaaaaacacaccctcgaaaaaacaaaccaaaaaaccaacccagcaaagcaccaacgaacaacacaaacaagcaccaccaccaaccaaaccacacaaagacgcaagcacaccaacagaagagaccagcgaccgaacgcggcagacaaaacgacgcaagacaagagacgaacacagaaccacacagaagaagacgaaaacaaaaacacagacgaaaaaaaagaaaacacaacaaaaagacaaaacgacaaaagaagaaagacaacaccgacaaaagcagcacgacaacaccgaacagcagaacagaaacacaaccagcagaaaagcaaagaaagagcaggagcaacgaagcagaaaggagaacagaccaaaaaagagcaacagaaaaacagcaagaagcgacacggcaaacagaaaccagcgaacagaccaccgacacacaccgaccaaagcggaagcaacccaggacacacgaggaacagcagcaacacgcacgacaacaacaaccaacaaggaaacaaagcggcagaccaagaggcagccgcaccgaaaacagaaagaacaaagcaacaacaacagaaacgaaagcagcgcaagccaaaaaagccaaaaacacaacacacaccccaaaacaaacaacaccgaacacgcagaggagcacagcccgagcaacacacgcacagcaccacaaacacacgccgaacacaccggacaccaaccaacgacacaaaagagagaacagacgcagggccaaacagaaagagaaaaaacggacagacaacccaaccaagaacacaaccaaaagcagacagaacgcacagcaacacaaacacacaacaaagccgaccaaccacacggaaccaacaagacaagaaccacagaacaccagcagcagcacaaacacaaacagagcaaacgaaagacacaagcacacgacgaaaa

SEQ ID NO: 560315 - DNA, 866 bp, Homo sapiens
gctcggataatcagcgtccagctctcaaggctgagtttgatcgcgcctgtcagtggaggaggacaccgtccctttgtccctcttggatgagagccccgcctacctcccgaagactggctgcgccccgggccacgccatcttggccccacactgggtggtctactcgttagctagtcccctcagccgtccgtgtctgcccccgtgcgcagcagggctcgggtgtctgcaccgtgtagtacataatagaagtggagagtcgtgggtggttgggaggaaaccgttcgatcatgacaacccactagatgtctgctggggcagatccgccactgtcctacccagttgccctatgcccagactctgagctgctcaccggagtcattgtgcgaaggaaacagtgcgagaaagtggcaacgtctaagagttctcagataaactcctcctgagggagttgcatcctaggcgaccctagcgaggaatatcatggctccaggcttgcttcactagcgtcgcaagcaccctcgcacgaccgtgtattcccacaacgcactagaggaacgaagcaggttcggttctggttcgtggtggagacgagagacaggcagcttccccgaactttccatacctgtgcgaggcagggtgacggacggttcacgtagaggctcacccaagatcgtacccagctgcgaggtgagaccagaaagccttgtgactcctggggcccagcgcctgatggctcctagcgcaggggtcgccgcgttcgtggtcacacggttctttggtgtaggcctccttgtttggtttgtcccccaaagggaagtggggccaagggggcccgggggaacgggggtctttgggacacgggcaac

SEQ ID NO: 560316 - DNA, 806 bp, Homo sapiens
  misc_feature (195)..(195): n is a, c, g, or t
  misc_feature (227)..(227): n is a, c, g, or t
  misc_feature (235)..(235): n is a, c, g, or t
  misc_feature (254)..(254): n is a, c, g, or t
  misc_feature (312)..(312): n is a, c, g, or t
  misc_feature (332)..(332): n is a, c, g, or t
  misc_feature (342)..(342): n is a, c, g, or t
  misc_feature (368)..(368): n is a, c, g, or t
  misc_feature (396)..(396): n is a, c, g, or t
  misc_feature (403)..(403): n is a, c, g, or t
  misc_feature (424)..(424): n is a, c, g, or t
  misc_feature (458)..(458): n is a, c, g, or t
  misc_feature (497)..(497): n is a, c, g, or t
  misc_feature (507)..(507): n is a, c, g, or t
  misc_feature (517)..(517): n is a, c, g, or t
  misc_feature (520)..(520): n is a, c, g, or t
  misc_feature (532)..(532): n is a, c, g, or t
ggagaagctggctgctgaaatgactgcgaaccggcttgcagagagccttctggctttgagccaacaggaagaactagcggatttgccaaaagactacctcttgagtgagagtgaagatgagggggacaatgatggagagagaaagcatccaaaagcttctggaagcaatcagttcccttgatggaaacagactanggcggcaaattggctgagcaggtctgaggctnagtctganaaggtgtcacgagttcaantgtcagttctgaaggatcaggagaaaagctggtccttgcagatctgcttgagcctgtncaaacttcatcttctttggncactgtgaanaaagcaactgagtagagtcaaatcanagaagacagtggagttacctctgaacanagaaganattgaacggatccacagagangtagcattcaataaaaccgacaagtcctctccanatgggaccctgtcgtcctgaagaaccggccggcagagcnagctggtttntcccctgganganagaggagccagnccattgctcccatctgacacattgtgctcaggttgcgctcgcaacatggcacgaaactccccctggagcaggaccatttctccaaacttccctccataaagaacaagccagccagtgacagaccctttactgacccctgtggcaaaaggcctcttctccgagccatgagcctagaagacggccccagatgagagaagcagagcttccgagggctcggggatctgcagtccttatatggcgccaaggctccacagcaacgacgacaatacagtaa

SEQ ID NO: 560317 - DNA, 671 bp, Homo sapiens
agcagtgcagtggtggttccaaaatgtatgattgtaatggttcctatttgattaataaagatgtttcgaacctagttataatgacttaaaattcacagtccaaaaccgtgattacttttgcaccaacctattaacttccccagtcctatttcctgagccccagctccgtgacagctttgaaaaccaaaagccctcgttcattattaaaatcagcagcctacattgacaaactccacaagagacaaactcaaagagatccacacttagacccatcataatcaaacggttaaaagccaaagacaaaagagagaatcttgaaagatcaagagagaagcaagtcataatgtacaaaggatcctcaatgagagtaagagctgatttcccatcaaaaaccatggcggcagaggaagtgggatgatgtattcaaaatgctgaaagaaaaggattgccaactcaggagtctataaccaacaaagctatcctttagaagtgaaagtgaaattaaaacattcccagataaacaaaaaccaagagaatttgttgctaatagatctgtcttgcaagaaatactaaagagtgtgtatccagttgaaataaaaagacactggacagtgactcaaatccacattattaaataaaacagcactggtaaaggtacacataagtaaata

SEQ ID NO: 560318 - DNA, 562 bp, Homo sapiens
aagtgaggagtgcctctgcccggcccgccccatctgggaagtgtacccaaagctccgaagagacagtgaccatcgagaacaggccatgatgacgatggcggttttgttgaaaagaaaagggggaaatgtggggaaaagaaagacagatcagatggttactgtgtctgtgtagaaagaaggagacataggagacaccattttgttctgtactaagaaaaattcttctgccttgggatgctgttaatctataaccttacccccaaccccgtgctctctgaaacatgtgctgtgtcaactcagggttaaatggattaagggtggtgcaagatgtgctttgttaaacagatgcttgaaggcagcatgctcattaagagtcatctccactccctaatctcacgtacccagggacacaaatactgcggaaggccgcaggaacctctgcctaggaaaaccagagacctttgttcacgtgtttatctgctgaccttctctccactattatcctatgaccctgccacatccccctctttgagaaacacccaagaatgatcaataaatccta

SEQ ID NO: 560319 - DNA, 1013 bp, Homo sapiens
  misc_feature (339)..(339): n is a, c, g, or t
gagagagtcaggtggaggaccaaagagaagctcgattactcgcttcctcatgatagtacgcgcagtccaataggccatcatatctacgatgcaaggatggaatggatgagcagtcgctggatcaaggccacagaactaacgctggagtcatccagtgaatgaaacttatgacactggcgagcagcctgtcaggaggacggggactggatccgtggaggtgcgtcccagtgctggggctatcagttggataaggaatgtatcaaaagtcagctggacccatgtaggccgtgaattggtagagcttcagtatcgtgcatgtgacgtagccgaggagcaagncgccaatcgacctggcatccatgtgaccgactattcatgtggggatgaacagtactgccaatgccccggagaaggcatgccgacagcacatggtgacctggaccagaagatgccataccatagcagtgatcctgcattctaaacccgtcccgtcattaccagcaacgatggagcacatccactccgtcgcatggactggcacagagtccaggaagactggaagagaacaaagactgtcggataacgcaggcagctgcggcaaggagcatcgtgaacccgccgagcgagaaggtgagcatcgagcctggaagacataccagcactgtcaccctggagaaagccgtacctgcgcgaggactacttctgggccttgatccctgacagagggggacttcatccgcttccgcttcttccaacctctaagactggagcggatcttcttccgcagtgggaacatcgagcaccggaggacagctcttcaacacgtctgtggaggtgcttgccttcgaaaacctcagtcagacaaggaggcctgaggagcgccgcacggcaacctcaggtaccccggaacccgaaggtactccaatcggtcctctaaagggagtggaaagacaaggggaccagttaggcctggaaacaggaccttgaacaagaaccggggggaaacgaggaca

SEQ ID NO: 560320 - DNA, 289 bp, Homo sapiens
tcagaagactggagtctcgagttattttttgaacagctttacgatatgcttaggtaggcttattaaatttgctcctccaaacaatacttttctattggaaaacaagccctgtggagacgatccttccctcaacgttgcttcagtttaaccctatttctagacgtgacctagtaccactgccgaacttgtcaacctacccgggaactgaaacagttcacaacagtagactcctaccaagatgtaaccgaactaccttattctaaaccactcaccgactaccagcctcaga

SEQ ID NO: 560321 - DNA, 120 bp, Homo sapiens
atatcgttccacatcagtctgcaagtagctgagacgtacaggcacacaccaccacaccaagcaaataagtatggtgtggagacagcgatttgccaacttgcccgggctagtctggacctt

SEQ ID NO: 560322 - DNA, 954 bp, Homo sapiens
attgcaatatctcttccgaattgggtcaaaacattgggctccttcattatatgccccctttgggttggccacccctctttcgccgtggaacgctctgttggttaaaactcctcccgtgctgtgttttagaaaaaccgttctctcgcctctttctgcccttatccccttattggcccacaaatactcgtgagaagttaataatactcgctccgcccttataactctccttgaaacccctcctatccccttggaatattggtgcaccaaacaacagctgctttgtgtaccaaatacttaagaggggtccaccctgtgttgtaccacaaaaatgtgtgaatcccccgccccgcgttcggtcatatttttctccccctccccgcgagattgtttaagccaacccccccaatttcccaagggtgtcttgtaccacgagtcacaactttttaacgcccccctgtcgttttaaataataataaagctagccgccggcttcttagtcttaaaacacattaatgcattatcgcccaattagcctgctcgtattaccaaattctcccgccccaaaatgttgttgtttgagaacctattttcgcgcaaagactattatctcccccaggtaatatttatacggagatccccgaccatttttgtcccgtggagagaatttttcccctcctctaagaacaatggcccccccacgggaataattttgaagagccagcataatacgggtgagtagaatttgagacaaaaactatgggtagatctctctgggaaccacacagggggtctaaatttctctttttcttataaaaactcccgaggggtaattattccttggctagactagaataaaactcctctatgtttagtgagtcccactcgttcttgaccagcaattatgccgaggccacctatggataaaacaaaaaaacccttgccccccacataaca

SEQ ID NO: 560323 - DNA, 411 bp, Homo sapiens
  misc_feature (119)..(119): n is a, c, g, or t
  misc_feature (121)..(121): n is a, c, g, or t
  misc_feature (262)..(262): n is a, c, g, or t
  misc_feature (284)..(284): n is a, c, g, or t
  misc_feature (341)..(341): n is a, c, g, or t
  misc_feature (384)..(384): n is a, c, g, or t
ccctgcctcaccctgaagtgtcttgtccatccagctgcaggctcctgcaatctcaagctgctgctaaacggcctagacagcgtgatgcaatctgtttttcagcccagacccgcataggngngcatctgggcagtgattaggtggtgtaatccgaaagagatggggagctagatgggtgtgagaacagtaggggtaaagaccttttatcctccctactccaaggtgcaagaaagaaggaggaagcactgtgtacccttggggntgctccggccatgcctccaganactgggcgtaccccacagccttatctacttctggtcttcaggcctcatcttgacttncgttccctttctgtggcttttgatgttaggcccagctcagggnttatgagagactgtaggtgaaatgttg

SEQ ID NO: 560324 - DNA, 338 bp, Homo sapiens
  misc_feature (299)..(299): n is a, c, g, or t
ctgcggcgctcgaaactataggatcccatggcgggcttcgacatgtggactttacggacgtcataaggctgtgagtccgttaaagatggtatctttactaatacaagctattgtgtccgctaggcctatttcgttgctcgctcaggaatttgatagttcttgggcagtgacatgtgagtcgtacaatgttcagtgagcctcgggtgtcgtgactgtcactccccgcgctgagtaggggaagggagcctactagggtgtagaataggaagtatgtgcctgcgttcaggcgttctggctgnttgcctcatcgggtgatatagccgtcgtagacagaggta

SEQ ID NO: 560325 - DNA, 209 bp, Homo sapiens
  misc_feature (179)..(179): n is a, c, g, or t
ggatctgcccgccttggcctcccaaagtgctcggattacaggtatgggccatgcccagcaagaaggacacttctaatactagatagccataattttttatttttaatacgagataaggtttcacctatgtctggccaggctggtcccaaatctccatgaccaagcatggtgagaatccntgtctctactaaaaaatacaaaagcaaata

SEQ ID NO: 560326 - DNA, 315 bp, Homo sapiens
gtggtgcacaacctagggtcagtttgcaggtggtaagccatttaccaagatagttgtaggtaaagaagggcagatttattagagaaattgtgaaaatatgtgcagtgggcagctcagcagagaaggggctacctgcagagaggcaagggctggaggaaagttttatagggtcctgctgaagggtgctacgtgtggaatgaggtcattgtgcccgcaggtggtttgtgattagctgtctctaacaattgttcatacaataattgttcattattgttctcaacttggggctctccccaacctggggacccttcctta

SEQ ID NO: 560327 - DNA, 130 bp, Homo sapiens
ttcccccccccccccttttttatcttttaaaacccccaaatttaacccatttttttaaaaaaaaaccccccccccccccccccccattttttttttttaaaaaaacccccccccccccccccccccttca

SEQ ID NO: 560328 - DNA, 1078 bp, Homo sapiens
tcactatcatagtcactctggtgaatccaagcttaaacagacaaatccaatctacaacctcaacagggtgcaaatggggagggcagggcaacatctcttattgtgttattttgtttcagcttgcctccagcagaacagacagcatgtggctttccagcgtgggactgggggaaaagacccaatttccaagggggttgttgtccccttttgctcgggtgtgagagggctgatactagtgcattggttggacgcttgagcagcgggctgtgggcttgctcttgggcagcgttgcgcagctatacaacgcttagggtgcacaggtgggggacagcggagacttggtggcgccttgcccgtgggttgcctttgccctttccattccgtggtgccacccacttggacacaccaagaacacccaagccgtgtctgtgccgtgagtggcgcttcagccacgagcaaaggggcccaggccctttcctcgaggggcgaacaggggcctcatcttccagtgttcacaccagagggccagaatacaccaccttagggggctccacgagtgtagagcagtgtgccccccgtgggcctcaaccattctttgttgcacggccgacggacgcgcacgcaccggggggacacccgaaaacctcacaactcacgtgcaacacttcccgggcgttagaaggggtctcccccaagtgtgcgccactagacgtgtgcgaaacctttgcacaatgtgtgcacagaacgcgcccttgcgggagctcccccccacattcatgtggcttgcccccgtggagggaaccccttttgggccgcactttcaccccctatttaaaattttctacacccccccgctccacggattatggtggcgaacacgctatagcgacgctcacccccctcccctgtgcagcagacccacaaaacagcacaggggggctctccaactataacgtgtagggaaaacaaaaacgaggggggagatgggtcaagaaacgcggcctttgaggacgaacaacctttccgggggcgaaccacttctggtgcttacgaacccgggtctggctatatatgagag

SEQ ID NO: 560329 - DNA, 318 bp, Homo sapiens
  misc_feature (229)..(229): n is a, c, g, or t
ccacctcaacctcggccatagccaggacctcaggttgtcagccaccacacccacagctaatttttttggtagagatggggtctgtctctgttgctcaggctggggtgtagtaggggcacagtcatagctcatggtaaccttcaaggcctgtgctgaagcaattctcccgcctcagcttcccaagtaactgggagtataggtgtacaccacctatgccggcctcactgtntgcaaaactgagtcctaccgttagattggggttaattcctggtaatgtattcgtctataataaaccaccaacccaatgttgcattattg

SEQ ID NO: 560330 - DNA, 1167 bp, Homo sapiens
  misc_feature (41)..(41): n is a, c, g, or t
tcttgaggcctgactacgctaaccgcttttgccaaagtggnccattatcgaagaattcacaaaaaacaatagcctcatcatccccaccatcatagccaccatcaccctccttaaccttctacttctacctacgccctaagtctactccacctcaattcacacgtatctccccagtatctaacaaccgtaaaaataataatgacagtttgaacatacaaatacccaccccattcctccccacactcatcgcccttaacgcacgctgactcgctaccttatctgccccttttgatactaataattctttattgaaagaaaaagacagaaagacaaccatcgagtagagaaggaaagggaataaaggaacaaaacgagtgagcgccgccttgtccaatcacttgtctctccagtcagcggtggtctcgccgagaccctataggctactctgtgcgccacgcctcttgtggtgtgttgacaccaaggggtggtgccaccagaaatgttgtggcccctggctattggtaggcggcgcccttgaacgcttttgcgtgcgtggggctattcttgtaaagcttaaggctcccccgaggttggcggggcaaaaccacggggacgcctatgggcgcgtcgtccttgtcttgaggggaaaccgagtgaccttctgtgtccatctgtggctgtgggcgcgcgttgggagccttgtgtgctaggcgttgaccccaaacgcgcatctgcttaggacgcactttcttacaacgcttgctttggcgtgtgtagcgtttgcaagcgctttgtgcccttccttggcctggttccattgggtgtgctgacctttcccgagtctttcccgtgtgaacttctccgtggggacttgccccctggtttaggggcaccacgctttggggaggggaaggtttgggctggaagagccattcttttgaccacggggtgagggagttgtctcctcaacacatcaacactctcgcttcctttgacggacagccacttctcacaccttcttactcagaggcccccccttctcctttgggggaaaacacaacaagcactttggcaccacaagaagggttcccgggggaaccaaaaacgggggcataagcacatcccctcagaacccccccaaaaagcttttgcggggccccaaaggaa

SEQ ID NO: 560331 - DNA, 463 bp, Homo sapiens
aaaagacccgctgacgaagtgcatgtcccagagtcacccaggcggtgtgtgagcaagatcccgagcggctccagtgcccacactccctcctctttgttactctgcccctagtggaggcaggcagcccttttgtgctaaagaagcgcttcattattaaagactccacaaagcaaaactcaatcatattaagagcgagattaaggcaaaaaaaactatactactcagggacatatactggctatgaagtataaattcagtacaccagtgtctatatgtcgccttcctcttaaaaatatcacttttcaagcaaaagtatcccctataaaaaaggacactatggaaaaatttagagatgacagggtctctaaaaaatagttcccctaggagttgtcaaaaatcatcttaagaggctgtgtgccgtggctcacgcctgtaatcctagcactttgggaggccaaggcaa

SEQ ID NO: 560332 - DNA, 200 bp, Homo sapiens
  misc_feature (41)..(41): n is a, c, g, or t
tcttgaggcctgactacgctaaccgcttttgccaaagtggnccattatcgaagaattcacaaaaaacaatagcctcatcatccccaccatcatagccaccatcaccctccttaacctctctccctcactagacgtaagccttctcctcactctctcaatcttatccatcatataacacttggagtggataaaccaaaccc

SEQ ID NO: 560333 - DNA, 402 bp, Homo sapiens
tgggtaaaaaacaaaaaggcatactctgatttttatactctgttttggcaggtgctcttttcttgtgaatggagaattggatgaagccaagtgtggttaggaatgcagggaagagcctactagtgggttgatatttccctggttttaggaagcctgttgaagtttaaaatgtgtatccttgtggtggttaatctcttaagggaaatgtcaaattcttgtgacaagaaaacatttttcccttgggaagggctcaactttcaagacttggtatttggggttccccctcagtccctacatataacttccttctggctgaaactattatttaattccttcttttccagaagaagaggaaatataaaagaggtatttctaaaaagttttacaaaaaaaaaaacaaga

SEQ ID NO: 560334 - DNA, 602 bp, Homo sapiens
gatcccaggtcggaacaggggaggaaaactcacctgtacaaagtgtatttgacagggttgggaaatcatccctgagttatacttgtctcatctttgctgagctatttcctggaaccgacttgttttattgtgtggtgctcccaggacccagcaaagaggtcaaagagaacatcatgtctgagcaccttcctggacatgtctgaacctcagagactaggttccagcagagttatagcctatatgtgctgctgccagggtggcatgaagtttgagtcatgtgcatgtggcatggaacctgcggctcaccccttacagaacagagtagaaaagctgctaggtattggtgagggtggggaggagtgcttcgaagggagaagccccagcaagatttattcctttttgcttcttcttctccctgtccctgccataaccatgaagccttgaacaaaccacccaaatctcaggatcttagtgttttctctgtaaattgtaatatgaacttataaagatcctccattgctgatagtctcaggttctgtgagtaacagcaaaaaaactttgtatctaacttcaaccagagcaggctgtacccttaagctcta

SEQ ID NO: 560335 - DNA, 239 bp, Homo sapiens
  misc_feature (5)..(5): n is a, c, g, or t
ctttntcatcccccttcgtcaagcactcgagtagcgcctcacaggggccctccaccgtcaggccaggcacctgtgccggcgccttggtgtcgatggtgaagcgggcgggggagcccgcaactgcctccctgtgaggcccgggccaaaacgccttcaccttgctaggcttggttgggggccacatgtttccatgaggaaatggggctgccatggaacggggcactgccggtcattagtgt

SEQ ID NO: 560336 - DNA, 264 bp, Homo sapiens
gtgggctgcacctgcagcgggcttttgcagggttgcgttcggggcgtggtcgctgggaccatcatgttctcggtccgggacacagtgagcatgataaggaggtagagggcaggtgacccctggacgatttggggacctttgggacatctgattggacacagcatagcattggcgcagggccgtagagggtagagagcattgtcactgagggcccaaaactctctgtccattaattctttcaggggtggtactagtaggagatac

SEQ ID NO: 560337 - DNA, 162 bp, Homo sapiens
atcttcagaaatataactggcaagtggaaatgtttaaacagttcagatgatctttaatgcattggttatgtgtgggttactctcccccccccttggtcttaattcttacatgcaggaaacactcagcagacacacgtatgcgaaagaactgagcaagccagg

SEQ ID NO: 560338 - DNA, 815 bp, Homo sapiens
attgaagtggaggtgttctgacaatggatccagataaagatgactttctgggcagaatgaagctggatgtagggaaggtgtacaggctagcgtctaggatgatttggtaccctctacaaggtgggcaatggccaagtacacttgatgctagaatggctgtcactttagtacagatgcatgcagaaaacttggagcaggttctaacagtggaattggggagtctcctctcgaccaaatcccccgtcagctgccatacttagtattgtctacctggatcgggccctaggatcttcctctgcaagaaggggaacaaaggaaacccaaccctatggtacaactatgtacaattacaggatgtgacctcattgatgagcaatgtgctgtctacagtaaccaactgcccagttgtggagagtgaagcgtaccaggattcttcactacaagaccctcaaaagccagtgagctcgatgttgcaatgtgacggatgcattccagggccctgacttataggagcactgactgctgctctggcccgctgctgactgcccagcaatcatactggaacagtggttccagctcagcagtttctggtccaacatccagactctatactgcaactagtcaatgaggatcctggtgcttgggattcatccagaaatattgctaccccaactggtgactggatggtcctggtgatgggaagtgaacagagaaatccccaaaaatgcgcattgtgttacccacctatactgttaacgaaatctaacacattggggagagattagaggaccatgaaaaggccgacttatcgaacg

SEQ ID NO: 560339 - DNA, 352 bp, Homo sapiens
  misc_feature (1)..(1): n is a, c, g, or t
ntatgtcagagctacattcgcccacagggtagcgaagctcatggccaaggtctgggccaaggactgtgtctacatcaacttgcagcatcacagagccttccctaatgagatcagggtaaacctgcttgtcccaggcactgtacagcgacgtggtaatgtagaggcgcttcccatccagttagagctggatcatctgagggcctccagccacccgttttcccttgaccactaggggctctgtctgggactttagttcctcgtcctacagcacttgcacagggcctcccttaacaatgctgcctccgagaaagatctgtcctgtgaggcggggtctctgtgggtcagagatgtc

SEQ ID NO: 560340 - DNA, 408 bp, Homo sapiens
agtctgtggcttgggtgggcttgcgggaggtcactccgacagcttcttcagacgcttcttcagctcccgcgggaacttctccgtagcacctcttacacacgggcttcatgtcgaactccacaaacttgttcttcaggctgagcttgctgttgcaggtggagcaggagaagcagctcacacaccaggccttgttgagggccgacaccacatcgccttcaatcacatggctgcagttgtagcagacgtccccgaagagctggttgtagtgagtctcgcagtaggccaggcccttcttctcatagtgccggtgccccaggaatggcttctcacacttggcacagacaaagtgctccacgtgccactggttgcccaagcgcgttgaccactcggccctcgatggggcggcgg

SEQ ID NO: 560341 - DNA, 135 bp, Homo sapiens
ctacaggagcttaagaggcccaaggaggagtggagctgggtacaaaagccaaatagagactagaccaaaaaggcaagggagagcgagggcccgctaggcagtcagctacggtgcatagtgtggccgcagcgcagc

SEQ ID NO: 560342 - DNA, 579 bp, Homo sapiens
agtgggtttattaatgcacttcagggtaagtgccagtcttattttagcttcttctgggagaaatactaccaattattaataatcacagcaacattttcatttgacaaaaactgtgtgtgtgggtgtggtaggggggtattatttataggatactgcaaatataaactcaattcttggggtatattaacaacactgagcaacaatatttctttctaaaaatttcttttctttaagggagatctggttattactaacatggggcagggtaggtttaggaaaattactattttagtttcttaggggcaataacacagaaggtcagaaaacaagcaacaaaaactcttttttaggtcctctacctggccaccattttaaaaacacaaggtcctcatatatatagagatatttatatattactcggttaaaacacatttttacacactttacaggttattttaaggtttaggttataggcattcatgtgaaaggggtctattagggatggtcacttagaaatcctcactgtgattccacgcggctattggagaaatggagaagaccctttttagagcggtgctg

SEQ ID NO: 560343 - DNA, 514 bp, Homo sapiens
tatttttccacagggcaagattaattttctagctcgaaggtttaaggctcttagaacaatgctcgggtgattggaggacacagcgtgcgccggggctgcttacttgaccttgtcagaagacccttctcacccttccagggccctcaacacccgcttggctgaggtggagtgttgggcggaaagttcatcagcaccggttccaaggagtcaatggcaggaaacaagccagccaatgtcagtcctgcacaaaggttatctgaaacagctggaagaactgctgagttgacattgaaagctgatgtgactcgactcccagctaccattgcccgaatttcccccagttgctgtgaggctacagttgtcagagcgtagcattctcagccgccgtggcaaaccgggcacccgaacctaccccacagcaggtagcccagcagcagtgaagatgcagactgattccacctccaccgctgagcagtgacctttcctcactttctcttgtcccagcttctccccg

SEQ ID NO: 560344 - DNA, 889 bp, Homo sapiens
  misc_feature (3)..(3): n is a, c, g, or t
  misc_feature (5)..(6): n is a, c, g, or t
ttngnncgcggctccgaggcgtcacctcctcctgtcgcctggccctcgccatgcagaccccgcgagcgtcccctccccgcccggccctcctgcttctgctgctgctactggggggcgcccacggcctctttcctgaggagccgccgccgcttagcgtggcccccagggactacctgaaccactatcccgtgtttgtgggcagcgggcccggacgcctgacccccgcagaaggtgctgacgacctcaacatccagcgagtcctgcgggtcaacaggacgctgttcattggggacagggacaacctctaccgcgtagagctggagccccccacgtccacggagctgcggtaccagaggaagctgacctggagatctaaccccagcgacataaacgtgtgtcggatgaagggcaaacaggagggcgagtgtcgaaacttcgtaaaggtgctgctccttcgggacgagtccacgctctttgtgtgcggttccaacgccttcaacccggtgtgcgccaactacagcatagacaccctgcagcccgtcggagacaacatcagcggtatggcccgctgcccgtacgaccccaagcacgccaatgttgccctcttctctgacgggatgctcttcacagctactgttaccgacttcctagccattgatgctgtcatctaccgcagcctcggggacaggcccaccctgcgcaccgtgaaacatgactccaagtggttcaaaggtgagaccaggaagggcagtgggcccagacctggcagggcccagaacctgacattcatcaaatctccccaccagaataagagtcccagaggagcttggtggagagatttccaccacatctttggaatctgttggcctttttgaagactagaaagcta

SEQ ID NO: 560345 - DNA, 4547 bp, Homo sapiens
  misc_feature (3)..(3): n is a, c, g, or t
  misc_feature (5)..(6): n is a, c, g, or t
ttngnncgcggctccgaggcgtcacctcctcctgtcgcctggccctcgccatgcagaccccgcgagcgtcccctccccgcccggccctcctgcttctgctgctgctactggggggcgcccacggcctctttcctgaggagccgccgccgcttagcgtggcccccagggactacctgaaccactatcccgtgtttgtgggcagcgggcccggacgcctgacccccgcagaaggtgctgacgacctcaacatccagcgagtcctgcgggtcaacaggacgctgttcattggggacagggacaacctctaccgcgtagagctggagccccccacgtccacggagctgcggtaccagaggaagctgacctggagatctaaccccagcgacataaacgtgtgtcggatgaagggcaaacaggagggcgagtgtcgaaacttcgtaaaggtgctgctccttcgggacgagtccacgctctttgtgtgcggttccaacgccttcaacccggtgtgcgccaactacagcatagacaccctgcagcccgtcggagacaacatcagcggtatggcccgctgcccgtacgaccccaagcacgccaatgttgccctcttctctgacgggatgctcttcacagctactgttaccgacttcctagccattgatgctgtcatctaccgcagcctcggggacaggcccaccctgcgcaccgtgaaacatgactccaagtggttcaaagagccttactttgtccatgcggtggagtggggcagccatgtctacttcttcttccgggagattgcgatggagtttaactacctggagaaggtggtggtgtcccgcgtggcccgagtgtgcaagaacgacgtgggaggctccccccgcgtgctggagaagcagtggacgtccttcctgaaggcgcggctcaactgctctgtacccggagactcccatttctacttcaacgtgctgcaggctgtcacgggcgtggtcagcctcgggggccggcccgtggtcctggccgttttttccacgcccagcaacagcatccctggctcggctgtctgcgcctttgacctgacacaggtggcagctgtgtttgaaggccgcttccgagagcagaagtcccccgagtccatctggacgccggtgccggaggatcaggtgcctcgaccccggcccgggtgctgcgcagcccccgggatgcagtacaatgcctccagcgccttgccggatgacatcctcaactttgtcaagacccaccctctgatggacgaggcggtgccctcgctgggccatgcgccctggatcctgcggaccctgatgaggcaccagctgactcgagtggctgtggacgtgggagccggcccctggggcaaccagaccgttgtcttcctgggttctgaggcggggacggtcctcaagttcctcgtccggcccaatgccagcacctcagggacgtctgggctcagtgtcttcctggaggagtttgagacctaccggccggacaggtgtggacggcccggcggtggcgagacagggcagcggctgctgagcttggagctggacgcagcttcggggggcctgctggctgccttcccccgctgcgtggtccgagtgcctgtggctcgctgccagcagtactcggggtgtatgaagaactgtatcggcagtcaggacccctactgcgggtgggcccccgacggctcctgcatcttcctcagcccgggcaccagagccgcctttgagcaggacgtgtccggggccagcacctcaggcttaggggactgcacaggactcctgcgggccagcctctccgaggaccgcgcggggctggtgtcggtgaacctgctggtaacgtcgtcggtggcggccttcgtggtgggagccgtggtgtccggcttcagcgtgggctggttcgtgggcctccgtgagcggcgggagctggcccggcgcaaggacaaggaggccatcctggcgcacggggcgggcgaggcggtgctgagcgtcagccgcctgggcgagcgcagggcgcagggtcccgggggccggggcggaggcggtggcggtggcgccggggttcccccggaggccctgctggcgcccctgatgcagaacggctgggccaaggccacgctgctgcagggcgggccccacgacctggactcggggctgctgcccacgcccgagcagacgccgctgccgcagaagcgcctgcccactccgcacccgcacccccacgccctgggcccccgcgcctgggaccacggccaccccctgctcccggcctccgcttcatcctccctcctgctgctggcgcccgcccgggcccccgagcagccccccgcgcctggggagccgacccccgacggccgcctctatgctgcccggcccggccgcgcctcccacggcgacttcccgctcaccccccacgccagcccggaccgccggcgggtggtgtccgcgcccacgggccccttggacccagcctcagccgccgatggcctcccgcggccctggagcccgcccccgacgggcagcctgaggaggccactgggcccccacgcccctccggccgccaccctgcgccgcacccacacgttcaacagcggcgaggcccggcctggggaccgccaccgcggctgccacgcccggccgggcacagacttggcccacctcctcccctatgggggggcggacaggactgcgccccccgtgccctaggccgggggccccccgatgccttggcagtgccagccacgggaaccaggagcgagagacggtgccagaacgccggggcccggggcaactccgagtgggtgctcaagtcccccccgcgacccacccgcggagtggggggccccctccgccacaaggaagcacaaccagctcgccctccccctacccggggccgcaggacgctgagacggtttgggggtgggtgggcgggaggactttgctatggatttgaggttgaccttatgcgcgtaggttttggttttttttgcagttttggtttcttttgcggttttctaaccaattgcacaactccgttctcggggtggcggcaggcaggggaggcttggacgccggtggggaatggggggccacagctgcagacctaagccctcccccacccctggaaaggtccctccccaacccaggcccctggcgtgtgtgggtgtgcgtgcgtgtgcgtgccgtgttcgtgtgcaaggggccggggaggtgggcgtgtgtgtgcgtgccagcgaaggctgctgtgggcgtgtgtgtcaagtgggccacgcgtgcagggtgtgtgtccacgagcgacgatcgtggtggccccagcggcctgggcgttggctgagccgacgctggggcttccagaaggcccgggggtctccgaggtgccggttaggagtttgaaccccccccactctgcagagggaagcggggacaatgccggggtttcaggcaggagacacgaggagggcctgcccggaagtcacatcggcagcagctgtctaaagggcttgggggcctggggggcggcgaaggtgggtggggcccctctgtaaatacggccccagggtggtgagagagtcccatgccacccgtccccttgtgacctcccccctctgacctccagctgaccatgcatgccacgtggctggctgggtcctctgccctctctggagtttgcctcccccagccccctccccatcaataaaactctgtttacaaccaccggcaaaaaaaaaaaaaaaaaaaaaaaaaaaaaaaaaaaaaaaaaaaaaaaaaaaaaaaaaaaaaaaaaaaaaggggggggggcgacacaaaatgattctcccctgggggggccacatatataacccccccccgttttttttctcaaggggggtccactattgttggtgactatttataatcaagcacgacagcgcgccgcgcattatataaaaaagctcttacatgtgaggaaaccccgtgtgtacatggggtatactcttggggaagaagcctcacacacggggcgaggagagcacaaataaggggagacactctctcgaaaagttattcaaccctccggcaggatattaagatcaccagcgagagtgagtatatacgagcgtgtagaccacgcgctgcaattataccgccgagggtaaagaaagttgtagcccaagagagattatgttaaagcaaaacttaacccgagggggcggaattagaataagaacccaagagagaactaacattgcaccccaccagccactaaaaacacaagatatcatactagttatcaaacagaacagacacataaaaaagaaaaaatatcgcacattataaaaatcaatataaaaacaacactatataacatcataaataccaagatctaaactacacacccacagacagacgacaacacatactacacagacaaagaagataaagacagaaagctaactcgataataaatcaaaaactcaacaaagtattacacagagattcagaaaaccaacagaatgagcacgacatatattgaacgcgatcgtcaaactactccac

SEQ ID NO: 560346 - DNA, 4167 bp, Homo sapiens
  misc_feature (3)..(3): n is a, c, g, or t
  misc_feature (5)..(6): n is a, c, g, or t
  misc_feature (3918)..(3918): n is a, c, g, or t
ttngnncgcggctccgaggcgtcacctcctcctgtcgcctggccctcgccatgcagaccccgcgagcgtcccctccccgcccggccctcctgcttctgctgctgctactggggggcgcccacggcctctttcctgaggagccgccgccgcttagcgtggcccccagggactacctgaaccactatcccgtgtttgtgggcagcgggcccggacgcctgacccccgcagaaggtgctgacgacctcaacatccagcgagtcctgcgggtcaacaggacgctgttcattggggacagggacaacctctaccgcgtagagctggagccccccacgtccacggagctgcggtaccagaggaagctgacctggagatctaaccccagcgacataaacgtgtgtcggatgaagggcaaacaggagggcgagtgtcgaaacttcgtaaaggtgctgctccttcgggacgagtccacgctctttgtgtgcggttccaacgccttcaacccggtgtgcgccaactacagcatagacaccctgcagcccgtcggagacaacatcagcggtatggcccgctgcccgtacgaccccaagcacgccaatgttgccctcttctctgacgggatgctcttcacagctactgttaccgacttcctagccattgatgctgtcatctaccgcagcctcggggacaggcccaccctgcgcaccgtgaaacatgactccaagtggttcaaagagccttactttgtccatgcggtggagtggggcagccatgtctacttcttcttccgggagattgcgatggagtttaactacctggagaaggtggtggtgtcccgcgtggcccgagtgtgcaagaacgacgtgggaggctccccccgcgtgctggagaagcagtggacgtccttcctgaaggcgcggctcaactgctctgtacccggagactcccatttctacttcaacgtgctgcaggctgtcacgggcgtggtcagcctcgggggccggcccgtggtcctggccgttttttccacgcccagcaacagcatccctggctcggctgtctgcgcctttgacctgacacaggtggcagctgtgtttgaaggccgcttccgagagcagaagtcccccgagtccatctggacgccggtgccggaggatcaggtgcctcgaccccggcccgggtgctgcgcagcccccgggatgcagtacaatgcctccagcgccttgccggatgacatcctcaactttgtcaagacccaccctctgatggacgaggcggtgccctcgctgggccatgcgccctggatcctgcggaccctgatgaggcaccagctgactcgagtggctgtggacgtgggagccggcccctggggcaaccagaccgttgtcttcctgggttctgaggcggggacggtcctcaagttcctcgtccggcccaatgccagcacctcagggacgtctgggctcagtgtcttcctggaggagtttgagacctaccggccggacaggtgtggacggcccggcggtggcgagacagggcagcggctgctgagcttggagctggacgcagcttcggggggcctgctggctgccttcccccgctgcgtggtccgagtgcctgtggctcgctgccagcagtactcggggtgtatgaagaactgtatcggcagtcaggacccctactgcgggtgggcccccgacggctcctgcatcttcctcagcccgggcaccagagccgcctttgagcaggacgtgtccggggccagcacctcaggcttaggggactgcacaggactcctgcgggccagcctctccgaggaccgcgcggggctggtgtcggtgaacctgctggtaacgtcgtcggtggcggccttcgtggtgggagccgtggtgtccggcttcagcgtgggctggttcgtgggcctccgtgagcggcgggagctggcccggcgcaaggacaaggaggccatcctggcgcacggggcgggcgaggcggtgctgagcgtcagccgcctgggcgagcgcagggcgcagggtcccgggggccggggcggaggcggtggcggtggcgccggggttcccccggaggccctgctggcgcccctgatgcagaacggctgggccaaggccacgctgctgcagggcgggccccacgacctggactcggggctgctgcccacgcccgagcagacgccgctgccgcagaagcgcctgcccactccgcacccgcacccccacgccctgggcccccgcgcctgggaccacggccaccccctgctcccggcctccgcttcatcctccctcctgctgctggcgcccgcccgggcccccgagcagccccccgcgcctggggagccgacccccgacggccgcctctatgctgcccggcccggccgcgcctcccacggcgacttcccgctcaccccccacgccagcccggaccgccggcgggtggtgtccgcgcccacgggccccttggacccagcctcagccgccgatggcctcccgcggccctggagcccgcccccgacgggcagcctgaggaggccactgggcccccacgcccctccggccgccaccctgcgccgcacccacacgttcaacagcggcgaggcccggcctggggaccgccaccgcggctgccacgcccggccgggcacagacttggcccacctcctcccctatgggggggcggacaggactgcgccccccgtgccctaggccgggggccccccgatgccttggcagtgccagccacgggaaccaggagcgagagacggtgccagaacgccggggcccggggcaactccgagtgggtgctcaagtcccccccgcgacccacccgcggagtggggggccccctccgccacaaggaagcacaaccagctcgccctccccctacccggggccgcaggacgctgagacggtttgggggtgggtgggcgggaggactttgctatggatttgaggttgaccttatgcgcgtaggttttggttttttttgcagttttggtttcttttgcggttttctaaccaattgcacaactccgttctcggggtggcggcaggcaggggaggcttggacgccggtggggaatggggggccacagctgcagacctaagccctcccccacccctggaaaggtccctccccaacccaggcccctggcgtgtgtgggtgtgcgtgcgtgtgcgtgccgtgttcgtgtgcaaggggccggggaggtgggcgtgtgtgtgcgtgccagcgaaggctgctgtgggcgtgtgtgtcaagtgggccacgcgtgcagggtgtgtgtccacgagcgacgatcgtggtggccccagcggcctgggcgttggctgagccgacgctggggcttccagaaggcccgggggtctccgaggtgccggttaggagtttgaaccccccccactctgcagagggaagcggggacaatgccggggtttcaggcaggagacacgaggagggcctgcccggaagtcacatcggcagcagctgtctaaagggcttgggggcctggggggcggcgaaggtgggtggggcccctctgtaaatacggccccagggtggtgagagagtcccatgccacccgtccccttgtgacctcccccctctgacctccagctgaccatgcatgccacgtggctggctgggtcctctgccctctctggagtttgcctcccccagccccctccccatcaataaaactctgtttacaaccaccggcaaaaaaaaaaaaaaaaaaaaaaaaaaaaaaaaaaaaaaaaaaaaaaaaaaaaaaaaaaaaaaaaaaaaaaaaaaaaaaaaaaaaaaattaaaaaaaaaaaaataaaaaaaataaattaaaaataaaattaatttataaattaatataatataaatatttaaaaatttatataaattaataaaatttantatttttacccaattcataatttttcatataaattttttttaccaaactctttactcccataattcaactcttaatcccaaactccacttttaaccccctatatcttcttttcaaactatccatattttcatcctaattctaatttctcaaaacttttccccctatctctactaacccactttaccacttatatttttcaccatcacatcttaattcccttactatctttattcttccttttccttcat

SEQ ID NO: 560347 - DNA, 894 bp, Homo sapiens
gggtattcctctccacccttcgagtgtttgctttccttattccttccctggtggtcacccgtccgtccttggcggatccgtttctcatatccgcgacgcgaatttggcttcgcttgctgaggaattgtgacatacgctgcctcttgactcgtgctatcttaactctgtactgtggcgtgttacccttcggtatatcgtgcgctccgttcattccatcgtgtacgtctttgttgaggttctttctccgagttgttggttatccgcaattctcactcgtattctcgttgtgttgttcttggcttccttccggcatcgactcatccaccggtatcgccctctgctcgcgtctgtctttgcgctatggtctcgcctcatgcgatggtccccttctatctctggtgtacttacccagcattctctgcgcgtgacagaatcccacatggtatctgtcagtatggacatccaagtgacgactccagactgtggcatcattcgcccctgttcatgcgttgataacgacaccccctggagtacaccatcgggcaaccgggcggcggagcgtagccctgcagtctggggctgctcttcccgcctgtcggaggtcctttgtcaggtgggcatagtggaccaggtgcgtccctggaaggaagcagcgtcgcagagctctgcagctgtcagcgatagctccacgtggatggccattccagaccatgctgcgacagctgaccaaggccatgatgcgaaaggccacggccagccgccgtggtcacgcagctgcgatgcggagcgtgcagaagcttcgtcagcttattctgccaaagactccatcgcagaagtacctgcagagtgaacttagagacggctcattagaagaaaaaggctaacgatcggtac

SEQ ID NO: 560348 - DNA, 2747 bp, Homo sapiens
  misc_feature (3)..(3): n is a, c, g, or t
  misc_feature (5)..(6): n is a, c, g, or t
ttngnncgcggctccgaggcgtcacctcctcctgtcgcctggccctcgccatgcagaccccgcgagcgtcccctccccgcccggccctcctgcttctgctgctgctactggggggcgcccacggcctctttcctgaggagccgccgccgcttagcgtggcccccagggactacctgaaccactatcccgtgtttgtgggcagcgggcccggacgcctgacccccgcagaaggtgctgacgacctcaacatccagcgagtcctgcgggtcaacaggacgctgttcattggggacagggacaacctctaccgcgtagagctggagccccccacgtccacggagctgcggtaccagaggaagctgacctggagatctaaccccagcgacataaacgtgtgtcggatgaagggcaaacaggagggcgagtgtcgaaacttcgtaaaggtgctgctccttcgggacgagtccacgctctttgtgtgcggttccaacgccttcaacccggtgtgcgccaactacagcatagacaccctgcagcccgtcggagacaacatcagcggtatggcccgctgcccgtacgaccccaagcacgccaatgttgccctcttctctgacgggatgctcttcacagctactgttaccgacttcctagccattgatgctgtcatctaccgcagcctcggggacaggcccaccctgcgcaccgtgaaacatgactccaagtggttcaaagagccttactttgtccatgcggtggagtggggcagccatgtctacttcttcttccgggagattgcgatggagtttaactacctggagaaggtggtggtgtcccgcgtggcccgagtgtgcaagaacgacgtgggaggctccccccgcgtgctggagaagcagtggacgtccttcctgaaggcgcggctcaactgctctgtacccggagactcccatttctacttcaacgtgctgcaggctgtcacgggcgtggtcagcctcgggggccggcccgtggtcctggccgttttttccacgcccagcaacagcatccctggctcggctgtctgcgcctttgacctgacacaggtggcagctgtgtttgaaggccgcttccgagagcagaagtcccccgagtccatctggacgccggtgccggaggatcaggtgcctcgaccccggcccgggtgctgcgcagcccccgggatgcagtacaatgcctccagcgccttgccggatgacatcctcaactttgtcaagacccaccctctgatggacgaggcggtgccctcgctgggccatgcgccctggatcctgcggaccctgatgaggcaccagctgactcgagtggctgtggacgtgggagccggcccctggggcaaccagaccgttgtcttcctgggttctgaggcggggacggtcctcaagttcctcgtccggcccaatgccagcacctcagggacgtctgggcgtgtgtgtcaagtgggccacgcgtgcagggtgtgtgtccacgagcgacgatcgtggtggccccagcggcctgggcgttggctgagccgacgctggggcttccagaaggcccgggggtctccgaggtgccggttaggagtttgaaccccccccactctgcagagggaagcggggacaatgccggggtttcaggcaggagacacgaggagggcctgcccggaagtcacatcggcagcagctgtctaaagggcttgggggcctggggggcggcgaaggtgggtggggcccctctgtaaatacggccccagggtggtgagagagtcccatgccacccgtccccttgtgacctcccccctctgacctccagctgaccatgcatgccacgtggctggctgggtcctctgccctctctggagtttgcctcccccagccccctccccatcaataaaactctgtttacaaccaccggcaaaaaaaaaaaaaaaaaaaaaaaaaaaaaaaaaaaaaaaaaaaaaaaaaaaaaaaaaaaaaaaaaaaaaggggggggggcgacacaaaatgattctcccctgggggggccacatatataacccccccccgttttttttctcaaggggggtccactattgttggtgactatttataatcaagcacgacagcgcgccgcgcattatataaaaaagctcttacatgtgaggaaaccccgtgtgtacatggggtatactcttggggaagaagcctcacacacggggcgaggagagcacaaataaggggagacactctctcgaaaagttattcaaccctccggcaggatattaagatcaccagcgagagtgagtatatacgagcgtgtagaccacgcgctgcaattataccgccgagggtaaagaaagttgtagcccaagagagattatgttaaagcaaaacttaacccgagggggcggaattagaataagaacccaagagagaactaacattgcaccccaccagccactaaaaacacaagatatcatactagttatcaaacagaacagacacataaaaaagaaaaaatatcgcacattataaaaatcaatataaaaacaacactatataacatcataaataccaagatctaaactacacacccacagacagacgacaacacatactacacagacaaagaagataaagacagaaagctaactcgataataaatcaaaaactcaacaaagtattacacagagattcagaaaaccaacagaatgagcacgacatatattgaacgcgatcgtcaaactactccac

SEQ ID NO: 560349 - DNA, 899 bp, Homo sapiens
gttcctcggaggaaactttccgccggctggtccctcggtccgtgtcccgcccgtgctgccgcggcctgggagcccagcggggccggaggggcggcgggacccgagcgggcgggggcggcggacccagtgtatgcggccgcgggacgcgctggggccgggcagccgggaagcggggcgctgacggctggtaggggagctgcccccagagcagcatggatgccccgcgaagggacatggagttgctcagcaacagcctggtgcctacgcgcacatccggccaacccgagagcttcggcctctacttcgtgctgggcgtctgcttcggcttgtgtcaccctctgcctgctcgtcatcagacatctcgtggggcgcccgacccgcggcccggggccgggtcagcgccgggaccccgcagcagcagcctggagcccgaggagcgacgacgaggaacgaggaggacacggtgactcggctggccccgacgaaacgctgcgggcccgagctgtccagaagagcggaagggtgccctcaacgtcaggtcttcaagtcgggggaggaagctggagctgtgcgcagaggcctggagaagcgcgaacggatcctgcggaaatcctggcggacgggcagcgacttgttgggacgagtgagctgggccagcccaggcagggagctggggcgttgacaataatgtgggcccgtccggtgaagggtcgggtacggacgacaatgagtaagacccaactaggggggtcgcccaagccagggtagggggagccgaccctgagagcctacctgtgaaaaacagagagaggccacgcgactcctggacaaagaaaaaagaggccccacaacaaatgcgcgagacataggcgatagacaagctcacacacatgaggccg

SEQ ID NO: 560350 - DNA, 199 bp, Homo sapiens
tcagaattgttgcgacaccgtcaagctcgaagttacgccgcagatcgcgccggagggaactatcatcctcgacgtggacatcaacaaggacagccgggcgagaccacgcctgccggaatcgggatcaacaccaagcacgtgaagacccaggtactggtcgagaacggcggcacggtgctaatcggcggcatcttcgagc

SEQ ID NO: 560351 - DNA, 3248 bp, Homo sapiens
  misc_feature (3)..(3): n is a, c, g, or t
  misc_feature (5)..(6): n is a, c, g, or t
ttngnncgcggctccgaggcgtcacctcctcctgtcgcctggccctcgccatgcagaccccgcgagcgtcccctccccgcccggccctcctgcttctgctgctgctactggggggcgcccacggcctctttcctgaggagccgccgccgcttagcgtggcccccagggactacctgaaccactatcccgtgtttgtgggcagcgggcccggacgcctgacccccgcagaaggtgctgacgacctcaacatccagcgagtcctgcgggtcaacaggacgctgttcattggggacagggacaacctctaccgcgtagagctggagccccccacgtccacggagctgcggtaccagaggaagctgacctggagatctaaccccagcgacataaacgtgtgtcggatgaagggcaaacaggagggcgagtgtcgaaacttcgtaaaggtgctgctccttcgggacgagtccacgctctttgtgtgcggttccaacgccttcaacccggtgtgcgccaactacagcatagacaccctgcagcccgtcggagacaacatcagcggtatggcccgctgcccgtacgaccccaagcacgccaatgttgccctcttctctgacgggatgctcttcacagctactgttaccgacttcctagccattgatgctgtcatctaccgcagcctcggggacaggcccaccctgcgcaccgtgaaacatgactccaagtggttcaaagagccttactttgtccatgcggtggagtggggcagccatgtctacttcttcttccgggagattgcgatggagtttaactacctggagaaggtggtggtgtcccgcgtggcccgagtgtgcaagaacgacgtgggaggctccccccgcgtgctggagaagcagtggacgtccttcctgaaggcgcggctcaactgctctgtacccggagactcccatttctacttcaacgtgctgcaggctgtcacgggcgtggtcagcctcgggggccggcccgtggtcctggccgttttttccacgcccagcaacagcatccctggctcggctgtctgcgcctttgacctgacacaggtggcagctgtgtttgaaggccgcttccgagagcagaagtcccccgagtccatctggacgccggtgccggaggatcaggtgcctcgaccccggcccgggtgctgcgcagcccccgggatgcagtacaatgcctccagcgccttgccggatgacatcctcaactttgtcaagacccaccctctgatggacgaggcggtgccctcgctgggccatgcgccctggatcctgcggaccctgatgaggcaccagctgactcgagtggctgtggacgtgggagccggcccctggggcaaccagaccgttgtcttcctgggttctgaggcggggacggtcctcaagttcctcgtccggcccaatgccagcacctcagggacgtctgggctcagtgtcttcctggaggagtttgagacctaccggccggacaggtgtggacggcccggcggtggcgagacagggcagcggctgctgagcttggagctggacgcagcttcggggggcctgctggctgccttcccccgctgcgtggtccgagtgcctgtggctcgctgccagcagtactcggggtgtatgaagaactgtatcggcagtcaggacccctactgcgggtgggcccccgacggctcctgcatcttcctcagcccgggcaccagagccgcctttgagcaggacgtgtccggggccagcacctcaggcttaggggactgcacaggactcctgcgggccagcctctccgaggaccgcgcggggctggtgtcggtgaacctgctggtaacgtcgtcggtggcggccttcgtggtgggagccgtggtgtccggcttcagcgtgggctggttcgtgggcctccgtgagcggcgggagctggcccggcgcaaggacaaggaggccatcctggcgcacggggcgggcgaggcggtgctgagcgtcagccgcctgggcgagcgcagggcgcagggtcccgggggccggagccgacgctggggcttccagaaggcccgggggtctccgaggtgccggttaggagtttgaaccccccccactctgcagagggaagcggggacaatgccggggtttcaggcaggagacacgaggagggcctgcccggaagtcacatcggcagcagctgtctaaagggcttgggggcctggggggcggcgaaggtgggtggggcccctctgtaaatacggccccagggtggtgagagagtcccatgccacccgtccccttgtgacctcccccctctgacctccagctgaccatgcatgccacgtggctggctgggtcctctgccctctctggagtttgcctcccccagccccctccccatcaataaaactctgtttacaaccaccggcaaaaaaaaaaaaaaaaaaaaaaaaaaaaaaaaaaaaaaaaaaaaaaaaaaaaaaaaaaaaaaaaaaaaaggggggggggcgacacaaaatgattctcccctgggggggccacatatataacccccccccgttttttttctcaaggggggtccactattgttggtgactatttataatcaagcacgacagcgcgccgcgcattatataaaaaagctcttacatgtgaggaaaccccgtgtgtacatggggtatactcttggggaagaagcctcacacacggggcgaggagagcacaaataaggggagacactctctcgaaaagttattcaaccctccggcaggatattaagatcaccagcgagagtgagtatatacgagcgtgtagaccacgcgctgcaattataccgccgagggtaaagaaagttgtagcccaagagagattatgttaaagcaaaacttaacccgagggggcggaattagaataagaacccaagagagaactaacattgcaccccaccagccactaaaaacacaagatatcatactagttatcaaacagaacagacacataaaaaagaaaaaatatcgcacattataaaaatcaatataaaaacaacactatataacatcataaataccaagatctaaactacacacccacagacagacgacaacacatactacacagacaaagaagataaagacagaaagctaactcgataataaatcaaaaactcaacaaagtattacacagagattcagaaaaccaacagaatgagcacgacatatattgaacgcgatcgtcaaactactccac

SEQ ID NO: 560352 - DNA, 452 bp, Homo sapiens
tagccatgtgagcattagcatttctcattttgctactttctcctgattgtagtcctatgagccaggcagtgctgcagcacatacatacttgatgtgtaatgctgtgatctatcttgctcagtcttcctatctttttgtagtgcgagacactgcccgaggccactcagtgaaaccggtggtggatgattccaaacaatggtgtctgccagcatacattccatcctgcattgcccgacgctccccctgctgttgtacatctgctcttggtctgttgctctgtgtaaaaccctgcccagctgggagagtcagctcggctggtgggctacacttcgatttgcagtgactccctgctctctttgtagtctctcctccctgctgagccctgaaggtacacactcccataaacctgagcaccaggagagcccccatccagccagatagcaagctgagag

SEQ ID NO: 560353 - DNA, 889 bp, Homo sapiens
ataaggtatgaaaatagtgtaaggtggtcacgttgtttgccacgtcaatagacagcaaagtacattagaaaacaggacttaggccaaacaaacaactactggcatactgaatacaacagacacgtatgattaatattaacatggtttccaacaggttgccgtgcaaaggaggactattactactagtcagcaggaaacagatgcattcagaacccaagcagaatactgccgaagatgtaacttaggattaataacaagttgacccttggccagtgtactcatgtatttctatggctgtgtgacaaattacgcccagaatttatgcaggtttaagaagaacaatacccataggctagtgtctgtaggctgcatggaagtctgggcacaggtgttggctcggagttctcgtgctcacgggtcttaaatggctgaaatagagggtccgcgcgaggacaactagttccttcatggtaggctctgtcggaagaatctgctgtctaagcttcattcacggttgttcgcgccggcaattctagttctttgctgcgctctcagctggaggcccctctctcacctcaaggctgcctgcagttccttcttatgtggtcccgctccagtcttcaagaccaggcttcctgctcttactcatgcttcatatctctctcccgtcctcctgtccttaggggcatatgattagctcaagacccgacagatatatttcaaggtccgattgtgcgatagaacataattgccggcgtactgtctcatctcatcatattcacgggattctggagattagctcattgaaccgtgggaagcgggccatttcccagattctggcataccaaggcaataactgcccatctcagctgtaggtggaatttttacc

SEQ ID NO: 560354 - DNA, 655 bp, Homo sapiens
ctcggctgggaagtcagttacgttctctcctctcctctcttcttgtgtgaacatggtgcggactaaagcagacagggtaccaggcgacttacagaaagagtggtggctgctcgagcccccagaaaggtgctgggttcttccgacctctggcactaattcgacatcagtatcatcgaggaaatgagcatgttcctgtgcaagctgatcaccacacaatgatgaaaaagaatagaacgttgactcatgcatctttgaataacgtgtccttgttgttaccctggtattctacaatgtgaaatttacatacatggtgttggtggccagattgagcttagttgaacaggcatttcttttaaaacatctagggtttacaattctcagatgttacaaagagtaggtgggtggaagatttgagaatttgtgaatgactaattatggtaacttagcttagtattgccaagactataatgcatcgtttggttttctgtttgaccagaattaagtgtctagttcttgctaagaatcaagtcattgcattgtgttctaattacaagtatgtgtgttgagattagcttaggattgttgtactgagaggacatttatgggagtatgattagttggaaatggtggccttattggtcctcccttctaaatt

SEQ ID NO: 560355 - DNA, 117 bp, Homo sapiens
  misc_feature (46)..(46): n is a, c, g, or t
  misc_feature (54)..(54): n is a, c, g, or t
gatcagaatgagctggtaccatagcactcgaggatctccgggcatnccgacgancgctcgaagttctccaccgtattcgccgaatgccgctccaggctgatctgcgcgaacatacag

SEQ ID NO: 560356 - DNA, 110 bp, Homo sapiens
cagtcctgcctgctcaggggttgctgggtgaccttctgcaaattacctcatctttctgggtttcaatttaagtatgcctgaaatgaggcggttgaattgatctccaaatt

SEQ ID NO: 560357 - DNA, 621 bp, Homo sapiens
  misc_feature (3)..(5): n is a, c, g, or t
  misc_feature (8)..(8): n is a, c, g, or t
  misc_feature (149)..(149): n is a, c, g, or t
  misc_feature (173)..(173): n is a, c, g, or t
  misc_feature (286)..(286): n is a, c, g, or t
  misc_feature (323)..(324): n is a, c, g, or t
  misc_feature (331)..(331): n is a, c, g, or t
  misc_feature (334)..(334): n is a, c, g, or t
  misc_feature (350)..(351): n is a, c, g, or t
  misc_feature (353)..(353): n is a, c, g, or t
  misc_feature (393)..(393): n is a, c, g, or t
  misc_feature (398)..(399): n is a, c, g, or t
  misc_feature (403)..(404): n is a, c, g, or t
  misc_feature (410)..(410): n is a, c, g, or t
  misc_feature (415)..(415): n is a, c, g, or t
  misc_feature (528)..(528): n is a, c, g, or t
  misc_feature (568)..(568): n is a, c, g, or t
  misc_feature (578)..(578): n is a, c, g, or t
  misc_feature (584)..(584): n is a, c, g, or t
  misc_feature (587)..(587): n is a, c, g, or t
  misc_feature (592)..(592): n is a, c, g, or t
  misc_feature (595)..(595): n is a, c, g, or t
  misc_feature (597)..(597): n is a, c, g, or t
  misc_feature (603)..(603): n is a, c, g, or t
  misc_feature (611)..(611): n is a, c, g, or t
  misc_feature (615)..(616): n is a, c, g, or t
agnnngcngagctgtctgcggtggcggcggcgcctctcgtctcccgcggcccagcgctcgcaccaccgttctccctccctgtcgcagccgcgccgccgcgcagcgccccagccacacgccggcgggcagaagccgcccgctctccgganaagtgataaccagaattcattgancgtggagaatttttaacacgacggtaccaaaaagagaaagaaaatgccgaaaccaatcaacgtaaggagtacactacaatggatgctgagctggaatttgccattcagcccantacaactgcaaacaactttttgaccaggtggtgaaanncagtggnttngcgtgaggtctggttnntngggctgcagtatgtagacagcaaaggttattctacatggnttaannctanntacaanggtancacagcaggatgtcacacaaagagaactcctttacagtcaagtttagagctaaattctttccctgaagatgttcctgaggaattattcaagaaataacccagagactcttttncttgcaagttaagacgcatcttaatgatgagatatattgnccgcagaaantgcaantcnttggnctncntatgcntgtccaangccnnagtat

SEQ ID NO: 560358 - DNA, 170 bp, Homo sapiens
cgtcatacacgtggacgtccgctaaacgacggtactctttacctactaacacacgctacttgtgtaacgctacgtcactacttacacgtagttgggcgctgggacgtttacacgttgacgatacgtacgagacactgcgcgtacgtacgattacggacttactactaaca

SEQ ID NO: 560359 - DNA, 238 bp, Homo sapiens
cggagtcgattgagggccagagcaggcactgtggttcggatcctgggcaaagtttcccacgttgagggtctcgatgactcctagatctctttcccagtgccatggtgaagccgaagctgctgggacaggagctaagcgaggcggacggcgatcggtgctgattcggcgcgatttgaggagctgctgctgcaggcctcgaaggacgctccagcaaagccagacaaccagaccaagaatc

SEQ ID NO: 560360 - DNA, 631 bp, Homo sapiens
agaaagaccacaatggcaggacaggcgggtggtgatcggacgagggaattccttttcctagtgcctaaaatcctttcctagaaatggtcacttgggaaccaggaagaatcagcaggtctctgcctcctaaggtaggggaaggaccacccggttcagcacagtgctttctctctgctctgagcaggtggggcattcctctagattcaggtttgggcagggtctatagtcctgccatggggctgttcctgtcccttcctcccctttgctggctactctggcataattcaaggtgtcttcttgccttggggatccttagtggatcaaaatggcaacatgggaatattgtcctccatgccccctccagaaggacctaggagagtagggtgagctttgcaaagtgagagacgaatctttctttcttttatttttaaagggcaggatgggtatgcttgggctttctccttctgtggccccggaggaaggagagactgaggcaaggcaaagtgatagtacactgaagcaggactggaaacacccaggaactgttcagaaatctcagaagaaatctgcttctcttcgatggaaagatataattaacgatcaagagctctaagaaaatggcaaagaagcc

SEQ ID NO: 560361 - DNA, 404 bp, Homo sapiens
  misc_feature (165)..(165): n is a, c, g, or t
  misc_feature (174)..(174): n is a, c, g, or t
ggcccccacttgtgttggtctcaaaacctttggggggtttttggggggcctccacacaagaaggggtgaaaacgggggaggggggccccttaacccaaccccccccgggggcccccccccttggggtgtgagtggctttttttccccccccccccaggggggccntttcccccnaaaaaaaccccccccctttttttttttggttttttttaaacccccgagggggggggggttaattttttttgggggaacccccaaaaggggttttttgggggggggggacccctttcccccttccaaaccccatttgggaaaccccgttttgggaacctggtttccggtttttttttccccacccagccccgggttttaaaggttttgaaaaaaattttttttctttttta

SEQ ID NO: 560362 - DNA, 287 bp, Homo sapiens
catccctgacagacgtgttgcaatgtcttgagatgagagaaggaaagaagtaggccgaggggtgtctgggatcgtgtagaacgggtggaaggggataatagtcggaaggggaggtgataccgagggggtcgtacgatcccggagagtgacaagaataggaggtggagtgctgctagggctgaaataatgaccggcatgatgaagtgaaaggaaaacaatcgtgtgagggtgggactgtgtactgagtccctcctcgatattcatggcaacaacgatcatctcagcga

SEQ ID NO: 560363 - DNA, 631 bp, Homo sapiens
gcgagtggtcgagcaactgatcaaattgccacagcgctttgtgttgttctgcgatgacctgtccttcgaagccggcgagagcgattaccgggtgctcaagagtgtactcgacggttctctggagcaggcgccggaaaacgtcctgttgtatgccacctccaaccgtcgtcacctggtgcccgagaaccagagcgataacgaaaactggaaaacgatagacggcgaactgcatccgaacgaagcggtggaggacaagattgccctgtctgaccgttttggtttgtggctgtcgttctacccgttcaatcaggagcacttcctggatgtggtcgagcactggatcggtgagttggcgagcaaggccggtttgcagtggcagcgcgatgaagagctggacatcctcgcggtgcgctgggcgaccggacgtggcaatcgcaacggccgttgcgcctatcagttcgcccgctattgggtgggcctcaagttgttggagcgtcaaccatgatcgatttgcaacagtccggagtcggccttaatggctacgccatgcttcatgcacagctggaatcgctgttggcggatgagcgggatttcatcgccaatgcggcgcagctttcggcgtttctattca

SEQ ID NO: 560364 - DNA, 103 bp, Homo sapiens
ctgcctcagccgcctgagtattcttggtagagatgcagtttcaccatgttgcccaggctggatagactttcaaatgttcctggcttatgatttatctagcctt

SEQ ID NO: 560365 - DNA, 926 bp, Homo sapiens
agcggaggaaaatacttgcaaactacccatctaacaaggtattaataaccagaatacataaggagctcaaacaagtctacagaaaaaaaatctagtaatccaatcaaaaaatgggcaaaagatttgaatagacatttctaaaaagaagacatacaaatggtcattagatatatcaaaaatgttgcccgggcatggtggctcacacctgtaatcccagcactttgggacgccaaggcaggcagatcacctgaggtcaggagttcaagaccagcctggccaacatggtgaaaccccatctctactaaaaatacaaaaattagctgggcgtggtgggatgcacctatagtcccagctactggggaggctgaggcaggagaatcacttgaacctgggaggtggaggttgcagtgatctgagatcacaccattgtactccagcctgggcaacagagtgagattccatctcaaaaaacaaacaaacaaaaaaaatgcttgtctctagccatcagagaaatacaaaggaaaaccacaatgagatatcacctcacactgttagaatggctattaccaaaaaaatgaaagataacatgtgttggcaaggatatggagaaaatgtcagatcgtacattgttggtggcattataaattagtataagacgtctttgaaaaacagtatgtgaggtccctcaaaagcctaaaaaataaaattgctatgtgatccagcaatcccactactgggtacacacccaaagaaactggaactcagtatgccggaagagaatgtctgccctccatgtccatttgcagcactagtaagaataaggctagctatgggaaaccacctccgtggtccgtcaacgaatgaatgggatttttaaatggggtacaatatcccatggaatgtattcagccaaaaaaaaaaatctc

SEQ ID NO: 560366 - DNA, 406 bp, Homo sapiens
  misc_feature (402)..(402): n is a, c, g, or t
gatactggtgatatttaaatggacactcattaggtgatacagttttccattacgcctaggggtgagaagtttggcatatttaagcttcagggttaccgccccattaaggcattcaaatatgtgaatatgcttacatcccagagactacatatatggcaacaaagaaaacaaagtcctggccctcagggagcttctaatccagtaaccacaatttggtggtatgttcacggcatacaagaaacagtggaaggtctgtcaaggtttacaacaatgaaaatttccccctaaattcctagcaggtcgcaaagtgctcatacgcaattcaaaagcagcgacaacctggggtattaggctctctttctatgtcagcagggatgcccacatggcagatgcccaacatgngggt

SEQ ID NO: 560367 - DNA, 841 bp, Homo sapiens
  misc_feature (559)..(559): n is a, c, g, or t
gcttgaacctgggaggcagaggttgcagtgagctgagatcacaccactgcactctgacctgggtgacagtgagactctgtctcaaaaaaaacaaaaaaaacccaactgaatagtattccagtctgtgtatgtaccacatttttttattcattcatctgttgatggacacttaggttgcttccatatcttggctattgcgaataatgctgcagtgaatatgggaatgcaaatatctctttgacatactgatttcagttcctttggatatatacccagtagtgggattattagacctaatggtggttctaattttaattttctgaagaaccaccatactggtttccataatggctacactaatttacattcccataagcaatgtacagggttccctttttggcacatcgtctctaaggcttacttttcatctttttaataacagccattctaacatatgtaaggcgatatctcattgtggttttaatttgcatttttctgatgattagtgattttgagccattttttcatatacctgttggctatctatgtgtcttctatngagaattagctactcaatccttgcccattttctaatgggtgttacttattatcgagtgttgcgtccttatattatatatttaggtgtaacccttatcgatcttgttgccatattttccccttcacgtgtttctccttgtgacggtctggtggcgaagctttgttgtgtaccctcgcgtccttttttggtaataagtcccggggcgggcaccctcccctggggcccggtcggtggggacccctttctctcaaaaaaagagggggcgaaggcggggggcgcgcc

SEQ ID NO: 560368 - DNA, 1789 bp, Homo sapiens
tcatggttctggtaacaatttaatgggcatggcggttcatctctttacaaaaaaactcagcccacaccctaaaatggtaagaccttggagaaaaagggaagaatgtggctccgttaacgcaagctacaatggcagggcgcagactcctagagaaggagacgcaagaatctggccatgggtcccacaccaaaagaacaagaggtatcaatttaattacagtggcgccacatcattggggacgagaagtgcgggtggcgcgcaacacagcaggcaaaaagagcctccggataaacaccttcaagacaattaccaacaaaccctgtgcacaagcggagccgccctttcttgagacacacacaaagagtgtctcacacacacctcaactctgaagcgacacgcagaactctgtgtgctagagggcgttatttctacctatattccactctccgtgtgttctgcagcctaagaaaaagtggcgagtgaaactcttaacacgagacggaagatttgtgcgcacagtcgtgctgtgtcacccgcaggggggcgggcaacaaacaccacataggtacaacgacacacacatgtgtcagacaaattctttctacaacatctctgtctgtggaacaataataacacgggcgcacaacacttataacaaatcccaaactgcggccgcactaattattacgcaccaacgcgtagcatctctcttatgtggcccacaaactctctaacacgggttgtatctggggcggcacacatctctattacgcgcacccaccggagaaaagaggggggggaacacagcattagcgacccccggcggtgtctattataccccgcccgcgttgtcgtcaggcaagccacgttgtcaaacacaacagagccataataagcagaggggcacaatcctaatacgaacaagacgcacctttgcgtcgggacattataacaaacgagggggcggcgtcacccaatcaagaaatgcgacgcatgcggggcagcacatcactaaaccacgggcagcaaccaccaggacaaaacttataacggtggacgccccggctcattcaacacgctgagggcgtatatatgatctgccaccaaaaatatgtcactgttgaaacagtatatatacacccacacgctttcatggcgaacagattccccacaaacaaacacggggaggtctttctacaaacgcactgtccagaaacatactgtataaacacacggcgccgcgagcacatatactacacagagtgagacaccgttcataaacctcaacagcaagttatatagctccaaaggaaaaaatctgtgtctacaacaacgcactaaatctttgactagtacgccattgtttaatcacctatcgcgggcagcggccgcaacattcaatattatctacaaccccagcgttggttaccccttaacatgtcacgatagataactctatattaatttcgaccacgataccaaggcacagcttcacacacgaacataatgcaaacgagcgagagaagccaccggcagacaaacataacagcacacctcgcacacataggcaaacaacacacgagccacaccgagccagcaatcaaccagaaggaatacgaaacagcaatcacaaacacaatccacccgatcaacaacaacgggcagggttagcacccccaacacatcgagcgcacgagaccaccacccaaacgcaacacagaagcgggaacctacacaaatcacagactagagcacaaagagacgatagcaaacaatcagacacacagca

SEQ ID NO: 560369 - DNA, 251 bp, Homo sapiens
gtgcagcggcggcacgtcatagactgctcggcacatgactctgccatccagagagagccggaggggcacggaacagcttgcagaggtaggatgcccagacgtgtctcgcaacttgtggccacacaggcgcccggggtagcgctggcactcgtagacatcgacacacatcctgctgatgccgtcaaatagtaacccgtcttgacttcgcagcggagactgccgggagagttcacgcagctcgcccctgagtt

SEQ ID NO: 560370 - DNA, 497 bp, Homo sapiens
aaataaaatgcattttctctcctataagagcttacggtctaatggcactttaggacatgcagagagaaataaagcacagtctgccacctgtaggagcttatagtctagtggcagggaataggtaaatattccataggtccagaaggctgtacattaggaatgaagaaaccacaaaattcaggaaggttcttatgaaccattcattcattgaagagttgtttttttttctttaaatgtctactatgtaccaggaccagagaacagttcttttttttcttttctattttttggagacaggggtctggttttgtcaccgaggctggagtgcagtgacacaatcttggctcactgtagcctcccaggctcaagcgatcctcccacctcagcctcctgagtagctggggactacaggtgtgtgtctctatacctgctcatttttctatttcttttgtagagacagggtttcatcatgttgctcaggctggtctcaaactcct

SEQ ID NO: 560371 - DNA, 293 bp, Homo sapiens
atctcccagcgtttagcacaacacatgacacccttaatttgacaatcctattcctcccctgcgcgcactactgctcattctatcaccccctctatatgatccccacctccaaatatctcatcaccaaccgactaatcaccacccaataatgattaatacaaactaacctcaaaacaaatgataaccatatcacaatcactaaatcatgaaccttgtctcttatactagtatccttaatcagcttcattgccacaaataaactcctcggatacctgtctcactcattaagacca

SEQ ID NO: 560372 - DNA, 2924 bp, Homo sapiens
atggagtgtgacaaggccaggtgacaggcctgacatgtggtgtccacatccagaagggagaccctggagggatgaccctccactgccaccccctcccatcaggctctggacaccctcgagcctcccaccatccaccttaccagatccccccaagagtccgggaagctcactcccccaggggaccaggagcacagccccttccattcctaacgggcctgactcccaaaggggggtgaggaaagaaaaagccatttcacatcgacttattcttctggccccaggcagcagcacagggcgcagggtgggcctctgcagacacgatggctccgtggtcagggaggggccacctcccatgtgcctggggaggggccctcccaagcccctgcgtggcagcgccaaggggttggagtcagccccagcacacacagggccctgctcactggtggccattgtcagcgccacctccaccttcaggagcctgccacgtgcctgccctcggtcacttagccctccctggcacgcaccactttgtccacacaccctgtgtgtaagtggtgacagcggtgacagctcaggcgtcacctgatcgggccgactctaagccttagtccttccttgtcctgttgcgccggacaagcctctgggaggcgacggtgggacagccacagggttcttggctcagcccccaggagtggggagctggggctctggacggaggtgggcactcgaggctggtgtggcctcctgggtgagggccaggctcgggagaggcagccaggcggccccaagccaccccaggaacaaagcaccagcacacacctccactggtttgctagggctgggagaagttggagtgtttctgtggtggctgtggcagcccacggccccaagaccctggcttccttctgctcccaccttttcaggccccttccccaacaagcagctactgtaggacccagtgggggctagggcaccagcagctgccattacccatgctgggtcctgatggttcctgaccagcctcaaccgtggattccaagctggggaaggaagaagcaggccgggagtggggagggagacagtgaaggacacccaaacacacacacacacacacacacacacacacacacacacacacacacacacacacagaaggaacagtttcagctttgtttcccagtaatctcacttaaaaagaacacttgggtttaccatgttcacataatctcgttgctctgagaatgaacttattcttcctcccagcttggccatgtgttcctccccattgcccaagtcccctcatgacatcatctcccactgccatgtcctttccttggggacctccaagtccctggagtttggggactgcagggtgggtggaggggcccacaagctctgcagggagccagaaggaaacggtctgtcccaccccagggctgagcacctcgctgggagatgatacccacacctggaaatagctcaagggccgcgtgaggccgcacgacacccacgccagtatgagacacctggccatgtggcattcctggccgactgctggcagctgcagactttgtcagccaggtgatgtccccgggatctctgggcaggcagggcacacaggaggcagctcacgctcactcatcatggcgaggcaggtcgtgtggaacttccttggtcttcctcatctgcgccccacccagcctggcagatggtgatgctgtgagtgccagggaaacacacacacgcacacacacacacatgcacacatgtacagacaggtgcacatgcctgggagagtctgtgctgctcagcttccgagggcagctccccaggtctccccccgggtctgcggtgggaggcgagtcttttaacatcagctcaaaccaaacaggatgaggagggcaaatcggccgtccccagtaaatcctagggagtccctccaaggcaaacagaaaatgcaccccagctttcgcttttaggggtttgagttgcgagtttccagtctgcggagtgcgatggccgggtgtaagtctgaaaccctctgggggagagaagccgcacagtgcaggggtacacatcccagatccactccccagctgtgaggcccaggcgcattccgcgttccccgcccatctccacctccgagggttgcgggaggctgagcagttagaaccgtggctggcatacggagggcactcggtaaacgtggctgtgctgagctgtgggcctcgaaggagtctcgcggggctgctgtaccaatgaccttgcactgggtggcctaaaacaacatgtgtttcctcacagctcgggggaccagagctcagaatctgggggtcacagaggagggtccatgctcatccaggtcagctctaggggctgcaggccacccctaatctaggatggtcttatgttgaggtccttaattacatccacaaagaccctttccccaaataagtccccacgcacagttcccagggacagcctctggggcagcatcaccacccactcagtcctccatgcacccccttgcgctatcacgtaacttggatcaggtccacgcgtgtggctttgcggctttcctttgtcacagcgtgtcacaactgttttcccgggtgtcactgctgtggtttgagtttgtgtgtccccagccttcatatgttggaacctgagacccaagaagatcgttataagacgtggggcctttggaaggtgattaagtcaccagggtccccattgaagcgcttgggaaaccatcgaggccccctcccctttgtcctctcaccttccgccgggagaggacacagcaagaggcacccactgggaggcagagagcagcccccactcccactgaggctgctggcaccgagaccctggacttccagcctccagaagcgtgagaaataaatgtctattgtgtgtcaatg

SEQ ID NO: 560373 - DNA, 3109 bp, Homo sapiens
atggagtgtgacaaggccaggtgacaggcctgacatgtggtgtccacatccagaagggagaccctggagggatgaccctccactgccaccccctcccatcaggctctggacaccctcgagcctcccaccatccaccttaccagatccccccaagagtccgggaagctcactcccccaggggaccaggagcacagccccttccattcctaacgggcctgactcccaaaggggggtgaggaaagaaaaagccatttcacatcgacttattcttctggccccaggcagcagcacagggcgcagggtgggcctctgcagacacgatggctccgtggtcagggaggggccacctcccatgtgcctggggaggggccctcccaagcccctgcgtggcagcgccaaggggttggagtcagccccagcacacacagggccctgctcactggtggccattgtcagcgccacctccaccttcaggagcctgccacgtgcctgccctcggtcacttagccctccctggcacgcaccactttgtccacacaccctgtgtgtaagtggtgacagcggtgacagctcaggcgtcacctgatcgggccgactctaagccttagtccttccttgtcctgttgcgccggacaagcctctgggaggcgacggtgggacagccacagggttcttggctcagcccccaggagtggggagctggggctctggacggaggtgggcactcgaggctggtgtggcctcctgggtgagggccaggctcgggagaggcagccaggcggccccaagccaccccaggaacaaagcaccagcacacacctccactggtttgctagggctgggagaagttggagtgtttctgtggtggctgtggcagcccacggccccaagaccctggcttccttctgctcccaccttttcaggccccttccccaacaagcagctactgtaggacccagtgggggctagggcaccagcagctgccattacccatgctgggtcctgatggttcctgaccagcctcaaccgtggattccaagctggggaaggaagaagcaggccgggagtggggagggagacagtgaaggacacccaaacacacacacacacacacacacacacacacacacacacacacacacacacacacagaaggaacagtttcagctttgtttcccagtaatctcacttaaaaagaacacttgggtttaccatgttcacataatctcgttgctctgagaatgaacttattcttcctcccagcttggccatgtgttcctccccattgcccaagtcccctcatgacatcatctcccactgccatgtcctttccttggggacctccaagtccctggagtttggggactgcagggtgggtggaggggcccacaagctctgcagggagccagaaggaaacggtctgtcccaccccagggctgagcacctcgctgggagatgatacccacacctggaaatagctcaagggccgcgtgaggccgcacgacacccacgccagtatgagacacctggccatgtggcattcctggccgactgctggcagctgcagactttgtcagccaggtgatgtccccgggatctctgggcaggcagggcacacaggaggcagctcacgctcactcatcatggcgaggcaggtcgtgtggaacttccttggtcttcctcatctgcgccccacccagcctggcagatggtgatgctgtgagtgccagggaaacacacacacgcacacacacacacatgcacacatgtacagacaggtgcacatgcctgggagagtctgtgctgctcagcttccgagggcagctccccaggtctccccccgggtctgcggtgggaggcgagtcttttaacatcagctcaaaccaaacaggatgaggagggcaaatcggccgtccccagtaaatcctagggagtccctccaaggcaaacagaaaatgcaccccagctttcgcttttaggggtttgagttgcgagtttccagtctgcggagtgcgatggccgggtgtaagtctgaaaccctctgggggagagaagccgcacagtgcaggggtacacatcccagatccactccccagctgtgaggcccaggcgcattccgcgttccccgcccatctccacctccgagggttgcgggaggctgagcagttagaaccgtggctggcatacggagggcactcggtaaacgtggctgtgctgagctgtgggcctcgaaggagtctcgcggggctgctgtaccaatgaccttgcactgggtggcctaaaacaacatgtgtttcctcacagctcgggggaccagagctcagaatctgggggtcacagaggagggtccatgctcatccaggtcagctctaggggctgcaggccacccctaatctaggatggtcttatgttgaggtccttaattacatccacaaagaccctttccccaaataagtccccacgcacagttcccagggacagcctctggggcagcatcaccacccactcagtcctccatgcacccccttgcgctatcacgtaacttggatcaggtccacgcgtgtggctttgcggctttcctttgtcacagcgtgtcacaactgttttcccgggtgtcactgctgtggtttgagtttgtgtgtccccagccttcatatgttggaacctgagacccaagaagatcgttataagacgtggggcctttggaaggtgattaagtcaccagggtccccattgaagcgcttgggaaaccatcgaggccccctcccctttgtcctctcaccttccgccgggagaggacacagcaagaggcacccactgggaggcagagagcagcccccactcccactgaggctgctggcaccgagaccctggacttccagcctccagaagcgtgagaaataaatgtctattgtgtgtcaatgaccccggctcaggtgttttgttacggcagcaggaatggactgaaatgcatcactgaaaggtcttcacggccaggcacagcaactcacgcctgtaatcccagcactttgggaagcactcagcgtctgaggccagtagtttgagaccagtgtgagcaacacaaggagatcttgtctctacaaaaaaa

SEQ ID NO: 560374 - DNA, 123 bp, Homo sapiens
ttcatacacaccacacattcgaatgaaccctgtatacataaaatctacgacaaaaattgaattgaatctgaaccccccaaatgcttgtttcaatgccaaccccattgcctccatgactttttc

SEQ ID NO: 560375 - DNA, 712 bp, Homo sapiens
cactcacgtgtgagttcagcatctgtgaactggactttgcaacctcctgtggtctctcaggaaaccctagagatgttctcagatgacattgagaagaggaaacgtcagcgaccaaaagaaggctcgaggagagaacgccgccgagagcagcaggattgagatcgcggagaacaaaaaacagggacaaggatacccagaagtccacaattccccatcgagaaatctacagacaatttccatgccttcttattactatataccatgcatccatcatgcattcatgactattgacgatcccaccagacacacgtagagagacacatgaggagaccacatcatcacaatatatcataccatcatccaagacagacagaataccaagagatataccacaatgcaagaacaatatatacatgacatgaaaccaccatcatgatcaaccacaacatgaaccagaatcacagggacaaagatcaccatcaaataatactgccgatatggagaacgtttcgtgagaaaagacagtaccatcctcacacagtttcacgcgtgtccactatgtgacaccccaggcagctgccatgaagagggaatatggagcaaaaaaggcaacaaacaaggcgaagaattgtggatggggccccaaagacaacgtgacataccacagcagaaaaagaaatggagaaaacaaggcatatagggtgtccaatcg

SEQ ID NO: 560376 - DNA, 475 bp, Homo sapiens
  misc_feature (383)..(383): n is a, c, g, or t
  misc_feature (433)..(433): n is a, c, g, or t
cactgcgaaaccgatgtagccggcatataacagggggggatgcacaatcatcccgggatcttgcagcaacgggttgaggtcgttccctttttgggacggcaggcaggagacgtgcgaatgggttggaggtgaagaggatcagggcgaggaagccgagtgcaatcaggcccaggacgccaaggatgcgtgcgctcagggtggctgggagggtgtgggaacgtaaggcgacgctagcggtccatcctgccaggagcaatacccagagtaagagggatccttcgtgggcaccccacacggcggtagagcggtagagggtggtagcagtgaatgggagttttcggcgacgtattggacggagaagtcgttgccgaggaaggcattangtgaacagtgcgaatgcgccagcgagcagcttaagttgcacatagcggtngggcgtgcaacggcatcaaaccgtgcggcggcctgggcgcca

SEQ ID NO: 560377 - DNA, 1172 bp, Homo sapiens
ttgcgtcggcagtccgaggccagatcgctgagacaccataggggaaggtgaaggtcggagtcaacaggatatggtatgtattggggcgccgtggtcaccgagggactgcggtttaagctctggctacaagtggatattggtatgccatcggatgacccctgtcagtctgacctgcgactagcatggtttagcgatgtaccaggtatgagttcctgcactcatggacaagagttcgcatgtgccccggtcaatggcttgaggaacgggaagcgttgttcatctgattggaaatcgcgcatctaccaatcattccaggtagcggagatccgctcacaagaatcaagtgtgggcgatgctggcgctgagtactgtcgtggagatccactggcgttcgttcactcaccatggagaaggctggggctcatgttgcaggggggagccagaagggtcatcgatctcttgctcctcctctgctgatgcccgccgatgttcgtgatgggtgtgaaccatgagaagtatgaggagtaggcctcaagatcatcgagcattgcctcctgctccagcaactgcttatgagctcgtggccaaggtcatccgatgaccaatgttggtatcgtgaaaggactcatgatcactggtccatggcatcgactgtcaccgagaagcactggtgactggccttccgggaacatgtggcgtgatggcagacgggggtctcacataacatcatccctgtcttctattgttgctgccaaggctgatgggcaaggtcatacctgaagctgaacgggaagctcactggcatggccttccggtcgcatgccaagtgacacctgtaggactgaacttgcagttaaaaaaaagctggccaagtacgagtaagtcacaaagggatgatgacacaggagccgaagagggcccacacgaggaaccgtggcagacaaggttacacaaaacgtgcattgcttgagcccttacaagagcaacgcagtccaaacatatagctaggtgaggattgcctagacacaatgtgaggcatccggtagccacaagaccaaagaggggagagtaaacgcaagtaagacgcgcccacaacaaaaagaaactacagaaacacaaaacacaactacgagagagaacactctcaccgcgcctttcaacgagcgaacaaa

SEQ ID NO: 560378 - DNA, 1468 bp, Homo sapiens
  misc_feature (1391)..(1391): n is a, c, g, or t
ggttgcggacgacgcgtctgtagcttccttgttgtcctgtgccgtcagctgcagcccggtggagccaggtgcataaacggaagatgaccattctgtgactgaagtggcctgctggatgaggagtcattcgaccacggacagtagcgtgatcgttcagcatggtctacgagactacgacgacgtgagggcatgcccgatcaattaagagactcctaggaaagaatagccgcccaggcaggctcaatgttcttgcttggcgagacggtcatatcctggttcggacagcgaagattcatcggtgacatcacggaccattatttcaggactgagctcgtccagagggctgttccgagcgagagcaaccatgacgagtcgaggcttgaagacgagacgggtgggaggctatggtaagccgagtgggcttacaggtgtcacaaggtgagttgcggtggagccctgagtgattctctccgtcataggcaaaagtgtctagaaaggactcctacaagcctgtgcaaacgccttatgtgataatgcttcgcatggaggacacgggagggattccgaggcgtgccgtgccaaggtgagcaaagccagtagattccttttcttgcattaaaaccaatcacaactcattgcaaacgcaattgtcgtcatccacacacatgtccccttttcaaacgttattatccaccgaaagacgcgatggacccaaatgggtgctccgaggtctttgaaatacatctccaggcacacggggctacgccttttccccattgccaacccaattaggggccactgaacaggtaagattgggcgtgctctttacacaagccgcaattgccctccaaagactaacggcggtctgcacattcgaggggggcgtcccacacgcggcaaccacatcaagtgcaaggaaacgacctgtggagttgttttgagcttcgaaagtgtgtcgttgcccctgcaagcgaaggaatccccgctcccaaacggcataccaagagtatcctttggggatacggtgaacggactttgggcggaggaacacaaaagtacgcacggaacttcaattacttcttcaaagagcccgcacgaaagagagttgtgagagagaagctaactgggctacgcgcgcataagaattgcccccagcgcaaaagcgggaccgaaagtcgtattcgtctttgaattgcgagccaaacgaaaatttagcgaaatttcctcatgctacgagcggaaagcaagctagcatgtgtgggtggccttgtggtaccccatcgacgtacagacgtttaggcgcgcaattgcactacgtgttcctagagcaagtgttggcttagtatccccgatatgcttcagaggatgtaacccgccacaggattcgaccnaagttgtttccacacctgtgaactgagattgtccactacaggaggcaccacaaaccgtggcacaaacgctcccatgg

SEQ ID NO: 560379 - DNA, 1399 bp, Homo sapiens
  misc_feature (300)..(300): n is a, c, g, or t
  misc_feature (823)..(823): n is a, c, g, or t
agcggagccgcggtgttgtgctgtggggaagggagaaggattgtaaaccccggagcgaggttcgaggcatacccgaggctgcagcgatagcaggagacccccgtggtaaggtcccacctgacagacagagtacaaagcatgggaggtccgaaggtctagcaagcggatagacatagtgtgatatagaatggtgaatgagagagatatgagtaagatgctcataggtgcaagagtacagatataaatcgagatactacagctacaactgatgtataaaaaggaacaggcacgttacacaantaaatcactagattaatagcgagaagcgaatacgaatggaaaactatatgagatccacgtatgaggagacaggacatgaagaagactgatgagatgaggagcttaactgagaaatcgtagagaaaggagcaaacatcgcaaatggagacattaaaactaattgattgtcattggaaaaatattatatataatattggataaattgctagatgtatagtcgaaagataattggatgggctatgaactagatcattgagtgaggtaataattatcttaagttaaacggattagaagatctgaagattaccggcactgatacgcttagttattaattgatattggaaaggataagaaggggattatatataaggggggacaagtggaggttgggaaaagtcgtgaaaaattcattgataattatattatttgatccaaagttcttgcctctctagtgcgaacttggggagtatatttttcgttaagctaaaaggagaatcggattgaaaatattaaggcgatatgnaaacctaacctctattgatagaccaaaggatagaggaagtgtttgagttggatccacaaagagaagcgtaggaatatgtggggttattaaagaggagcaaatgggtcgacagggtggcccctcgggacgggtagaaaaaatctccgcgagacaatcgcgaagaatttaaagaaagagtaaaacctggaagaacgcatccagaaaagaatagtgaagcgagcgtcgaagaagtttggcaattaaatccaaaagatagcgtgagaaaaacaaaagttggcaggaggatatgattaaaagtaggttggtggagaagaaagagtcgaacgctcgaattgaggccagagaggttaaggagacccaagaaaaatataagagctatatgaaccccaacatagaatagtccgccataaagagagaaacccaaatctcaagagtaaaaggagaaaacaaaacaggccgaacccaataagaaaccgaatatatagagctatatagcacattgagagggcgggaacaaaaaacagctgggtgggagcactaagaaaaacaaagaagaccaaaatcacactcacatac

SEQ ID NO: 560380 - DNA, 871 bp, Homo sapiens
tttcacaaaaaaaggagacttctatttaaccagcaaaaggttgtaagggagggggtaaaaagggctatcctgaaaaattcctaaaccgaccccaggtcctggggcacatctatagggtgtcaggagggtgtgtgaaaacgggctcttaacgctgctaagggaggggaaatctcagggggctattaggtggtgatttggttaatagaacagaactatcactttggggcctattgtcctgggcatgtgggtggtgcgccggcagtgtgggcaaaatgtgagccgaccagtccactggttcagtcatatgccaaccacagatcttcagcagaatcttgccgggttaatcccctgaagttatcctcccgaaaaagtggctcggtggtaccaggcgaacttgggccgaacattccgcttttatactcgtgatcgtgagtgctccaggaaggctcggctcctcgtgtggcgagagaacaccagtgaatgcgaaatcgagggctccggctccattgggttccgtgccccccttaagtgggccttggtttgagcctcctccgaaaaaaaggggggggggtattcttggagaaacttttccacaaggggccagaagagccctcctccagggtcccggcgaatcccccgcgaaatgctcttctaaaggtccccggggggcaattctcgggtactcatggaaaccgggtaccaggggggcccggtctcggggagaaagaaccggatggaacttggactcgtctggtccagggggttcccccgggggggaataaagtcggggatccccagggcgaagggattgcacgtgggggttccacacggtgcctgaaaaaaaagagagcgcgaagcccgagtggaaaag

SEQ ID NO: 560381 - DNA, 1236 bp, Homo sapiens
  misc_feature (335)..(335): n is a, c, g, or t
  misc_feature (422)..(422): n is a, c, g, or t
  misc_feature (533)..(533): n is a, c, g, or t
ttactagctgctcggggagccgggccaggcaccggcttgggggccggtagcgcattcactccagactggagaaagccgacgaagttctccactggtgaccatctacttcatggaccgttgcctagatttgatcaggggtgcgatggttcatgggaggctggatctctcatgaacatatcatcttgtgtgctcactacaatcagctctaattcgcagatgatctggactaatgcattgacacccgtattcgagcgaccgacgattatgtacatgcctcgtgcagactgcagtggcctcaagtcatgtctcgattaatccctaaggacacgctaagnctagagtgtctcgcttcaccatatcacatgccattcgggttctcacatcatgaccatttgcaacctagaactcgatgaccgtctcancttgagtaccatctacctagctaagcctcaagctcctcctatctagagcgcagaatagtcgttattacaccagataccctggagaacagaaccatagattggactggtggnaactcagtctattaccgacaggtcatgtggtgtatcccttcgatagaaagagtagcggtcatggttagtacatctacgctgctcttattgagcggcgcgctatgaagtcggctatagtgccagatccctcttgactcagttggtgaggcctctcggtgaagtctgtccgtacgatcatattgtgtcctatgcttagaatcgctatccttagctcggtggatacggcgcttgaccaaatggaatacgagatagtcctgcataattccactggcccaattgctctatcgccttttgcgtcgaatggaagcgcgcgaatggcgtccagatggaagtgaagctgagtcccgcactgtggcacgtccagtttgcaagagtaccgggggtaatgagcgagtaaggtaacttctgggagagacccagattatcccaaaattgcgccgtttgccactttatcatccgactgaatgctgggattctaggtatgcaataaggagattgctctgtacctgattgcaacattttactaaaagtttggttagccatgagaaaacttcaaattagaaagttgagggagttctgatcaggatccgcgaaacagggggttttgaattgtgaccagggctaatagtgtttggtggaccgtttttgtgaccaagggggaattgcgggacacaaaggagggaagaattggaagcaagtatgg

SEQ ID NO: 560382 - DNA, 479 bp, Homo sapiens
aagccggctctgatttaggcgaggtccctgtgggcttccgcagtgttggtccctcggtacttgagattagggagtggtgatgactcttaacgagcatgctgccttcaagcatctgtttaacaaagcacatcttgcaccgcccttaatccatttaaccctgagtggacacagcacatgtttcagagagcagggggttgggggtggggttacagattaacagcatctcaaggcagaagaatttttctcagtacagaacaaaatggagtctcctatgtctacttctttctacacagacacagtaacaatctgatctctcttttccccacaggataggagtccaggtaacttgttccatggcaggcagtagtcttttttttttttttttttttttttggaaaagggtcccggattggcaaccctaggttcaaagcggggggggaccccaaaaagtcacccggcgggcatgaaagcggggcagg

SEQ ID NO: 560383 - DNA, 208 bp, Homo sapiens
gaatcatgttgggagggccagggcagaatgagatgattcctcgtgtgtctacccaatcatctcaaacgtaatccccacatgtcgagggaggggccgggctggagatgatgcatcatgggggcggtttcccccatgcgcttctggtgtaagtgagtgagttctcacaagatctggtgggttaaaagtgttgggcagccgggtgtggtgg

SEQ ID NO: 560384 - DNA, 341 bp, Homo sapiens
ttagcggatctttgctccacttggttgcacagtggaatgtgtatgctcttaaacatctcaatcaccgtcctctgtaaactactttggtctttatctcaggaaccagggtataggttcccattcttcgttttgctatccgagatactgcagctgctgtctgtgatattgtggtggccatgtagcgctggttctgaggtagcgactgatgaagggatgggaagcgagggtaacagctgctgtcgtccaaagtcatgaactgttaatgtcgatctcctcttatggttccttatgatctctagcttctcgcacttctcatggaatctttactggctgcatgcact

SEQ ID NO: 560385 - DNA, 513 bp, Homo sapiens
  misc_feature (215)..(215): n is a, c, g, or t
atgcaagctccaccatcccgggttcacgccattctcctgtctcagcctcccacgtagctgggactacaggcacccgccaccacgcctggataattttttgtatttttagtagagacggggtttcaccggtttagccaggatggtctcgatctcctgaccttgtgatccacccgccttggcctcccaaagtgctgggattacaggcgtgacacacngcgcccggctgggaggatctcttaagcccaggaggttgacagtgcagtgggccatgactgcaccactgcactccagcctgggtgacagagccagaccctgtctcaaaaaaaaaaaaatagttaacttaagtcaaacccaaagaccttaagtgaaagagcaaaagctataaaactcttaagaagaaagtattggggaaagcttcatgaccttagatttaggcaatggtttccttagataagaaacccaaagcatgagcaaccaaaagaaaaaaaaagagagagacattggacttttaaa

SEQ ID NO: 560386 - DNA, 579 bp, Homo sapiens
gggcacatgaccaagttggtccaatgcggagccaacccaggtacaggttttcctggagcggctgggaaagaggagtctctcgcaaattattcagcaatctgctaacagcgtaagcgaggggtttcttgaaacggtagaaggccagttaggcttgcgaggcaggaagatcagacctccctgacgttgcttggaagttacctgccgggcgccctttgtaaacatttgggaggcattccgaagctcctcagatgagtcataggccactcaagattgtggagcctctgggtgctaggccatggcgaaattcccaacttctccccgtactcggaaaaggtgcaaccaacccacgaatggggaacggggctggatggcgaaggaaatcaaaactggagacaggacgacgatgggacgacgaaaagtgataggggagtggacagacattgggggcaaaacggggggtcggaaatcttgcgagaaacttttgggggaacaacggggattggtcaattaggggaatactctggggggtagatctggggggtttcggggtaacgtgttttaccggcctggggcatgtac

SEQ ID NO: 560387 - DNA, 877 bp, Homo sapiens
gtattaaatattagactaataggttgctaatagtgttttctctttccaatacgaaaatgtcttctgaggctgatctggtgtctcacgaatctgtaatcccagcacttggggaggctgaggtgggtagatcacctggaggtcagggtagtttcgatgcaccaagttctctggatcaacatggcgaaacctccatctctagtaggattacacaaatattagtcaggtgtggcggtgttcacctgtaggcagcctgtaagtcccatgctactcaggagatctgcggcatgacagtaatcacttgaacccctggcgaggtggaggtctgtagttgatgccaagatcgtgccactgcactccagcctgggggacaaagtgagaactctgtcctcaccagacaagataaaccacagcgcatctctactgatagaatacaaagattacgctggtgcatgctagtgcctgccatgttgtccctagctactcgggaggctgtggcgatagagtcccttggattttaggacgggggaaggttgcgatggacagtgagactctcaactaaaaagtgtcgatactcagagggtacgctgtcatgaaatgttttcctttaatcccatattcgcggcagtttgctctggggcttcggccggattacaggtgtcgccacccggtcgtagccgaggaggttcggctaggagctatgtcctaggatggggtctcttcgacccgaagtgccctcccgtcttccttaggctgcttagccttcccgggagggatttctcactcgcgtccgttacgaagtctctttgggccattttagcctgtccgagtgttggcattggtatgtccggcatcctaggcgactggggcctttccgtgg

SEQ ID NO: 560388 - DNA, 203 bp, Homo sapiens
  misc_feature (126)..(126): n is a, c, g, or t
  misc_feature (164)..(164): n is a, c, g, or t
tgggagagacacacacacacacacacacacacacacacacacacacacacacacacacacacacacacacacacacacacacacacacacacacacacacacacacatatatatatatatagaganacacacatatatacacacagagagacacacacagaganacacacacatacacacacacacacacacacacacacaca

SEQ ID NO: 560389 - DNA, 243 bp, Homo sapiens
gggttttttaaaggggttggtttttccccccccttccttggggggcgaaaacccccttttggaaaaaccgggttttttgggattttttcttaaaccttttttttgggcccgggggggggcccccctggggtttttttcatgggtccttttaaaaaaaaaatttttttccggttgggggggggttttcccctttttttcttttttgggcggggggggttttaaaacccccccgtttttttggta

SEQ ID NO: 560390 - DNA, 136 bp, Homo sapiens
agctgtcctgacctgaaggctgatgaggggacccctgactgtatcccccatactgtgttctagggaggtgctcaccccagactcttaggaagggtctacagaaatgagaggagcccaagccaggtagcacgggtac

SEQ ID NO: 560391 - DNA, 263 bp, Homo sapiens
  misc_feature (98)..(98): n is a, c, g, or t
  misc_feature (121)..(121): n is a, c, g, or t
tgcactgcacacagtcatgcacacagatcttagcccactgagcaagcaggatcgaacccacaatctcatggttcctagtcagatcgttaaccactgancacgacggaactccaggagcatnttattattagtgcagtactgatgcctcttttcccggcatgattcaaagacaaaagtacagtcatgcagaggtattgtgatagaaacacttttcatacatatagatatggcattgtgaaaacggatctctgtgtctatccatc

SEQ ID NO: 560392 - DNA, 254 bp, Homo sapiens
cgaccatttttagaagagacggggtttctccatgttggtcaggctggtctagaactcccaacctcaggtgatccacccgtcttggcctcccaaagtgctgggattacaggtgtgagccaccgcacccggccacctttatttttaaatagtactttatgatatcagtgaatgatatcataaagtactatttaaaataaaggtccggcgtgcagcttatcaatttaaagactgaggctggtgaatcatctgaggtc

SEQ ID NO: 560393 - DNA, 213 bp, Homo sapiens
gactagaatgtacaaccatagaatgggcgcgtgcacatgccggctaatttttgtatgtttagtagagacggggtttctccatgttggttaagctggtctcaaactccccacctcaggtgatctgcccattttgccctcccaaagtgctgggattacaggcttgagccactgtgcccggcccacattcacttttttataggcattctatggttg

SEQ ID NO: 560394 - DNA, 886 bp, Homo sapiens
  misc_feature (594)..(594): n is a, c, g, or t
cacggtggcacactcctgtaatcccagcactttgggaggccaaggtgggaggtcacttcagcttaggagtttgagatcagcctgggcaacatagcgagatccccatctctacagaaaaatataaaaattagaagggcatggtggtggacacctgtaatcccagctaatcaggaggctgaggtggaaggatgccttcagcccaaaaggcagaggttgcagtgagctgagattgcaccactgcaatccagcctgggggacagagccagaccctgtctcaaaaaaggtaacagaaataaaaaataaataagtttggctgggcgcagttgctcacgcctgttatcccagcactttgggaggctgaggcgggtggatcaccggaggtcaggagatcgagacctgcctggataacatggtgaaacccggtctctgctaaaaatacaaaaattagctgggagtggtggtgggcgtgtgcaaatcctagctccttgggtagactgagggaggaccgggatgcttgaaaccccaggaggcaagagggttgcatgtgaagctgagaattggcggcctacgtcactccaagacctgatgtgaccnagagtgcagaactctgcctcaaaaaatagaaactatgtaaaacacgtgttaaaatgttgcggaaacgttgtttggtacacaactctggttaaaattgtagcatagaaacactattgggatatataaatagattataaagtatatataatgataattatggataaacgtttcaaaggaaacacaaagagtgtattgtgtataaacagtccgggaaaacacacgggaatgagggaaggaaaaggtagttacaagggggaggataacagaactcaccaaatgggagagaaaacag

SEQ ID NO: 560395 - DNA, 431 bp, Homo sapiens
gactagaggatacctcgatcctccatctgtctatccacgtgaatctcagcctccaagtagctgggactgcaggcacatgccacctatgcccaggtcatttagttagtcatttatagtaaaaacggggtttcaacatgttggctaggctggtctcgaactcctgacctcaagtgacccacccgccttggcctcccaaagtgcagggattacaggcatgagccaccacacccggccgctccgtgtgttttctgtataaaaattagaatatgaaatctagaggcttttccttttttcctgatctttgtcattactgacctatgaaagagctcaatcacattcatgacttaggatgccccttaggactgtgatttggaagctgtgctccatggagctcctttagggccagctgatggatggatggatggatggat

SEQ ID NO: 560396 - DNA, 202 bp, Homo sapiens
gtcatattccagagagactctgtgaaagtaaagaaggtggtcaaggtgaagaaaccttcagccagattccagatggtattcttaaacaagaaaactcctggagtaaaacccgtttgaaagcagtttgtttggagaagttggcatgggtccttcatcacttaattaggcacatcaagagaatcacactggccgtgacccaatt

SEQ ID NO: 560397 - DNA, 275 bp, Homo sapiens
gtgactcggattgatgtcggaaaggtatagcagggagagcggtattgagactagactataggcggcgagggcgaagctgagaggagagttaggaagctatggcaaaaacccaggtgagagtaggtggcagcttagtgcagggaggtagtgacgcagacgatgctgaagtctgatgcgggatgtctcgcgaaagggcacgcccccaggatgagctgatcatcaaaggtgaggaatgggagaacgaagcacatccaccgcggatgagactacatgct

SEQ ID NO: 560398 - DNA, 135 bp, Homo sapiens
tatgtgaacagtgaggtggtgagataataaatactgtgagggtgaaggaacactcccccaagctggagagagtatgtggcagcaatgtacagaggctctgggagtaagagttcagtgcacaggtgaggtgggttc

SEQ ID NO: 560399 - DNA, 672 bp, Homo sapiens
  misc_feature (139)..(139): n is a, c, g, or t
  misc_feature (374)..(374): n is a, c, g, or t
  misc_feature (497)..(498): n is a, c, g, or t
  misc_feature (652)..(652): n is a, c, g, or t
gggggggggggagaaaaaaatgtgggacagccccccccccccccacggggggggatagaaaaccccccccccccccctcaaaaaagaaaaaaaaaataaaaaattttcttttttgtttgtgtcccccccacacaaaaancccccctctcccttcccctctacacacaccaaagtagaggggggcggcgcgcggttggggtgaaaaaaaaaaaaaaaaaaaaaataaaacccatcgcgcccccccttttttttttttataagagaggggaaagggggggccccccgcggggaagggtgtctctcccccaaaccacccctcttttgggggagaggggagggggggggggaataaattaaacacacctttttttttngcggggagaaaaaaacaaaaaaaaaacaagcgttttttctcacccccccttttttttttcttcccccccgtaagaaaaaaactcttttgtgttttttgaaaaaaaaaccccgttttttccctnnttttttgaaaaaaaacgcgcccaattggttctcccccccctccaaaaaaaaaccaagatgggggttggggggctttttttctaaaagggttttttcccttgccccccttaaacgggggcccacccaagcccttgttctttttctttgcccaaanaaaataatggcctggttttt

SEQ ID NO: 560400 - DNA, 469 bp, Homo sapiens
caattgacggttctcttcgcatcttgtgcattctctcggagtgggctttcccacataaattacatcccaagtcattgtgtttgtcatgccttgcactttgtatctagcagcaagttccttgcaagaagttactaaatgggcccaatattttcaatttactcccctcctcagcttcatgaacacagtcctgctggtgtaagccacgggtttccttgatagagctcaaggtgacgttagtaaactgtgggtcatcgtcattctccagggtcacaatgggactggagctgctcgtgaccacaaggtccaagatgtccccattgctgacggacagcgttggtggccagctctgtcccaagactgggcacgctgcagacggagacatcatcgctgcgggtcatggctttggaggtcgggctatagagctttaccgagtcataagccttactgtgaaacgtggcggatttgtgca

SEQ ID NO: 560401 - DNA, 190 bp, Homo sapiens
gaatagattacatttccaggtcatcccaggcttggtcatcatcatctctcacagatcccaacacaacccaggctgtggccatgtcctgacctagggtgggatccatggatttactggaaggactggcagtgcccttctttccaatgttgttctattggagaccagtagcattgctggagagggccgcgcg

SEQ ID NO: 560402 - DNA, 156 bp, Homo sapiens
aacttctaagcgagagcgcttatgctgcctccatagttccactcggctctttgcacatgcgtctcccagctgtctcctgaacagggaagctcaggcattgagtatgctggagacagacacattcaaattgcactgctaccagacaagaaccacacg

SEQ ID NO: 560403 - DNA, 969 bp, Homo sapiens
  misc_feature (702)..(702): n is a, c, g, or t
tcaccttctcgtgccttttggagtgcccactggttgcctctccccccttggagccccttgggggaattatttttccccctgtgccgcagagtgggcgcaagacctcccagcggtctgttgtttttttacgccgtggggcccacctctcccggtgttctttccccgcctgtgttgtgccacggacggccgcccgttggttgcacacatttcctgtgtaggggatctcttcctgtggcacacaatgttccgaacctattctccagctcgcggccctccctgcggcacgcagatggacccagcacacagattgtggtgtgatcacactggggagttttggcgcgctcgctctccctctggcgggttgtttttcttctctagggcaggcagttgttttagagcaccccacacgaggagcctttcttgtggggcgccgcggacgacacgaagaaccccgtcgcgggggacccaccttgaccaggcattgtgggtagcgcctcgcttgacctcgctcgggactcaattatgagaccgctctcgtgtgggtagcctctcttcttctgtgccccacaaggttgccccgcgttttttttcgggtattccccggagaccccccttcacaatgattcttttccacgcggctggctgtaggagaaactatgggtgacacttgaggagaagctctatgctataaatgagctggtnaagaaattgggaggccgtgatgacccccacattgtgaggcttctccccccccccccgcaaaatgatgctcctctgttatataaggcttccgcttataggcctttattgaggaaagtatttcttttcctccttgaggggaagaggaaaacccaaaccgtgtgcccgaataccttttagggacacctttcccaattccgagaagggggccctgggaccctttactttttgatcaagtgggggaaacaaaaatttttttgtgtttcttta

SEQ ID NO: 560404 - DNA, 555 bp, Homo sapiens
  misc_feature (3)..(3): n is a, c, g, or t
  misc_feature (78)..(78): n is a, c, g, or t
  misc_feature (107)..(107): n is a, c, g, or t
  misc_feature (137)..(137): n is a, c, g, or t
  misc_feature (152)..(152): n is a, c, g, or t
  misc_feature (159)..(159): n is a, c, g, or t
  misc_feature (182)..(182): n is a, c, g, or t
  misc_feature (189)..(189): n is a, c, g, or t
  misc_feature (191)..(191): n is a, c, g, or t
  misc_feature (211)..(211): n is a, c, g, or t
  misc_feature (238)..(238): n is a, c, g, or t
  misc_feature (260)..(260): n is a, c, g, or t
  misc_feature (264)..(266): n is a, c, g, or t
  misc_feature (268)..(268): n is a, c, g, or t
  misc_feature (438)..(438): n is a, c, g, or t
  misc_feature (458)..(458): n is a, c, g, or t
  misc_feature (524)..(524): n is a, c, g, or t
atnccaattttttttcgctcccacttctgctgctgtctcttccacatcctcacatagaccccagagccggtggccccngggtgggcatcgtattgctggtagagcangtcataggtctcgtctttgacgtcacagangcgatacaccaaatngcctggncggtcattgtcataaccagagangtgttgncngccccctggcagctgctttncaggagggctcaccccaatcttcatanattttctcttgtggggcttttngagnnncnggagggcataatcataatccatgccgatgtcattggcattgcccttgatccaacccttgggcacatgggtgcgtttcacccggatccactgaaatttcatctgctcgggcatggctgaagtggagtcgttggcccctcgaccaccatctttaaacttgggctttaggagnccactcgagcttctgggttnctttcacataggtttttccatcgtgtatgcagtgggcagctgtaaagacatgcttctctgccaccngggtgccggtgcagccgtggataacttcact

SEQ ID NO: 560405 - DNA, 257 bp, Homo sapiens
  misc_feature (29)..(29): n is a, c, g, or t
  misc_feature (80)..(80): n is a, c, g, or t
  misc_feature (106)..(107): n is a, c, g, or t
  misc_feature (118)..(118): n is a, c, g, or t
  misc_feature (140)..(140): n is a, c, g, or t
  misc_feature (163)..(164): n is a, c, g, or t
  misc_feature (208)..(208): n is a, c, g, or t
ggttcattctacggtgtgagtctcacagnagtgagagcaacaacaggtgttgcttgctcacaattgccatcctctgtttngccttctgaggtgattggggccacanntggtgcctgtncatggacccctagtggtggaangccatgcccacctccggagtcannataactatcgtgtttgtccccatcacttgtagaatgtgacaganacatcctatcctgcttagcccaccacgaagcgtacgacataaccgcggt

SEQ ID NO: 560406 - DNA, 196 bp, Homo sapiens
gtagagacagggtctcactatgttgcccaggctggtcttgaatacttggtctcaagcagtcctcctaccttagcctctcaaagtgctgggattgacaggcatgagccactgtgcccagcctgttttggtgtttatgtttcctagactatgaatgtttccaagtagaaattcttcttcccccttctgtcgtcttctc

SEQ ID NO: 560407 - DNA, 751 bp, Homo sapiens
  misc_feature (327)..(327): n is a, c, g, or t
  misc_feature (333)..(333): n is a, c, g, or t
  misc_feature (358)..(358): n is a, c, g, or t
  misc_feature (415)..(415): n is a, c, g, or t
  misc_feature (442)..(442): n is a, c, g, or t
  misc_feature (751)..(751): n is a, c, g, or t
gtctctctcgggtggagtcttctgacagctggtgcgcctgcccgggaacatcctcctggactcaatcatggcttgtggtctggtcgccagcaacctgaatctcaaacctggagagtgccttcgagtgcgaggcgaggtggctcctgacgctaagagcttcgtgctgaacctgggcaaagacagcaacaacctgtgcctgcacttcaaccctcgcgttcaacgcccacgggacgccaacaccatcgtgtgcaacagcaaggacggcggggcctgggggaccgagcagcgggaggctgtcttgtcccttccagcctggaagtgttgcangaggtngtgcatcaccttcgaccaggccaancctgaccgtcaagctgccagatggatacgaattcaagttccccaaacgactcaaacntggaggccatcaactacatggcagctngacggtgacttcaagatcaaatgtgtggccttgtgactgaaatcagccagcccatggccccaataaaggcagctgcctctgctccctctgaaaaaaaaaaaaaaaaaaaattcgaaggcacttataatatagaggtatgcagaaaacaaaggggttattggaaaattgggccaattgggacttaaagtgagtccctagacccaatgtattcttggcccaaagagtgggaaaatctggccgggtctccgtatgagtggagtggacttaattccatatagccaggtgtaccatgatattagaatggaaaan

SEQ ID NO: 560408 - DNA, 460 bp, Homo sapiens
  misc_feature (73)..(73): n is a, c, g, or t
aaggcctctctctccccccccgcccctcccacggggccttggggcccagagtggccccagttttattttcccntggtggttgtgggccctttccttccccagggttccagttttttgccgtttttgaaaggaagggttttggctgcccccccccccttaaaggcaaaggtggagggtggggggcccttaataaggaatcagggccatgcctgcccccctccttttttttaaaaccccccctagttttcctgaagggaccttcctttgtttccaggggtagcctcccttaggagcccggccggggcgaatcccccccccgttaaaaatgtccctttgggggccccccctgtttttttgtgtggtgaaccaaaatggaactggggggggtggaaagcccggggccccccccccccccccggccccttttatatattaaaataaaaatgggtttttgggttga

SEQ ID NO: 560409 - DNA, 240 bp, Homo sapiens
  misc_feature (73)..(73): n is a, c, g, or t
  misc_feature (133)..(133): n is a, c, g, or t
  misc_feature (223)..(223): n is a, c, g, or t
cacacactcctctctactgacattctgaaatctatgtgagtcagctcggacacacaatctcttattgtagagntggtctcactatgttgccaggctggtctcaaatcctggtctcagaaatcctctgctcagncttctagagtgctgggattacaggcgtgagttactgtgcgtgctcacggtgcctgggccgggttccttttctgccagcttggaaggcaancccatgactgaatgtta

SEQ ID NO: 560410 - DNA, 766 bp, Homo sapiens
cggaaaaggttactggcgcttaatacctcgggagaatggcgtcaaccatgatccgaagtcaagttcgacggcacccacatcacgtggaagcccctacaagatccgagtaggagagcctgggcatggaggggacccaggcttggtgtctgcttacggagcaggtctggaagggggagtcacagggaacccagctgagcttgtagtgaacacgagcaatgcgggagctggtgccctgttggagaccattgactgcccctccaaggtgaagatgggttgccaggagtgccctgagggctaccgcgttcactatacccccatggcacctggcagctacctcatctccatcaagtacggtggccctaacacattgggggcagcccattcaaggccaaagtcacaggcccccgtctcgtcagcaaacacagcctcaacgagaaatcatcagtgtaagtagactctcctgacaagggccactgtgccccccagcatggggccccgggtcctgggcctgctggcgccagcaaggtggtggcaatggcctggggctgaacaggcctacgtagggcagaagagcacttcacagtaacggagcatgcatgcacaacatgtggtggtgggggtctggccaggaccctgtgagagactggtgaagcctggcggccgtcaaggttctactctcagcaagggagacctgtggtccgccatagtctgctacgcacggaaaaccacgacagaaaaagaaacaaaaaaaaagggatggcagaag

SEQ ID NO: 560411 - DNA, 380 bp, Homo sapiens
  misc_feature (94)..(94): n is a, c, g, or t
gaccacaccgagttctttcgcacacggtcatcttaacctatcaagagaaagcaaaaaggttccaagaggtcggaggggagaggagggggagagncgactcagaaagtggaatctgtaaaagcaacctagaggagaagaaggaaaaccctgaatcgttataactacaccccatttcgttttgcttttggttgcctgaatgttgtcaccaagtgaaaaaattatttaactatatgtaaaatttctcttttaaaaaaaagttttactgatgttaaacgttctcagtgccaatgtcagactgtgctcctccctctcctgaacctctaccctcaccctgagctgtcttgttgaaaacagtaataaaaacattactttacattgta

SEQ ID NO: 560412 - DNA, 2736 bp, Homo sapiens
  misc_feature (47)..(47): n is a, c, g, or t
  misc_feature (119)..(119): n is a, c, g, or t
gagagacagagagagttagaggaaagaagagagagcgagcacgaggnaggggggcgggggagagaagcagggggagagcggggcgagaaagaggtcggaggggagaggagggggagagncgactcagaaagtggaatctgtaaaagcaacctagaggagaagaaggaaaaccctgaatcgttataactacaccccagatgcaacgcaagcaacgacttcgtcacactaaaacggattttgtgagggccaaaagtataaattacgaagcagaaatgattatcaaacaacttccagcggtttgcacctaaagaaacacaaggagaacccactacaaacaaacaaacccagtccaaacaacgcctccagtaggaaaagaggaaaactgcgataacacgaccccccgagaagagacgagaccaacacgctgagactgtggggcgtcagcaaacctccaagtgcacggcggactgagttgtacttcgcagctctctggacattaattacctcctgcaccttccatttgggggagggtgaggaagaaggcactcacctacactgagcgaagaagtcctatcagcgtggaagagaagtttaagaatgaaccactgaatgtttcgcttttatttttaaatttactttggcacttaaaaaacctcatttccagatttctggacaatctcggctgcagacatctaagcctaaccttttggtatcctgagttttttccctctccttctccttcctcacgcccaccccgcttctctcgcacacggtcatctttacatatcaagagaaagcaaaaaggttccaagaggtacttttctttttagaaaatcaccttttctcccctaattcttctgcagaagaaaagaggtttcgaaagagggaaaaggaaaaaacaagccggctacggtatcagccggtcagcccaggtggaaaacgagagtgaaagtagggcttaacggggagcgcaccgcctctttcgaaagccgctgggccaccaccagtgcgtgagccttggatccctcaacgtattgcgagacgccggtgtatagcccggacctgtgccccaacatgatcgccgctcaggccaagctggtttaccagctcaataagtactacactgagcgctgtcaggcgcgcaaggcggccatcgccaaaaccatccgagaggtctgtaaggtggtctcggacgtgctcaaggaagtggaggtgcaggagcctcgcttcatcagctccttgagcgagatcgatgcccgctacgaggggctcgaggtcatttcgcccaccgaatttgaggtggtgctctacctaaaccagatgggcgtcttcaacttcgtggacgacggctcgctgcccggctgcgcagtgctcaaactgagcgatgggcggaagcggagcatgtctctctgggtcgagttcatcacggcgtcgggctatctctcagcgcgtaagatccgctcgcgtttccagacgctggtggcccaggcggtggacaagtgcagctatcgggatgtggtcaagatgatcgcggacaccagcgaggtcaagttgcgcatcagggagcgctatgtggtgcaaatcactccggcgttcaagtgcaccgggatctggcctcgcagcgcggcacagtggcctatgccccacatcccttggcccggccccaatcgggtggccgaggtcaaggccgaagggttcaacttgctctcgaaggagtgctactcgctgaccggcaagcagagctcggcagagagcgacgcctgggtgctacagttcggggaggcggagaaccgcctgctgatgggcggctgccgaaacaagtgcctctcagtgctgaagactctgcgggaccgccacctggagctacccggccagccgctcaacaactaccacatgaagacgctgctgctgtacgagtgcgagaaacacccacgagaaacggactgggacgagtcgtgcctgggcgaccggctcaacggcatcctgctgcagctcatctcctgcctgcagtgccgccgctgccctcactactttctgcccaacctcgacctctttcagggcaagccccattcggccctggagagcgctgccaagcagacctggaggttggccagggaaattctcaccaatcccaaaagcctggacaaactatagggtgctggggactgcttgaaaagcgacacaaacgggcgtgctctctcagacacacaactcagctataaacagcagaaactctggacacaaacttttatgtaagtcacctgaaataggaatccggcagaagaccttcattaattaagaagcaaacaaaaagagagcaacccaaccaaaacaaatcacattcttgcacaaaagtgatcgttttcttccaaacaatgtgaatttaaaaggtcacacaaaagaagcaatcgggctccgccaccacaaaatgaaacccaaggtacattttcaaatcaatgtatagtagttccccccccttttccttctttccccctatcctttttctctccaccccatcccccccccatttcgttttgcttttggttgcctgaatgttgtcaccaagtgaaaaaattatttaactatatgtaaaatttctcttttaaaaaaaagttttactgatgttaaacgttctcagtgccaatgtcagactgtgctcctccctctcctgaacctctaccctcaccctgagctgtcttgttgaaaacagtaataaaaacattactttacattgta

SEQ ID NO: 560413 - DNA, 318 bp, Homo sapiens
  misc_feature (13)..(13): n is a, c, g, or t
  misc_feature (95)..(95): n is a, c, g, or t
  misc_feature (109)..(109): n is a, c, g, or t
  misc_feature (157)..(157): n is a, c, g, or t
  misc_feature (168)..(168): n is a, c, g, or t
  misc_feature (223)..(224): n is a, c, g, or t
  misc_feature (226)..(229): n is a, c, g, or t
  misc_feature (231)..(232): n is a, c, g, or t
  misc_feature (234)..(238): n is a, c, g, or t
  misc_feature (240)..(240): n is a, c, g, or t
  misc_feature (316)..(316): n is a, c, g, or t
gggcacggggggngaggaccaaggggctgtgaggaataaacaatacaaaggccaattgggggggcggcgagaaaagacggagggatcgcggcaanactttacgacaaanacaaatgcccaagggggcgggggaagcggggcccgggggggccgcggncgggaccagcnggcgggggggggcgaacgggggcgatagggtgcgccgggagaggcgcggaggggnntnnnntnntnnnnnantttttttttttttttttttttttttttttttttttttttttttttttttttttttttttttttttttttttttttntt

SEQ ID NO: 560414 - DNA, 208 bp, Homo sapiens
ttctagagttcacgctcacgcccactagggactcatggtgctgagattacaggcgtgagccaccgcgcccggcaaatcagagttcttctttataaggaattttttttgatgacggagtctcgctctgtcgcccagtgctggagtgcagtggctgcgatctcgtgctcactgcaagactctgcctcccggtgttcatgccatttctcct

SEQ ID NO: 560415 - DNA, 931 bp, Homo sapiens
gcagatttacaagccgccagcgtcaccggcctctactggaagctgcttcccggagcaggctgctgcccccgtggcgcaggtgacccctggggcggggtggctgtgggctggcgctggtggggcgacgcgtaactggtgctgctggctgaaagctgaccggagcacaagctgaagcctgctggtcatcgcggctggtgcctggacccgccagcctgcgccaccacaacaggacaatgttcccggtgcctcctacctgtacagccccgacgcctggtcagcctgcccgctgctgctggggctggttctttgaggaatttcgtcccagggtcaaactgctactgcgccggaagttggcttggagcacgaaagggcgttgcttggtggtgggcacaccgtgcttgccaaggcgcaggttgccatggtatgcccgctttggatatgcgacggatgccccccgtgcggtgcaggcgggacgccctctggtccccctgtgaggctcttgctgacaccgtattggtgctgtgcgggttgtgtccttgtccacggggcagcacgcggggcccttatcccgcagcagtggagcagtcctgttgttgcctgccattcaaacacgcttgtacaagcggcaagctggtgagaactgcagttggtgtccttgcagcagtggattcccgcgggttggacttccagtgcggccagtttactgcctcaagtgtactttctcctatatcttggctggccttcccgtggaaccgaggtcgcacgcggggacgcactagtcacgtctagcatgatggccctgggttgcttcgtcccgcgccgttgagacagtgtggcacccgcaggcctaggaaccgcgagcaaaaggtctacgacctcacaccgtgggctgcaacactctgaccaaagtgccatgctcctaaatcggccc

SEQ ID NO: 560416 - DNA, 124 bp, Homo sapiens
aacttcctcaacctcctgagtagcttgaactacaggcacatgcaaccatgcctggctaattttgtttattttttgtagagatgataagctctcattatataaacgaggctggtcttggactccc

SEQ ID NO: 560417 - DNA, 234 bp, Homo sapiens
aatatctgcagataaatatactgatctaccagatgcatcaggcataatctagagacgaccagtaaaagatgagaagaataacatatgaaaagagtatagcattaaataaactggttacctaagtcaggtctgtaattctacgaggtagacacttaaacatcatctctacacaaaaaggctaacccttgctattcactgaatctgaacgccatttgaaaagctctgtcatacata

SEQ ID NO: 560418 - DNA, 309 bp, Homo sapiens
tgcctgtttccagcccgagcgaacgacagtattgatagtagttcatgtcgctgagatccacatgcatctcgtagcgctagggtttagcggtgtgcgcgcagcgagttgtgactgagatctaccccttgcggggctgtacacctgccgccgccagtgcggcgcacacgcctgtgggcgtctccattcctgtgttgcgcagcgctagattctggattgccgggaacttgtggggacagagagccgccatcagtccgcgttcgcccagtccaggattgtcagacaggtctaggctggtaagggccgggaagg

SEQ ID NO: 560419 - DNA, 528 bp, Homo sapiens
aaattgatgctgcagtcgttctagaggatcccgacgctctctctgtgttgagggcagcaattttattgagacaggtctcactctgtcacccaagctggagtgcagtggcacaataacagctcactgcagccatcaacctcaccaggctcatgcgatcctcccacctcagcctcctgagtcattgggactacaggtgcacaacaccatgcccagctaatatttttatattatagtagagatgaggtcttgctgttgcccaggctggtcctgaacttgaactcaagcaatcctcccaactcagactcccaaagtgctgggattacatggcatgatgccaacacgctcagctcaggacaaaattaaacagcttgtacaatagatgctatttttcaatcctctcaggatttctcagagcctatcatatgtccaacccttgttcgaagcactcatgtctcacacatctcacactccaaggtaccatagtggatgcaaggccccgggtcaggtggtcttatgccctgataccca

SEQ ID NO: 560420 - DNA, 910 bp, Homo sapiens
cctcggctcctcgccatggacgccggacgactcccggtgccccaagggctccttgcggaagttcctggagcacctctccgtgggccggcaaaggccatctggcgtgcttgaccagctggctgtgtggattgcctcaaggtatgaactgctgcctgtccggtgcctgtggttgcagcattgggtatctacgtgtggtggccagatggttgtacttcatcttacagatggtgctaccatgggcattgtgttgtgactggagggctcaaaacattctggcatgagcgcctggacttgggtgaagaatgtggtctcacaggacgattcgctgccaaagggttggagcgacggtgggaaacgggaatcagattttgggcaggtttgctggcggtgttgcccaatggggccatttcgctggcaagcaggcctgggcgaaatggtgccctggcccttgaaagggggcttatcgctttggaaagagccccttgggcattggcagcagacatgggctggggcaaattcaaaggcaaaaaacccctttggtttgttcgttagagtccagcgagcacggtggtatgggaactcgggtgagacatgcgcgacttatcctaaacccgcgtgggtgggtgagacccccaacaaacgcaccggttgacattatccctggtggacatgagcgtctgtttttgggacacggttgggagcaccttttgggctttttaggcccatctgtgagcaggcctttggtcggacccagatcgtgtagaacgctgggtgcgcacccaagtgtattttcgggacactaacaacgcgggtggatgagcggccccctggttggcgccatgcgaaagcgatggttataaccgtgagcccattaaacccacgatttcacaagaagcgggtttggaggctg

SEQ ID NO: 560421 - DNA, 462 bp, Homo sapiens
ctatgatcgggataatacgatacagaatgattctatttgaatctgaatccataaattacacttttattttatcaaatacacaaaattcacagtggtgctgactgtaataaccactatggggaaacatcccgtaaacctgcctgtagccatgccaatgaagtgactgacctggtgacatctgtttgagcatgcttggtgtggctggtagaatgccaccgtagtgcatacacttggtacatcaggggtgaagggagggtttactaaattattgggggcgggtacaattgggatttatttgtagtcccttatatgatggggtgtgggggtatagtcctcagcttatgccctaacataacatgtataaaaacccctgacgtatcgtgtgggtgtgtacgtgtgagtgtgtgtaggtatacgtctggcaataaaagcttggtctcctgaaactaagtgaattcttta

SEQ ID NO: 560422 - DNA, 369 bp, Homo sapiens
acagttaaactacgaatctatcttgtacagtcagctatcaccagtgctcggtaggtctgtcgcctctacctataaatcttcccactattttgctacatagacaggtgtgctcttatagctgttcttaggtagcacgtctggtaacgggggtcttacctttggctctccatgagcagtgatatctagtcaattcattatgcagaaggtataggggttagtccttgatatattatgcatggttataatccttgatctttcccttgcggttctatatagactgctgccaggtgtcaatttctatcagtgataccttacttaggttaatggtatgcctaaggctgtccggtagtaatgtgaagtgggtttgcg

SEQ ID NO: 560423 - DNA, 762 bp, Homo sapiens
acggagtctcgctgtcgcgccaggctggattgcagtggcgagatcccagctccctgcaacctctgcctcccgggttcaagccattctcctgcctcagcctcccgagtagctgggactacaggcgcccaccaccacaccaggttaattttttgtatttttagtaaaaacagcttgttcacccatgtttggttcaggctggtctcggaactccgtggaccttcttgtatccacctgcttgggcctcccaaagttgctgggaattccaggtcgttgagccgccgcacccggctgagttttctgcttctaaaggctgcacagtattacagtgtcaagcacagagtctccactcgagaaattttggaacgaattgaatcaaacaactaaaaaatgtgaattatcgaacagcactgcactttacctgtgtcaggcctcaacattttaaattaacattttcaccatttttactcaccatttgtaagctccattcgtattcgtaccttattggaaaaacccgagtaattaaaagatttaagggagaccgaaataaatgtttttatttacccaaaactgtctttccacaatgtttcaaaccaactttttgtggtaaaaaaaagtggtggggggcccccaaacaaaaaccgcctttaaagagagcgttcacaacttttaatagcccaaaccttttcgctccgcccacagtagggctttttacaaccaccacaaaaacaggaaaggggaggggaggttattatcactccccaa

SEQ ID NO: 560424 - DNA, 787 bp, Homo sapiens
  misc_feature (13)..(13): n is a, c, g, or t
  misc_feature (230)..(230): n is a, c, g, or t
  misc_feature (334)..(334): n is a, c, g, or t
  misc_feature (353)..(353): n is a, c, g, or t
  misc_feature (362)..(362): n is a, c, g, or t
  misc_feature (364)..(364): n is a, c, g, or t
  misc_feature (478)..(478): n is a, c, g, or t
  misc_feature (487)..(487): n is a, c, g, or t
  misc_feature (505)..(505): n is a, c, g, or t
  misc_feature (544)..(544): n is a, c, g, or t
  misc_feature (667)..(667): n is a, c, g, or t
  misc_feature (719)..(719): n is a, c, g, or t
  misc_feature (737)..(737): n is a, c, g, or t
agaaatccaaaanaattagcatcaaatcttgaagtcgtgagtgaagctgcgggttggcttgactgggctcagccactgagctgcctcaaccggccaaggaacgggattatgatgactatgcggacttctatattgtcttcatctcattgtgtgtattatgtatttagtttcaataaagcatttgtaccaatggctctggggcttggagggagactaaaggaatgtgtagngattctgagtaagatgtagacctacgcagcagagctatggggggggagattaacaaagtcctttcttctaatatcagggtagtcatgagttgcagtcccatccnaaagggcattagggcgaanaggcccccngngtctctgaacatatgggattcttgcgccccccgggggggccaaggggcgtgcaaccgggggggtgccgggaatgagcaccatggcacagtcatttctgagccccccatccagcngtggggaanagaggaagcaaaggaggnaggaaaatgcttaatttggcggacaaggggaggggcggngtgagcccgggcggggccagcccctgggggaggcaccacctttcagctccctgaggcgacttgtttcccttcatatcctgtttccatttatgcccttcagttatggtctagaatcaaacaaanctaaacctcagtgtcttatgaagctgacacttcaaaacctgcagaagcaggntgcctttgaagaaaaaanacacaccaagtacaactagagctgtcatagacagtgtaggtttgcagaga

SEQ ID NO: 560425 - DNA, 706 bp, Homo sapiens
  misc_feature (109)..(109): n is a, c, g, or t
tcacggctatgtccacgtgttgggtggatattcccagatgggaaaaattcttactgaatcctgtacgacagggccaggggccactgtcctcaaaaccccacgttgcacnttagaatcccttgggggaggctggatgcggtggcttcatgccttttgggaaggctaagccaggaggattgctggagcccaggaattaaagaccagcctgggcaacatagtgagaccttgtctctacaaaattaaaaattaagtttgagcgtggtggctcatgcctgtaatcccaacactttgggaggccaaggcggatagatcacctgcagtcgggagtttgagatcagcctgagcaacatggagaaatcccgtctctactaaaaacacaaaattagccgggcatggtggtgcatgcctgtaatcccagctactcgggaggctgaggcaggagaatcgcttgaacccgggaggcggaggttgtggtgagctaagatcacgccatcgcactccagcctgggcaacaagagcgaaactctgtctcaaaataaataaataaataaataaaattagttgggtgtggtggtgtgtgcctgtggtcccagctgctctggaggctgaggcaggggcatggcttgagcccaggagttcaaggctgcactgagccgtgatcgcaccactgcactctagtctgagcaacagagtgaggcccttgctc

SEQ ID NO: 560426 - DNA, 1087 bp, Homo sapiens
  misc_feature (345)..(345): n is a, c, g, or t
aacgggtgatgcggttggggctgagcctcatgcgcctggaccgcttccgagattccatcctacgctccgatgaggctgtgaagccattcgggctgaaggtgtcacagctgctgctgagcacagacgagagcacctttgatgacatcgtccattcgtttgtgagcctgactgccatccagataggcctcatagacctgctgagctgcatggggctgaggccagatggcatcgtcggccactccctgggggaggtggcctgtggttacgccgacggctgcctgtcccaggaggaggccgtcctcgctgcctactggaggggacagtgcatcaaagaagcccatctcncgccgggcgccatggcagccgtgggcttgtcctggaggagtgtaaacagcgctgccccccgggcgtggtgcccgcctgccacaactccaaggacacagtcaccatctcgggacctcaggccccggtgtttgagttcgtggagcagctgaggaaggagggtgtgtttgccaaggaggtgcggaccggcggtatggccttccactcctacttcatggaggccatcgcacccccactgctgcaggagctcaagaaggtgatccgggagccgaagccacgttcagcccgctggctcagcacctctatccccgaggcccagtggcacagcagcctggcacgcacgtcctccgccgagtacaatgtcaacaacctggtgagccctgtgctgttccaggaggccctgtggcacgtgcctgagcacgcggtggtgctggagatcgcgccccacgccctgctgcaggctgtcctgaagcgtggcctgaagccgagctgcaccatcatccccctgatgaagaaggatcacagggacaacctggagttcttcctggccggcatcggcaggctgcacctctcaggcatcgacgccaaccccaatgccttgttcccacctgtggagttcccagctccccgaggaactcccctcatctccccactcatcaagtgggaccacagcctggcctgggacgtgccggccgccgaggacttccccaacggttcaggttccccctcaaccgcatcacccgtt

SEQ ID NO: 560427 - DNA, 745 bp, Homo sapiens
ttcggcggtgtggtggctcgggtggctgctgctggtgagtgctggtgtgtgagaggctcgcacgcctccagcccggccccggccccccggtgagtggatgagccgagcagccccgtgctctggtgctacggactatgggcgaatagctctgaccacccggcgaagagctgagaatgaagctggagagcatcagacatgaggagcagggtgaaacgtctggacatgggccaaggctctaggaagtgggatttctgtgaaataatgcaaatgagagctggaccattcatccttgctctctgtgccgtaggtccccgtctggtgcaattcacctggtgccaagcatagtgcagtgtattggcgagtgaaagatggcacggatgacttctatcagctgaagatcctgaccctggaggagaggggggaccacggcataagagccaggaagagcggcagggcaagatgctgctgcacaccgagatactcacatgctgtcactcctgcacacgcaggatggcgtggtgcaccaccacgtgctcttccaggaccgacctgtgaaaatcgtagaggacaacatgaatccagccggatggttaagaagatgaagaagcgcatctgcctcagtacaggacctggctactgtgcatcatgacttcagcgatagaccgctgactcatcacctgagactacgtaacaggagaagagcacagagaggagactgtgatcaaaaaaagacaggaatgagccc

SEQ ID NO: 560428 - DNA, 195 bp, Homo sapiens
cgttgagggtccccccatcttgctgtgcatgcagccagtgcttccggttttaaatggggtttggggagtgactacgcccaccagcttcggaggtgaagcatgactattttcttggctcaccaccatgaaatctgaatttatgtacaacgaggacaaacttgttgtgacgactccaccctattatcaaccagccca

SEQ ID NO: 560429 - DNA, 212 bp, Homo sapiens
tcggtaccgattcgatatggcgcagtctttatcgacgcgcggcggtaagtttcgattgaccgcaagctgggcggtaagcggttgttccttgctgtacgggctgctgtcgatcagatcgaccgcaccgctggccaacacgcccggtgcggcgctttccgccggcgcgcgcgccttcagcaccgacaccacctgtttacgccaggcgacggcca

SEQ ID NO: 560430 - DNA, 927 bp, Homo sapiens
gtctcggcgctagggtgcgtcttagggagtagctctgtcgcactgtgatagagcgatagaacgtaaggcctgattcgaggatcgcatcctcaataggcaatacgtcgaggtcttgtgtaccaattgtcaactcgcaaggattggtgatcaatcgtggatccggcgcaagttgctcttgttgcacttcttaatctagggcacgtcgagctagtcggcgtgcaccaactgaatgcagcgtgctgaatccgctggcggcataatcctgcggtaataggcgcttgctgtgtaggccaccatcttttcgtgctaacgtgtggaagtaatcgtacattgactcgattgagctcgtggcgcacgacacaactattactggatatacgacattactcagtcgttgataaacttagacacgttagcaggcccacgtgagcttcgcaacatagtacagttagacagcatcatgaacaaatgtggagccactaatgtggagtgtctatttacacaaatgcagaagagttcgggtacgccgattcataaggacccccaatagtctaggctcgtaatataggacaaaacggtgtcaccaggtaaccaatcattgtgataaacaatatggtgacacagaattgaagatctcgcaagtatgatttatcaatcagatatatgtccccgtattcaatggcacatttaattttatcgccctcttaacatgtgttatatgtgcgatttggtgtactacgacataccacgcgatgaaaacacaaccatttgacaactaagtttagaaccaacacagtgtgcttatcggccgaaaagtgtaccagcaagaacagcaactacacaacgagggcgccgccagagatatagaaaacctaggaaggcaacactgcccaacaaagcaagatatatacgactaagtggaaaccc

SEQ ID NO: 560431 - DNA, 365 bp, Homo sapiens
  misc_feature (25)..(25): n is a, c, g, or t
  misc_feature (32)..(32): n is a, c, g, or t
  misc_feature (133)..(133): n is a, c, g, or t
  misc_feature (152)..(152): n is a, c, g, or t
  misc_feature (190)..(190): n is a, c, g, or t
  misc_feature (335)..(335): n is a, c, g, or t
  misc_feature (357)..(357): n is a, c, g, or t
tgagacgcagctatgccctgtcaancaggcangaaccgcaatggtgcgatctcggcctcactgcaaactctgcctctcctggttcaagcgattcccctgcctcagcctcctgagtagctgggattacaggctnctaccaccacgcctggttnattttattttgtgtgtgtatttttagtagagacagggnttcaccatgttgcccagtctggtctcgaactcctgacctcaggtgatctgcccaccttggcctcccaaagtgctgggattacaggcatggagccactatgcccagcccactttgttccttgcaattttctttccttgcttctttnattttggaatccccagttttanatccattt

SEQ ID NO: 560432 - DNA, 220 bp, Homo sapiens
aggcagactctcgcttcctttctgctagggcctctgaggagtcgtgggggccaatgacgctgtgtgccttagttctacaggtgtctgacttccggctagccgtctgctggcctgtgccggggttggaagctgagcgcgtggtggagttatcctgttgtcacgtgatccctccacacaagcatcctgccccttgtcatctggataggggtctccaaccagc

SEQ ID NO: 560433 - DNA, 150 bp, Homo sapiens
gcagctcgggcagatcgtcatggtgctgatcgtgacggccgtcatggcgcaaatcccgccgcgcgtgtacgaaagctgggcgccctatctgtatattttctgcgtgattttgctgatcctggtagacgccttcgggcagatcagtaaagg

SEQ ID NO: 560434 - DNA, 925 bp, Homo sapiens
cgacaacgtgtcgcctatctattcttgtcgcactcctccacatagttgtccccgctgggtaggatctcaggtgttttgggcaaccctcaatatattggcgcccccaggtgaatggaagccggaggattttttagttttaggacgcagtatgtgttggttcttcagccggttataaccggggataaccctgatttttggaaccagggtccccctcgcgcagactgtctcaaaccccccggctcaaccaatgtgccgcctgcaagtcgcacaagtgctggggtccagatcataatcccccacgcccatccacgcgtgtacgtttaacttataagtctgtggaacagaattgctgcgtccggtcacacacaggcgccgggtatggtgggctcacaacaaaagccagcacttttggggagaaccaaggccagggcagatcacctgaggtcacggagactcgagaaccaatcctgggctcaacgcgggtgaaccccatctcgtaactaaaaagaccagcaaatgtaggcccgggcataatcggcgggcgccgaagtgcccagttactccaggagggctgaggccaagggaggaaatcgcttagaaccccggagaagctggaaggatcagcagttgagccaagaattccggccaatactggctcacactatgagcaatctgggtgaattcacaagtaaagcggtactatatcagcttctcttatactaatcactggaatctggctctcgtaaaaattgaaacttattctttctaaatgctgtaaagctataaaattacggcccggcattggtggctcaccgcactataattccagcacctttgggaggctgaggcaacggaggatcaaccttgaacaccacagagatgtcgaccccgtcttggacaccatagggagaccccgtttatacca

SEQ ID NO: 560435 - DNA, 118 bp, Homo sapiens
gaggctggtggcgagggagttgtggaggataacaagaagaaaacaagtctatcactaatgacttattttacttagtttccattcacgaaacccttttaaatacaaggcaacattttca

SEQ ID NO: 560436 - DNA, 459 bp, Homo sapiens
ccttgggtgcatgcatgtgggtgtggtggtgtgtttctcagtgctggaagggggttgagtcctggactggaggagggagtggtttggagctggtgactgtgggtgtggtggccgtggtggtcagactttgggagggggagctgttctcagggtggaggtcggcggtggcgtggatccagtggacgcagtcgtagtggctgttgtggtcggctttgtgaggatccaggtcgtccccggagttgaggagggcgtggccgtggagctggtggctgggtgtactggggcagtggctgtagtcgtcacagcaaagcacacgcacgttgtagttgaagcacatgttgaacctgcctgtctggtcttcggtcttgcaggtcagccccgtctccaggctgcaggtcagcacctgcccgaacctggtccgatgcgtaacctcgggggtagttctcccgccggcactct

SEQ ID NO: 560437 - DNA, 250 bp, Homo sapiens
cttttctgcctgctcctgcttaaacacaagaagggatcctggattttgccctctccttagctcttagtctctttgggtaggagttttgtttccagaggagctctccccctttggatttgaacttgctctctttggttgttgttgttcttccctcttcctcctccctacctccactaaaggggtgccaaatatcctggttctgtttctaccttgttgtgtctctatctcgtctatactcccatctgttgtg

SEQ ID NO: 560438 - DNA, 514 bp, Homo sapiens
cgtgtatgcatatgagaatatgagaatctcgctttgaatatattaactccaactgtagtccttctaatttagatgctttgggtgtctagactttatctggatcatttgtcactctcaaattagactttattatttccattttatgcagttaacattggtttaccacaagttggccattttatttgctcagtattccttttggtcacattagatcttccttctcagagccttccctcctttctaaggcacatcttttagtaatgcctttcataagtagctatgggtattgaactcagtttctgtttattgaaaatgtctttattttctatggttttaacagtatctcttactggataacatttcaaggccaatagttattttttatgttttcctcagcatttttaatatatttttattttcattggactttctttgtagtggtagagaagtcagctgacagtctaattgtacttccttggtaattaatctctctctcccacttcctgccctcttt

SEQ ID NO: 560439 - DNA, 380 bp, Homo sapiens
catcccatgcgcgacgcttccatcaatagtcattcagagtcctatatatccagcaacgcagggcagcatgggcagcatcaacgatccatcaaatctcttctgcattggctccaaatctcttttcggaggggccggctgtcagatgatccctccaaagcgtccatctgacagcactcccgccgactacatctggaacatcaattcgagagctcgcctgaaggtttcaattacataaaaggcaatgggcacattaggacccgagagtctggagcttcacaagcgctgctcacaccccctctcctgtacacaaagcctctagaattgggtaggcagtcattggcaaagggactcatttggatggaagcgtcgcgcatggggct

SEQ ID NO: 560440 - DNA, 1354 bp, Homo sapiens
  misc_feature (995)..(995): n is a, c, g, or t
ctcgtctctcatgttcagctactcatcttgtttcgtgcggtactgtcttttgttgttgtcgtgtcgtgcaccagtgtgttttgtgttcgtcgcctgagagtctgctgctcttttcttcacccatttttctgccccccggcggtttttacacgtcgtggtgatcgtcctgggggatgttgggcccggggggggctctctttgttggaagttgttccgtctatgtcgccgttcttacatgtggttggtggcgccccccaagaggtgaggtgttttggtccccccccaggctgcttccaacaacccctgtgggtgttaatggagtgagtcctcctcgtgtgggatgactgtgggagggcccccacctgaatcacctccggggggggccacgccccctgtatgttcccaagcctgcccccttttgtgagggtgttttcgtggggtagttccccgtcgccgcgttttgtgccgtcgtgtttgttgtggaatctttctttaggccacccctgtatgggccccccccccgaagattgatcgtggcgtggaacccacaccgatatgttgcaatccggcgtctctttgggcacccctaaaatatgtgtgggccacacgccacgtgcccacatttctccacttcgcctcttttttggttgtaagaagttcacggttcacacgctgttgttaacaagagtttctcacctttgttcacgcttcgtatgacccgaggcgaaatctggggacacaccgccacaataggaggataatctctctgggccaccacacttggcaccccctcggttttcccccagtcgctctggggtgccacgtgtgttcacaccccccacagagttggtaaaaggaggtcttctatgaggaccctctcacccacggccccctcgggaattggttcaccctccacactctctttctatgtgaccacgagaatttcctcgcctggggatcctctcttgaagggccacagccacgaaccctctgtntttccacgcctcgcgaactcgtgaacactcccacctgccacgcccgttaggagctcgttctgtggacccgtggaggcccgaggatgactcgggctctcttgtggctcccttcccggccctccccatccctctgggcctcgccccacgaggaatcttgggcttcttttatttacgcacccctgaatgtgactgataccagctagcccattccccttgtgcgaatgactccagtttattaatgctcttgctaaagatggcttcttttgcgttgcccagccagcccttaacaccagtatttccattaaaactggcttaattattttgagaagacggccccatttaaagctatacactcccca

SEQ ID NO: 560441 - DNA, 151 bp, Homo sapiens
acagcacagaggaggtggacagcacagggagccagaggccgtgggtgtatgtgtctgagggcgatcgtgggactctgctgctccagtgcctgggtgctcaaggggctggtcaatggaaaagtcatgtgggtgggcccctcctctgtgctgt

SEQ ID NO: 560442 - DNA, 866 bp, Homo sapiens
  misc_feature (20)..(20): n is a, c, g, or t
  misc_feature (63)..(63): n is a, c, g, or t
  misc_feature (79)..(79): n is a, c, g, or t
  misc_feature (83)..(83): n is a, c, g, or t
  misc_feature (96)..(96): n is a, c, g, or t
  misc_feature (98)..(98): n is a, c, g, or t
  misc_feature (103)..(103): n is a, c, g, or t
  misc_feature (108)..(108): n is a, c, g, or t
  misc_feature (113)..(113): n is a, c, g, or t
  misc_feature (130)..(130): n is a, c, g, or t
  misc_feature (135)..(135): n is a, c, g, or t
  misc_feature (146)..(146): n is a, c, g, or t
  misc_feature (154)..(154): n is a, c, g, or t
  misc_feature (157)..(157): n is a, c, g, or t
  misc_feature (166)..(166): n is a, c, g, or t
  misc_feature (194)..(194): n is a, c, g, or t
  misc_feature (239)..(239): n is a, c, g, or t
  misc_feature (284)..(284): n is a, c, g, or t
  misc_feature (286)..(286): n is a, c, g, or t
  misc_feature (542)..(542): n is a, c, g, or t
  misc_feature (546)..(546): n is a, c, g, or t
  misc_feature (550)..(550): n is a, c, g, or t
  misc_feature (558)..(558): n is a, c, g, or t
  misc_feature (582)..(582): n is a, c, g, or t
  misc_feature (662)..(662): n is a, c, g, or t
  misc_feature (667)..(667): n is a, c, g, or t
  misc_feature (685)..(685): n is a, c, g, or t
  misc_feature (705)..(705): n is a, c, g, or t
  misc_feature (708)..(708): n is a, c, g, or t
  misc_feature (711)..(711): n is a, c, g, or t
  misc_feature (717)..(717): n is a, c, g, or t
  misc_feature (724)..(724): n is a, c, g, or t
  misc_feature (731)..(731): n is a, c, g, or t
  misc_feature (734)..(734): n is a, c, g, or t
  misc_feature (740)..(740): n is a, c, g, or t
  misc_feature (840)..(840): n is a, c, g, or t
atggagagtgccaagatcancatcaggtgccgcttccttcctgtggctttccatcttccagtnagcctggtcttttgcnttgntgggccccaaaanancagcnctggntattntcttcatcccaaaagcngagangatgggcaggnaagatcanggngggtgtcanagagaggttcccatcaggttcacagggngcccgctgtacctcttggagatgtcagcttcaatcagcttctgcngctccttggtcttctccagtagcaggtccagcttaggctccagancngcctgctcctcaagtgcctcctgctgcttctgcaccatcagctctttcttcaaagccagcagctgggactgcttcagcttttgctggaggaattcagtcactcggtccacataccttggtgaggccaggatcataaacaggtgttgcagctgaagactggtaagcttgccaatcagatcctccagcactgacaccatggtaaccatcttctctttggtctggccctgcaggatggctggagccagctggaactggntcanaganaggacatntgcctcctcactcaactccactgntctctgggctaagaagatctcaagctcccatgagctcatcaaggaactgattccgggtctcagtgtattcaagcagtgtnagggnatctgggccctggaaaancttctggagcctggggttcntgnttncaagantgtgatntgaaagnaanagcatngtctccccagtctatcccatcacctccaggatctttgaatctgattccgggaagatgcccagtcgattcagcagcctcggcagagatgccagagtcagtnccctcagaaatggctctaccctaaag

SEQ ID NO: 560443 - DNA, 247 bp, Homo sapiens
  misc_feature (17)..(17): n is a, c, g, or t
  misc_feature (228)..(228): n is a, c, g, or t
  misc_feature (239)..(239): n is a, c, g, or t
  misc_feature (247)..(247): n is a, c, g, or t
atcaaatctgagatacncaaaatctcagagcagctatattctcgatgtgcaaagtacggacatatattcgacatctttggggcagagtgcacatgtccttttttccatcttttctgcaactgaaagacaccggtgggaaggaggaccctctgcgcgggccgggctccgggctgtggcgccgagcacctctcggccggggcgcgacgcctggccatgactgtgctgcangcgctcgtccnattcctgn

SEQ ID NO: 560444 - DNA, 120 bp, Homo sapiens
catcatcatcatggatttgctggtgcagtacaactaggcttaatagggacatggctcagaggggactactgtacacaaaaccatacactcatcataattcaaagacaatatccaaatttc

SEQ ID NO: 560445 - DNA, 125 bp, Homo sapiens
actctagaggcatccccgattaagaatagatgcacaatcagattgtgagaattttaagactaaatatttaaaattacaaattgttcataataggattaagacttatagttcctaaataaatctaa

SEQ ID NO: 560446 - DNA, 504 bp, Homo sapiens
  misc_feature (36)..(36): n is a, c, g, or t
  misc_feature (81)..(81): n is a, c, g, or t
  misc_feature (184)..(184): n is a, c, g, or t
  misc_feature (246)..(246): n is a, c, g, or t
  misc_feature (456)..(456): n is a, c, g, or t
tggggtgtctggcaagatggactcaacggtctcctngccattggcccctgtctcgcgtcgactggtgatgctggtctgtgnccccccgcctcctgactcctggtcccctgtcctccagcgctggttcgattcagcttctgcccatgcactcaagagaaggtcacgatggtggcgctactaccgngctgatgatgcccaatgtggtcgtgaccgtgacctcgatgtggacaccaccctcaagagccntgagcagcagatcgagaacatccggagcccagaggacagccgcaagaaccccgccggcacctgccgtgacctcaagatgtgccactctgactggaagagtggagagtactggattgaccccaaccaaggctgcaagctggatgccatcaaagtcttctgcaacatggagactggtgagacctgcgtgtaccccactcagcccagtgtgcnccagaagaactggtacatcagcaagaaccccaaggacaagaggcatgt

SEQ ID NO: 560447 - DNA, 351 bp, Homo sapiens
tgttaaggcggtaaactgtgtaatgtgatcactactttcttgtctttttaaaacatgtttatctatccttttaactgtttagctagctccttcaccattctgttttacttttaaaattcatcttttctaaaatctaaaaagagtcctactgcaatgttttggaattttgttaatttcacagatccttctgagactggcatcttatgttcagtcttccagtctatgagcgtgctgtgtgccgtctctccacatacatagtctttttagcatacagatcctgttttgtcttgttagatttatacctctctctctctctcaggagctactgtgtttttaacttcagtttccaat

SEQ ID NO: 560448 - DNA, 115 bp, Homo sapiens
cgaggcccatgaggagctggcttaccttaagacgaaccacgaggaggagatcaatgcctgagaggccaggtgggtggcgatgtcaatgtggagatggacgctgcacgtggcgtgg

SEQ ID NO: 560449 - DNA, 428 bp, Homo sapiens
tggcatcagaactgcatcaggtacatgagactgaatagaggggtcacaccaagattagctatgacatagtggggaaattgccaactcgcccttgggaaaggttggaccagagtgtagctgtctggactccgtcccagaacttcctctgcataactaagtctattgctagtcaagaagctcgacacgtggcatctcacggttgcttttcttgtaccgactggtgaggttgggcatttgttccatttcaaccaacactagctgagcatttgcttacagccaggaattgagctggggaggcggctgagtcctggtccctgcccttaggggagttcactctctccacatgaagcatgcatgtgtgcaggtggatgcaacaacctgaatatagtgtcagcccgtggggtaggaggtgggtaccgcactcgaat

SEQ ID NO: 560450 - DNA, 861 bp, Homo sapiens
agcgtggggggcaggagcagacaaacacacagccaagggatttgaattaactcagccattttggagaacttggggaacatgaaagaaaaaaaaaaaaaaaaacttttttaaaaaaaaaagggggagaaaaaaatagtttctatggagtgagctttaatcagtctcaatggaattctttccttttcccgtgcatgaagacagcgttggtggccgagtgtgcggcaaagaaagccagaagggacccagaaatcccagtgtgccctacaacccaccaccagacacacttcacacccacacaggtttctcgagacacacacaaagaagttgcctgtgcgcggttataatagccgacaaacgcctaactataacgtgtccgtggcagaaattctcactcttccacaaacagactcgctaacccaattaacacccaattctttacaacagaggcacccaaacacaaacacgtctacctgcggactgtgcagccaaaacagaagggccatttttttgtcgtggcacatttggggctcccgggggctgtgacaaaccacactcacagacaagcagacgacagcaacaatacctccagcacaattcagccagcgcggaaatatcaccatgtgcgaggcctaccctatattttgcaccccttatattgtcaccctaaaccctgggggttttgcggcacaaccacgccggggagggtcctggggcggcacccgtggtgaaaaattttcactggggcccatgacacactttttccaacatcatacaaggcacacagcatccaaacacacgttcagccacaacgagctttcggcaccccccacacacaacaatcacaacaccacagccacagcc

SEQ ID NO: 560451 - DNA, 298 bp, Homo sapiens
gtgtgggcatcctgacctcgcttaccttttggagaggccactggtctgcgcctgggcagggcacaccgggacctgccctgagggttagacactgtgggccaccgtggcaaggaccctgcccatctcaccttcctgcaccgcacgcccaggctttcccctgtgtccgtttgtcctctcagccttccggtcatcatgaatgtgcagaatgacaagggaggaggtgctatcccaggcgagtggctctatccccaaaacacaggcagggctcggccagagcaaaactcactgcccttcacag

SEQ ID NO: 560452 - DNA, 197 bp, Homo sapiens
aggcagcggataccccataatcagcagcttggttgatggcatccacaatgctggcattacagggactcccgttcccggaagactttgtccagagagagtttgccgagcctctgatctcatggttgtattgagctagctagggtagacggcatactacagaggtcctaccacaaccgtcagctatgcctattgttaaa

SEQ ID NO: 560453 - DNA, 194 bp, Homo sapiens
gatcccttcgcgcataagggttatagagtgtgaaaatgtaggcttggattaatggtgacagggatacctagtgatagtcatatagaattagaatatgtgaagatgataagtgtggatgggaaggtaaatggttgatatttgcttatgtggtggtgcttccaattaggtgcatgattaggtggccttatctgtgt

SEQ ID NO: 560454 - DNA, 387 bp, Homo sapiens
tctcctctgctccctcttcaggcctccaatgtcatatcttctctatatactatgtggcagaggagttgcttggataagttacagcctttacctcatattgaatcccagacagtatgggcagggatctctcagaatattcagacaggaactctcagtatccagagcagggctcccaaggcactgcttgattcaaaaggcgaaagcagttggtctacacaacggatgtgtagctctagcacctgacaggtagaagataacctcaaggcgcctcctgtagacacacgggtaacatcacacactatgttctatacccacgcagcaataggaggaaccaggctctgggccaggacagtttccagtgctgtgaaaccggaggcagaaagagta

SEQ ID NO: 560455 - DNA, 193 bp, Homo sapiens
cttggatagacgcgtcagatttggccttataggttaggccaaattacacaggtaattttaaaaagatttgtttgtgcctccgggggacactctctttatccaagctagcgtctacacctgtaccctccccctttttttgcgtttttctttgtttttttacatcacttttgggggggtttaggccccaacatac

SEQ ID NO: 560456 - DNA, 166 bp, Homo sapiens
  misc_feature (122)..(122): n is a, c, g, or t
tctgtttctgctgtggaagtgggtaagaatctgattgcagcactcagttgccggtagaggtgtgagttaatcaccggcccgtgagtgggtaaagaatccagcattgggagttcccgtcgtgncgcagtggttaacgaatccgactaagaaccatgaggttgcgggt

SEQ ID NO: 560457 - DNA, 1468 bp, Homo sapiens
ttgtttttttgtttattgtgtagtttttgtttatgttatgttgttgtttgtgaatgtgtatttttgttgtttcatgtgtggggtttattgtacgagtttagtgtatgtggttgttttttttttagttttttaagttattgtttcttttaatttagttgttgttaatgtgtttgtgttgcttttatattgtcttagttgttaatttttgtaataagatgttagtttgttatttaggttatttgttatggtggtgtggtatttgtgtgatttattggtgatgagtgaagttttgttgttggttgtttgtaagtttatataatgtgtttgttgtttttgttttgatgtgatgtggtgttattgtgtttgtagataggtgtgaggttatgttgttggtggttaatctatgatatgtgtttttatacggggtgtaaatctttgtttatatattacctcctctttgtggtgttggaaagacaaacaataacacgttttttgggggaaccacacttgggtattctcgtcaagggattgcccctcacaaagtgttgtgggaccaccaagtgaaagacacggagtgttttgtttaaacatcgacgcgccccccgctgtgatattatttttagacgcggtcgctctcatagggtttatgttgattagtctctcttgtggtggtgggcgcaatattgtcgcgctccagagggtttttttgcacacacacggtggtgtgccacctttcacacgggggaagatctcctctctcgggaattccaagtctatgtggctgtttgggtgtgtggggtgccaccagcacccactcgggatgttgttccaaaaccttggagagatagtcactctttttgtaatgttctgagagcgcggaaatgtggcggtctctctagtagcactcgtttaagagattttgtttgtgtgtgagacaacactgtggcgcaaaaatacacactccacacacacacacctgtgtcccagggcacacttttatacacaacactgttgtgtttatagaccacacacaggtgggacatccccacacacacacgctcgtgttgtgggcccacacacacacaagggcagcagcgcggggcacacttgtggggcacacagaccacccgaggaaggcattgtttttctactgttccacacaacctgtgtgaagtgtgtttaaaaaggggttgcaatataccgtttggctccggcccacacgtgtgagccttataacttcccaaatggagatatagaaatttaaatgttctcccacccaccaccttacaactgtgagggcaactatttaatatcaggtgccactttgcaggggtaatttaaaaacaaaattttggccattttattttaattcacacccaaccacacagtgcccacccaattataagcaaccttcacttttgtttctcctctttgtatataataatatataatataatatataaataat

SEQ ID NO: 560458 - DNA, 182 bp, Homo sapiens
tcaaattatgtgtatcacggaaagtcatgtcagtggtagtaatataattgttgggacgattagttcagcattggagtaggttacggttatgtacgtagccaaggccatatgtgtaggagattgagactagtagggctagcgccaccgatgcttcgaagcgccacaaaaactaagtatggcaa

SEQ ID NO: 560459 - DNA, 575 bp, Homo sapiens
ggaagcgggatgtccatcgctccagcttggtggtgaatgctgagtgagagtcactgttgctgcagtctgtgccacccggaggaagttgtgtgagtgccgggctggtgagctcgcggtgctctggggaatctgaaacgcggggtcggtgcgaagactctgctgctgccagaccctttcctattctggccatgcctggaagtgaacaaggcgaagtctacctgcagctgccctgacctgcagcccaatggacaggatcttgggcgagaacagcctgggtttgccctgtctagtgagcggatgaatcttgagtgaagatgtgtgactggagtggggtctctcgagtaattgcttgggtgacccgtgagatctgtcaatgtctcccagctgagcccagagcaataccgagtacattcaaattacatgaatggcttgcagggcacttcttgatttcagacctaaggtaatattgggaagggtaaaacagtgaaatacaacatgattgatgaagaaggaagaggagggtggagtgaagaagaagaatgttgattgatgaggattctggaggctgaaaatag

SEQ ID NO: 560460 - DNA, 288 bp, Homo sapiens
  misc_feature (1)..(1): n is a, c, g, or t
  misc_feature (213)..(213): n is a, c, g, or t
ntttggagtggtgcgatggatcgtgtttccggggattcactgtaaagtccccgtcctttccagtgtcttgcgtgcctggtgtgtggaaggagatggtttcagtttcctagtgaggctgtggcagttcttggaagtggatgaatctgggcacacagcttctgcccatgtcccatgcctcactgcctgatctgctgtcctcaaggtttacatacntggtgatgtcaccatagctgctctggagatcatgaaactgatcctcaacattgccttactggacatgccattcca

SEQ ID NO: 560461 - DNA, 1034 bp, Homo sapiens
ccactacggtcggtactgcttatttgttggaagaatcagccatcgtcagtgctttatcactatcgtaaacattcatgatagggcacggattctaacatacaagggattcttgcgttctgtatctctatcagaggtgaacatgaagcgatcctacacaaccacataagggtctctatgttcgtgtcatgcctcttcaaacaccaaggagttgaactagtgcttccagtgatggtctccgtaatgccttcttcctttatttggccttttctttctttctgtaccttcacgttcttgattgttcaaaattccaagtctagagaaaaccagtatattggtggtgctgggcatttgaagatgatgcatatcatgacgccgttggttctgtttgtacagcttagccttacatttcaggaggaggctgtgcattaggggcttatgctagctccttgtggccttttgaacattcaatattgtattttttcgccatgtatcctttcattgaaccgttaagggagcctgtcatctaacatttctcaactagttgcaggcctagctgaactgtctagtgtgttatacacttgctgccttcttatggtgaaaaccaggggatgagtggcttccatggagagatctctgattctcagggaggacaaacgtgatgacattaccactactttatgttttccccttttccaaatttgataagatttcctggttcctagtgatcccgggattgcgcaacacgtggccgaacctggcaagtcatgcccgtaggcccggaagaacgactgtgcgctacctgctcgttccgccgcaatctggcaggggtaatccgcccgacggtcggcccgacttgcattgacccaatccaccggaaatcccccctgggtcaagaacacaagagctatacctcacggcataccgtggcaacagcgactccgcctccaccccctcacattgctctcacccccacacctctcacatctacacacggcccgcacacacgcacaacgagcgccccccgcaccagcacc

SEQ ID NO: 560462 - DNA, 139 bp, Homo sapiens
cggaatcagctcgaccgtgggttaggatctgttgagctgtagtgtaggtcacagatagcttgaatctggtgttgctctggcggtggctgtggccaggaattgaattcacatacgttcacttaatgccgctaccgcgaga

SEQ ID NO: 560463 - DNA, 101 bp, Homo sapiens
cctgatagactgattgggcataaaatggattctggctcgcctgggcttaagaactttctgcagcttttcagcactgactccttccttccttctttctcttt

SEQ ID NO: 560464 - DNA, 107 bp, Homo sapiens
cagagcatagacgtgtccgcaggtcacctgtaccggcttctcgtacacctctaagcacacgggacacgtgaacagaaggaatatagacacgagccctatagtgagga

SEQ ID NO: 560465 - DNA, 463 bp, Homo sapiens
ccgtatcagctggcagatgctcgcccggggttgcggtgctattccaggctgtcagatgctcatctctgcagtatgggtgctgttccatgttatcagatgctcgcctgggggtgtgtgtgctgttccagggcgtctgatgctcagctgggggtgtgggttgttgtcccatgttgtcggatgctctcctggggactgcggggtgctaccccagtctgtcatactctcagctgggtttgtggtcattgcgtctaggctgttagattgctcccctggggttgtgggcgctgttcgcagactctctgttgttcctgctgttgttgtgggtgctgctccaggtcctcgtattctctcctgggagtgtggttgctgttccatgctgtcgaattctcacctgggggtgcagggtgctgttccaggctgtcagattctcacctggaggtgtgggttgtgctccacgttgcga

SEQ ID NO: 560466 - DNA, 159 bp, Homo sapiens
ctggtcacgtacagcaagcagggggatgttcagtggggcccaagcctaccctctttcctggggggtgtagatccaagccaggtgggtgaactgagagtccacctgagacgcccagcacttcacagcccagcttgcgggaagtcctctgcacggttgctg

SEQ ID NO: 560467 - DNA, 932 bp, Homo sapiens
ggcgctcgttccagcgcgctcgcgcgcgccgtcgccctgcgctgctgaagctggcgtcgctgccgccctcgtgccacgcaccgcctgcacgcgctggagcaggaggagacgccgctgtgacgccgccggcgggagagggtcctgctgcgctcatggcttggccgctcgtcgccctttcccacctgctgccgggtaaaccagatggctcgtcccatactggatttgctgttgaaagccatgcgccaagggttccgtggctcgcccccatggctcgagcccctgctgcccggtggactagactcgtgggatccgtgactcaagggacgctctccgtgcagccatggacgtcacgggccctgacctagcaagagtgctgcaggtgcctcatgtctgctcgctgctaaatgcggctctttggtggcttgtaatgctgcccgctgttcacaggtggcccgtcagaccagcgagtctattgagactttgcaggcgtagagaggttgggcaaggaaacagtcgtatccaggtctagctactagcatgtctggggcggagtttaggaccttccttgatagagaccatgttagccgtgcctcccagatttgccgcgcacccatgagtttcctgtctctagccacgacgccgccggtggtctcatgtggtgggctggcccgcgtgatactggaccctgtcacccaactagtacgaggatctccggggcctgagctagtctgcgacctaggcgcgggaggttcgactcggtggtgcccctggctggcgtgacgcaggttggccttgtgcgcggcggatgcttgccatagaatcatcggccaggttctttaagtggactggtggggcccagctaggctgctctgtcccccttaataatctcagggggcttggacggggcccagggcactgtcccctaccaggtc

SEQ ID NO: 560468 - DNA, 438 bp, Homo sapiens
acacctctttatattggctgggcttactacagtgtcaccctacacgctctatggtacataccctagttgccgcgttctcacaatgagttgcagacagatgccaagacacatggcgtctcaaggcatgtataagcccatgctcttgggagacatgtataagcccatgcccatatgcagacatgggccaagatgtgcaaacagaccaggacacacagacccatgggtacatgtactaagacacacatggatatacacacacccaggacatgtggacgatcaccaacccagagatgcataaatgtggagctacctctagagagccagagtcaaaggacatgtgtgcagttgcctgttggggtgagcaggcctatgcaggcacacccttagacatatagcagctcactcagacggccacaggccatgctccaagacacacac

SEQ ID NO: 560469 - DNA, 420 bp, Homo sapiens
gtccaaacagtgccctagcaatactgaaaatgggtgtctttctagctctcaaaactagaactctgtaataatcttactggtgcctgatgctggaacactaagtagagtatacacacacacgcacacacgcacacatacacacaccaacccaggagaggggacacttgagatgttcagatcttgataagcttacttggggtagagtgtcttaaaacccctgaagacccatttcacacttaagggaagcctcagataggcttgtccaggggcaaaaaaaaaaaaaaaaaaaaaaaaaagctgtctgaatacttctaaaacaataaagataatttgtaaaaccttcactgagcttaaaatccatgtagttaatgaaaagtctcattacaattaaaccaatgaaaataatgttcacaaatgttt

SEQ ID NO: 560470 - DNA, 242 bp, Homo sapiens
gcctcgagtccagacagctgggcacatggaaaaccatctctacaaaaaaaatagccaggtgtggtggtgcatgcctgtggttccagctactcaggagactaaggttggaagacggcttgagcccaggaggctgaggctgcagtgagctgtgatcatgccactgtacttcagcctgggtgacagagtgagaccctgtctcaaaaaaaaagaaaaagaaaagctcttattgcccaggctggagt

SEQ ID NO: 560471 - DNA, 867 bp, Homo sapiens
gcttagcgagaaccaagtgccagggggagtgtgtgccaggtgctctgcacacctccccagcctgcctgcctgcctgccatccatccgtccgttcttttacagaatgaatgcttgttggttcagtacagtgcctggtgattgaacacagtgaacaagacagaccaagccttggccctttggcacttggtgaggaagactagtaggaacccaaacaagagaatcagattttttcggaactatgaaggcaggcaagaaggacatgagcttccctgttgtgttcactgccatgtcctcaacacttaaaactgtgcctggcctctagtagacggtctctgtaggtgtagacatggagtgaaacagaagtgaaacggtaggatagagactggtgggctgctttagcctgaggggtcagagaaagcctctctaaggagatgatgcttttgagctgagccttaatttcgatagaaggatctggagaaacagcagtccaggctgagggaatcagtggtgccaagaccttcaggtgagcagagacgtcggttcttccgcaagcaaaaggaggccccatgtgggctcggagaacaggcccaggaacaggtcagtgaggtgggtgggagccataccatggaggacctggaacggccatagccaaaaagcagtggaaagccattggaacggttctaggcaggagatgacacaaattacccattttacacattatgtagcaagcaactgaactactgcgaaattggatggcacggcactgagcctgcaaggggtaagaagggggacgcatgggtacacccaatctacgaagtggctgtctagagtgtccaggccagaacatgacaagaggcttcggctacg

SEQ ID NO: 560472 - DNA, 431 bp, Homo sapiens
tctgttcgccaggtcagagaacgtatatacagagactaagaagcatgcttgagatcacagtgactaagggatttgaagtaatgattacagtaaataaccataacttttcacttaactattcacattccatacagtggagattatcctctcctccagattttgcacttacactctgaactttaaagacctacagtgaacaaaaaaccaacttacagacgtccaggatgtgtgtttttttctgttaatgccaagcacacagtgtacatcataaaattcatatttggtgtttggcattattgcaataggtatgatcaataccacaaatatccttgccataaactgttctacgataataatgaaaaaatatatcattacatcatcagtgactcgaataaaatatggtatagatatggcattttcaatgaaagttg

SEQ ID NO: 560473 - DNA, 375 bp, Homo sapiens
  misc_feature (26)..(26): n is a, c, g, or t
aaaaatttccgccacatttgtaaaantaactacacaggtctttttttttccttttcttttttcagggacagggtcttgttctgtggcccaggctggagtgcagtggctcaatcatagtctcctgcaggctcgaactcctgggctcaagtaatctttgtgcctcagcctcctgagtagctgggactatagacatgtgccaccatgcctggctaatttttaagtttttgcacagatggagtcatgctgtgttgccaggtctcacactactggcctcaaccaatcctcctgcctcaagtcatcaaagagcttggattacaggcatgaacctatgcacctagttaaatagcacatttctaaagtaatctatgagtcagt

SEQ ID NO: 560474 - DNA, 110 bp, Homo sapiens
  misc_feature (28)..(28): n is a, c, g, or t
  misc_feature (36)..(36): n is a, c, g, or t
  misc_feature (62)..(62): n is a, c, g, or t
gtcctgcagactgctcttagccccctgntttgtgcngcactggaggagggcagtcccccatngtgccgagccaacgcctcaggaatcaggaggccagcctggtaccaaaa

SEQ ID NO: 560475 - DNA, 100 bp, Homo sapiens
tttagctcggtaccctctacgtttttgatgcgcgcaatctctttttctgatagccgaacaacctctctatcgataactacccgggtggatttttttaata

SEQ ID NO: 560476 - DNA, 277 bp, Homo sapiens
ttaggtgatcctcccatctcagcctcacacagatgcacaccaccacacccagctacttttttatattttttgtagagacggggtcttgccatgttgcccaggctggtctcgaactcctgtgcccaagtgatctgcctgccttggcctccaagagtgctgggattacaggtatgagccactgtacttggcagtagtttcaactatatgattttattttacctcattgtacaattcttttttttttttttttttttgagatggagtttcacgtcgacgc

SEQ ID NO: 560477 - DNA, 912 bp, Homo sapiens
ttatgaaatgtatttcttaagttataagacttaaaagtggaaattaccccttaattcataggctgcaggatggatgctgtgttatcaggcatagaaacaatagtaatctacttgtacatctccattagggatcttgggtgacctgatgcatgccaatgaacaataatattttcaaatgaatctttttttcttattagatctcaaaggtgggcttaaaatattcagtaaaccgtgctgcaaacagattgctgtcagccagccttgtgttccgtttatagagcacaggcagaatagacttagcataattcttaaggacgtaggatttttgtatggaaagtgagcatggcttcaacttaaagtccccagctgcattagcctctaacgagagtgttactctatctttgaagattgaagtcaggtaatcctctctagctatgaaagttctaggtgacatcttcctccaatataagacctattttatctacatgataagtgtttgtgtagccactttcatcaaatatcttatctagatcttctagttgacttgttatagcttccatatcagtacttgctgttcacctttcactgtatgtgacaaaccgatgacttctgtccttaaacttcatgaaccaactcttttagcttcagatttctttctccgttcttcacctttgtcagactccatggaattgaaggacggaggtaggggctggctctggatcagactttggttaggaattatggggtggcaattcctctatctagaccaataaaggttattcaatatcctagaacagggtggtcacttttaatatcaggattcccggaggggcattaattccttagggacttcttgattcaatgggctgggccaaaggcaaaaagagagtgggaagatgacccccacagtaa

SEQ ID NO: 560478 - DNA, 325 bp, Homo sapiens
  misc_feature (148)..(148): n is a, c, g, or t
  misc_feature (151)..(151): n is a, c, g, or t
  misc_feature (160)..(160): n is a, c, g, or t
  misc_feature (241)..(241): n is a, c, g, or t
  misc_feature (245)..(245): n is a, c, g, or t
cgccacatcagagaataatctgctccaaatagaaatagtggccagagtgacaaaccctgctctagaaaccctacagtgtacaggccagccgccacatcagagaataatctactccaaatagaaatagtgcccagagtgagaaaccctnctntagaaaccntacagtgtacaggccagccgccacatcagagaataatctgctccaaaatacaaatagtgcccagagtgagaaaccctcctntagnaaccctacagtgtacaggctccagaaaccctgctctagaaaccctacagtgtacaggccagccgccacatcagagaataa

SEQ ID NO: 560479 - DNA, 206 bp, Homo sapiens
gagatgaatatatatgtaaagaatccgagaacaaacaaacaaaaagacgtgttataaaaaagctctaggtgcacagtaagcatatagggtttttattttttccaggtgtattttaaaacaagggaagtgtcaaaaaatggggtcaacggggtaagagtaaataacatacatgggtatatggctggcactggaatgggaaccttggg

SEQ ID NO: 560480 - DNA, 398 bp, Homo sapiens
ttctggaaggcgaaaccgttggtaactttgtgaacttgggctgtaactactttataactaacatgtcctgcctattatctgtcggctgcacggtactctgtgagtccccacttcaggcttttctccgtaacagattttgttggcatagctctggggtgggcagttttttgaacatgggctcaaccagaaaagcccaagttcatgcagctgtggcagcgttacagttctgtggtttcatgttcgttaccttatagttactgtgtcattggtgccacttaatgtctgttaccaaacatacatatctctaccccgggcttggtgtagtattttttgtgtacttggatttcataatactgtcatcctcaaagcacgtgtgttggttttttaaaacagaacgt

SEQ ID NO: 560481 - DNA, 272 bp, Homo sapiens
  misc_feature (95)..(95): n is a, c, g, or t
  misc_feature (98)..(98): n is a, c, g, or t
  misc_feature (107)..(107): n is a, c, g, or t
  misc_feature (188)..(188): n is a, c, g, or t
  misc_feature (192)..(192): n is a, c, g, or t
cgccacatcagagaataatctgctccaaatagaaatagtggccagagtgacaaaccctgctctagaaaccctacagtgtacaggcagaaaccctnctntagaaaccntacagtgtacaggccagccgccacatcagagaataatctgctccaaaatacaaatagtgcccagagtgagaaaccctcctntagnaaccctacagtgtacaggctccagaaaccctgctctagaaaccctacagtgtacaggccagccgccacatcagagaataa

SEQ ID NO: 560482 - DNA, 223 bp, Homo sapiens
cagaacagcatggacacaggcaggggaatgacaaacacttgtggaggcttgggggtagtgacagcaaaacaaaaatacaagaaaattgaagaatatacagatttcaaggaaagaggttcataggagtgtatttagtttttcaacccttctaagtgtttatggaacaatccctcactgcattgcattgtttattttaaattctgaggtcaggctaccagattat

SEQ ID NO: 560483 - DNA, 132 bp, Homo sapiens
tctgtctgcaaatactttaacgagatacaatttgtgtggttggacagaataaacagcccaagtttcaagagtctgaatatcactctctggagatttgaatgtataggctctatttctgactcagttaaaaaa

SEQ ID NO: 560484 - DNA, 798 bp, Homo sapiens
  misc_feature (23)..(23): n is a, c, g, or t
  misc_feature (33)..(33): n is a, c, g, or t
  misc_feature (66)..(66): n is a, c, g, or t
  misc_feature (70)..(70): n is a, c, g, or t
  misc_feature (75)..(75): n is a, c, g, or t
  misc_feature (78)..(78): n is a, c, g, or t
  misc_feature (85)..(85): n is a, c, g, or t
  misc_feature (88)..(88): n is a, c, g, or t
  misc_feature (90)..(90): n is a, c, g, or t
  misc_feature (92)..(92): n is a, c, g, or t
  misc_feature (129)..(129): n is a, c, g, or t
  misc_feature (139)..(139): n is a, c, g, or t
  misc_feature (147)..(147): n is a, c, g, or t
  misc_feature (150)..(150): n is a, c, g, or t
  misc_feature (155)..(156): n is a, c, g, or t
  misc_feature (203)..(203): n is a, c, g, or t
  misc_feature (279)..(279): n is a, c, g, or t
  misc_feature (403)..(403): n is a, c, g, or t
  misc_feature (464)..(464): n is a, c, g, or t
  misc_feature (483)..(483): n is a, c, g, or t
  misc_feature (611)..(611): n is a, c, g, or t
  misc_feature (643)..(643): n is a, c, g, or t
  misc_feature (717)..(717): n is a, c, g, or t
  misc_feature (744)..(744): n is a, c, g, or t
ctgcgcgccgctttggggctgcnctcactcgtntgcgcgctcgtccgcccgccagtcctctcaacncgcncttgnccncccgacnacncngnatccgcacgcgccggacgaggctcgctgcgctccctntttcccatcncgggcccnttnaggcnnagctctcagttcccggccaggacacggtctgggccgccgaatctccngccgaatagcggcggcggcagctgcgggaaaaaaatgaagaatgaaattgctgccgttgtcttctttttcacaagnctatttcgaaaacattataattttaaaaaaaaggcagttgaaaggtttgctgagaaatttaccctaatacttcaagaaaaatataaaaatcactggtatccaaaaaaaccatcgaaagtacatncctacatatttattcttttcaataaatttcagagagttgatccttatgtccttaaagcctnttaaaacagctgcatcttntatagttacctgggcttgccaaaggagctcactctctgggtggacccatattaggtgtgctgtcggtatggagagaaaaacaatgcattcattgttgccagctttgaaaataaagatgagaacaaggntgagatctccaggaaagttaccagggcccttnataaggttacctctgattatcattcaggatcctcttcttcagatgaagaaacaagtaaggaaatggaagtgaanccagttctgtgactgcagccgcaagtnctgtgtaccagatttcagaacttatatttccacctcttccaatgtggcaccttt

SEQ ID NO: 560485 - DNA, 278 bp, Homo sapiens
  misc_feature (217)..(217): n is a, c, g, or t
  misc_feature (247)..(247): n is a, c, g, or t
cgcctcctgggttcaagtgattctcctgcctcagcctcccgagtagctgggactacaggcacctgtcacatctggctaatttttgtattcttagtagagacggggtttcgccatgttgcccaagctggtctcgaactcctggcctcaagtggtccacttgccttggcctcctgaagtgctgggattacaggcatgagccaccacacctggcctcagnctcccggatagcaggcgtgagccaccacanctggtttcaggctcccagaaagcagattttt

SEQ ID NO: 560486 - DNA, 232 bp, Homo sapiens
gagccgtgctggacgcgaggtgtaagcgacgcgcctgggtcacgagtaaggggcgttgaagagtgaagtcattaacacacaagatgcagtctataaactgtgtctatttttaatttgttattccatacacctatctagcttagaaataatcattagccattatgcctaacatgacataaataataactaacatatattaatacttgatcctcccatgatcaaacatttttgg

SEQ ID NO: 560487 - DNA, 200 bp, Homo sapiens
tcacttcctcccttaagaagagaagagaaaagaggagaggagaggaggaacagaaaagaaaagaaaagaaaaagtgggaaacaaataatctaagaatgaggagaaagcaagaagagtgacccccttgtgggcactccattggttttatggcgcctctactttctggagtttgtgtaaaacaaaaatattatggtctttgt

SEQ ID NO: 560488 - DNA, 1187 bp, Homo sapiens
agcggggcggaacgtgggagcgggcctggtagtcttggccataaagcctgaggcggtggcagaggcggagttggccggtttgcgaagacgctcagtggacgagttccactggataccgatgaatctggtggaggtcgttctcggcttgtctgttcttccggtttacgtactcctgccttcgagacgagcgtagccctcagtccgcacgcagcccgggcacccggagtccccctatgcgcaagacgggtggcagtattgatatggatcgacctactatgtaatcaagatgctgctagcattgagatgggtgtattctatccatgggggagaattcatggatgtccgaggcaagagagtcagcatcagtgatagccagttactgttggaagtaaagaagactttcaaggtaactcgagatagcgaaaatgcccgatcacatttacgggagacctgaactattgcatggaacgcgcaggcgcagagtcgcactagtgcttgggagttgatccgacgggcgcaagttccaccaacattggtcgaagtaataagttgcgtgatcgatcaatggtacgagaagctagggatagcggaggtgtcccatgctcgtcctgctggatggtaaggccacatattcctaaccactaagggttgcaacggactggacttgaccgatatcctaggatacattttaggagtaggtagaatcggttggtcacgcgccaacatcaatcgattttcaaataaaggcaccatgaaagaatgagcgcgtagggaagcacgcagtggaacgatgtttgcgttcaagtgctcaaggaccgccaaggttcgctccacggaaggatttccctggcggaacataacttgtggcccccaagtgtatggttctgctggtgtggcggaaaaggacctggtggcaatttgtggaaccccgtccggtaaatatatccaaggaactagaaggtggcgaccatcgaaaaggccgggtggcaaactacgggcccgttgggtcgccatatcaaggcaagaaaaaaacaaaaacaaatttcccccttaacttttttgaaggaacgccacggttgtcgccaaagggaaggtgcccatcaaaacggttggaacgcaggggcggtttcccaaggaacggaatttgcactgtggaaattgccactttttagagccagggcgaaaac

SEQ ID NO: 560489 - DNA, 797 bp, Homo sapiens
  misc_feature (107)..(107): n is a, c, g, or t
gggccacctggctaattacattttccaagattctctggcccacctgcccctcatcctgtgcccataaaacccagttcatagggggcataacacaaggggctggatgncgagaggagcagaagagcagaagaacacaccagcagacaccagcagacactgacaggccatcgacaacaggacaacgcggaagtctggcgggggaggaacttgaagagcccagccgctaggtttttcaactccaggggaagaccaccttcccactccatccttttttttttttcacatccatatcactgagagctactttcccccactggggggccccttgcgcccatgctgtagaaagagaaggataaaactcgttggcctcaacagaggagctctacagacggttccttttagggagggataatacatggagctcgcttactcactcgtttggctatgccattctgttcgccagagcgcgagtcaaatacatccctgcgaggtaagactaaccacaaaactaggatgaaacgaaagtaagatctcatctgccaaattcatagccaatgacctgcgacccagataaacatatcaaatataaaagaaagctcataattgaagatagttacaagtaaaaaacataacacatttgtcatgactcaggactggagggggagggtgacagataattatggcgcgcgtcaggaaaatcagaatggggcgcaccggtaccgagagtaaaagggcgggcagcaaacacaaatattaactatcgaatgaataacagtatgagaaataaattagttaga

SEQ ID NO: 560490 - DNA, 453 bp, Homo sapiens
  misc_feature (1)..(1): n is a, c, g, or t
ntggtgatagaggatcctcgggagccttacctacaacttcgtttccactccatggattcgtgtcaatggccgagtcgtgggagctgtgggcatcagctgtcggaacgggcctcttttccaactgtgattccatctgttccttgagctccttcagctcgggggttgacatcattcttctgcttgcgggtgtcatccaggctgcgcagggcctcagccagctcgctcaccgcacggtcccgctcccgcctcaggttgtcacacagtgtccggatgctgtcacgctctgctacaatcttgtctcgctcctggaaggcccagtcccgccggcacttggccacatccgccccctggagggcttccttcagctcctggcacagagccttgacttgtttcgaaggattcaacctccttgttggtctcccagcatccattggtcacggtctttgatcttgc

SEQ ID NO: 560491 - DNA, 358 bp, Homo sapiens
tgctcgggggcactcacattattacagctatctggggcagagcaccatgggccaggcttcctgctctcctacagccaagattggctgatgtgcctgcaggaagagtttcagtgcctgaaccaccgctgtgtatctagctgtccagcgctgtgatggggttgatgcctgtggcgatggctctgatgaagcaggtttgcagctcagaccccttccctggcctgaacccaagaaccgtcccctccctttcttgcaatgtcaccttggaggacttctatggggtcttctcctctcctggatatacacacctagcctcagtctaccaaccccagtcctgacataggctgctggaaccccaaga

SEQ ID NO: 560492 - DNA, 297 bp, Homo sapiens
gagtggtctcggagtatcatctcagcattctctctccgctgacttaggtatatttcattgggtcagaaataatacgtggagaggatgtatcttacaacggaaatggacaaaatgatagtttgctacattaagtaagtaaattcatgtatcgatataattaaatccatgttagaactaagagttctatatacgatatccattgtcttacttgggcttattctaaacttaaatgctagtgaacacagtgttaggaatatacacaggctgcttctctggagttattacccactcagttta

SEQ ID NO: 560493 - DNA, 323 bp, Homo sapiens
  misc_feature (10)..(10): n is a, c, g, or t
  misc_feature (238)..(238): n is a, c, g, or t
  misc_feature (244)..(244): n is a, c, g, or t
  misc_feature (283)..(283): n is a, c, g, or t
atggaatcanctcgagtggagtggaatggaatggaatggtttggaatggaatgcagtggaattgaacagaatcattccgactggaatggaagggaatgtaatccagtggaatggaaaggaatggaatccacccgagtggaatggaagggaatggaattgaattgaaaggaagggaatggaatcaacccgagtggagtggaatggaatgggaatgggaatgggaatgggaatgggaatnggaatnggaatcatcccgagttgcaatgggatgggattgggattnggattggattggattggacttggattgtaccccgattgga

SEQ ID NO: 560494 - DNA, 218 bp, Homo sapiens
tttcaggttactcgtggacaatccattgggaatccgaggagggtctgtcctgttcgggctgctgctcgtcctggctgtcttctcgcattcaggtcatagcctgcagtgctacacctgccctaacccacctgctgactgcaaaacagccgtcaattgttcatctgattttgatgcgtggctcattaccaaagctgggttgcaagtgtataacaacgtgt

SEQ ID NO: 560495 - DNA, 741 bp, Homo sapiens
gggccctgcgggttctcagaggcaagttcagaccgtgtgttttcttttcacggatcctgccctttcttcccgaaaagaagacagccttgggtcgcgatgtggggcttcgaagagtccagcagtgggaatttctagaattggaatcgagtgcattttctgacatttgagtacagtacccagggttctggagaagaacctggtcccagaggagcttgactgaccataaaaatgagtactgcagatgcacttgatgatgaaaacacatttaaatattagttggacagatattccatctcgggatatatggggaaagatgatggcggaggaaggatgatgactggatttgttgtggtaatacgttacgatagaaatttgaagagttgcgcgcaggatagaatgagaggtggattttatgttgtgtagggtggtgatctttttcatgaaaataagccctcaaggaaaaacattacatacctggcctcgagttattaagaaaatattgtatgggtgatcgggctgtccagtttgaaattctcagtgatcagtcagtcaacttggttttagtaagtttccatgggtgaactatcaagatggcaactcaacatttcaattccagtgtgtagtattcatggcaatcatgagatcccacagggggcagatgcacttttgtgccttggacattttaagttgtgcttggatttgtaatcactttggacgttccaagcttgtggagaagattga

SEQ ID NO: 560496 - DNA, 245 bp, Homo sapiens
tctccctcttcagctgtgtgaggggaaagggggccgggaacaggctgaggctgaggtggctccttaacgtaggatcagctggtgaagaagagcggacgctcggagcgcctggcagcctgcaaaagctggaagaagctgaaaaagctgctgatgagagtgagagaggtatgaaggttattgaaaaccgggccttaaaagatgaagaaaagatggaactccaggaaatccaatcgggtacgagctca

SEQ ID NO: 560497 - DNA, 447 bp, Homo sapiens
ggggactatcagggggttcaaggggaccacagagttaaagggcaaatcgaaggtggaagaggggtcagacatgtccactgtgaccagccagttgatgctgaaggtgcacagggaggacgatggggtccaagggatctgccaggtggagcaccttgcggtaactggaaacctgcagacccagcggaatttagaagtccagtttaagcctaaggggcacattcagatgactaatcctttacagggtttaacccggaagggggacgcgctggagttaacatgtgaagccatggggaagcccaagcctgtgatggaaactgggttgaaagtcgatgatgaaaggcctaaacacgccgaactgtctgggcccaacctgttaatcattaacctaaccaaaccagataagggtccataccgttgtgaagcttcaaccatagtggggaaagctca

SEQ ID NO: 560498 - DNA, 310 bp, Homo sapiens
  misc_feature (16)..(16): n is a, c, g, or t
  misc_feature (24)..(24): n is a, c, g, or t
  misc_feature (106)..(106): n is a, c, g, or t
cagtagtgggcaggcngacaggtnagggcagtgcaccctgcacaaggtggaattggttgagcagatatgtggctcctgtacagccagagggggtcaaatccagccnactgcagagctatagatttttgggtgtttaccccttaataggcctgcacacagggcatatgaaagtccccaggctacatgtcaaagcagagctgcacctgctggactatgccacagccacagaaaagcagtatctgagctgtctctgtgacctacaccacagcttacaggaatgactaatagcagtcgcgggttaccgaagctc

SEQ ID NO: 560499 - DNA, 796 bp, Homo sapiens
cgcaaggtcatctggttggtattgacatctttactgggaagaaatatgcaagaatatcgtgcccgtcaactcataatatggatgtccccagcatcaaaaggaatgacttccaggctgattggcatccaggatgggtacctatcactgctccagagacagcggggaggtacgagaggaccttcgtctccctgagggagacctgggcaaggagattgagtcagaagtacgactgtggtgaagacatcctgatcacggtgctgtctgccatgacagaggacgggcggctgtggcgaatcatatggccatgggctgatataactggcgtcccagggttggcggtggtggcaggcgaggtgatcctctgaacctgtcaggggccccctccccgagcctggcctggctctggcccggtgctatgctggactcctccttatcacaatttatttgacgtattattgggttttccccaccccctcaactctgtcggggatgcccctgcccttcatcctagctcccttgggcgaggagcgaggcgaagctgtgggcttgttgagagctgccctcctcttctcccctcacactacagcctggtggggggagaagggggtgggtgctgcttgtccgtcccagtcttgtctttgatgctctggtgtcgatgccttgcagaccggagctgctgaaggggggcactctgggcgacggtgccgttggggccctccccaccagatccctggttcgggcccggtggtgcttttatgcgctttggccctggggtgccctcatattgtgggccccc

SEQ ID NO: 560500 - DNA, 256 bp, Homo sapiens
ttgcaatatcattgctgttagtaggggtgtgtgccctttctctcattgacaagggtctagcataattgcaaaagcgatgctctctcaatagtgtcttcataacagaaggggtggcaatactttcccaataccgtcttctctctctaaggtactacatgcagaccatcaatttgggcttgcaagtacccgaattttaattaaacatcaattgtgaatggggaaaaaagagaatatttgtatgttttaaccgcgggga

SEQ ID NO: 560501 - DNA, 233 bp, Homo sapiens
  misc_feature (69)..(69): n is a, c, g, or t
aaaaaatttttttttcccccccaaaatggggcccccaaaaaaatttggtggccctttaggcccttttanatttttcccccaaatccccggaaaggccccttttcccccctttttaaaaaaaaatttttttttttacccccccccagggtttttgggggccccgttttttaaaaacccccgggccccctttattggggcccccggaaaaatgttttttaaaatggattccggga

SEQ ID NO: 560502 - DNA, 665 bp, Homo sapiens
tccatatttatcaccaaaggtgtacccccccgttgtgtcttttttaaggtgtattagtataaacacttccgaggagattaaggccaaagggaggggggccccagcccctcttgtaatatccggcccacgggatagccccttgtcgttgtgtgcgcaacaccctttctcccccagacggggtctccacatgaaacagtggaagatctccttgttttgaatacgccccaaccacccacccatatccacatggtgctggactaacacataagagaataggggttgtagaagaaagaataccaatttgggggttccacacagaggtccatattggaaaacacttttttgtttttggttttggtaaataatatggtgggaaaacattttctcacagatggacacacagagaaggaatggtgtcctaactgtggaatgtagagggagtgaaacaaaggggagatggctttgagatccacaatggaggcctgggagaggtgtgcccacgaaaagcttgtctgtatagcgggttttgtgagagagagtgaacacactttccacactttttgagacacccctatcctgaagtatggttcccggatttggattttgattttcccaaagtagcttgaaatttccaaaaactttggtctgtttttttataaaatata

SEQ ID NO: 560503 - DNA, 196 bp, Homo sapiens
acatggatcgcgatggcgtaactccccatcactgcctgacgaagggcacgtggcccagagcatgggaggccaggagcatgggaggcccagagcatagggaggggtccccagtgtccagcacagttgtggggctagggccctcctatagaactacagaccctagcgtgtagcaggcatacaccggctacgaggaagg

SEQ ID NO: 560504 - DNA, 1697 bp, Homo sapiens
agctaccaatgtcgtgtcattctccactctgatatgaaagagagccgtgaatttagtagaacactaactacgatccatgcacagagtcatctaggtgctgtgcatttctcgatgcacgtcagataatagggcatgatggagtacctagcaagactctcaaccgatcttcattcattaattggagaacatctgttactgccctcatagttagctggagctccgtacatcattccaagttattctgactagcaaacccaggcaccgtctgcatgaccttagacgtgctatatcactataggtatccctgctttccatctgagaatgcaacatgacagcacaacataggcctgactgcataaactccttgcatggactacattctgccactgtcacaggaactgtaatctcactggacaataaactagggagtcttccatacttgagatgacatgctgcacaaatgatcttcaaaagcactttacagccaccagaggaactctcttgaaactacccaaaaatccatcagatatcttgcaatcaatgcctggcattacgaaagaatacattaaacacacccatgataacagggaggctcatctgagcattgaacatccgtgactgtacactcattacagacaacgggaacacataccaaaatgtgtcagaactaccaatgacacctgctcaaacacagaataccagcacaactacagggacacactcttcccaaaagaggtaccaagcctcccacgaacactactaagtaacacaagaaatccacgcactaacgctcacgccaacactgccaccaccatcatcgagagaacaaaaaatcaagaatagcacctaaaaacgaacaacacgcatataagaaaagcaactagccaacaacacacactcacaatccgactgaaaacaaaaagaatccgaacgaccaccaagaaacacccgtacacagaacaccagcgacggacaaggcaccgccagtcgcggcaccagcgcaggcgccgatccagccacagcgaacaccctcaccacatctcgccgcaccaccaaccaaccccaaccagcgcagcaccagcaaaagaacagaaacgacacagcaccacaagcaaggacagaagagcaaagagacaaagccaaaacaaacgagcagcagcaaaaacacaacaaaaacaaaacacacaccaacacacagactgaaaagaagacgacggaaagagacagcaatggagagggagatagggagcaaaacacgacagggacgacaagcaaggagacacaggggaaagcgacgcaagaggcaaccaaacagcaaccaaagcgcgacagagaggcccgacgcgccgcgacgcagaacagaagccgaagacaacgagacagacgacacacacagccagagaagacagagagaaagaagagaagaagcggagagcgaaccgaaatgcccaagacaaacgaacgaccacagacacggccaccacagacacaccaccaggacagacacacgagacaacgggagagcgaacacgaacgaagcaccaagacagcaagagaacgagcaagaagacaacaaagagacgagagaggacaacgaaacacgagagacagaccaagcgcaaagacagagacaaaagacgaacaagacacagagagaggcgagagaagaggaagacgaaggaagacagaaacgaaaa

SEQ ID NO: 560505 - DNA, 326 bp, Homo sapiens
gagagtttatattcattaaatttattttatcatttaaaaaattactgcctttaggttatcctaccctgatttaaaacacttggggacccatgccgttactggaatttactttaacaaaccccgcctttttaaaatgatttacccttgggatgaaattcaacagtggtaagggggactttttaaactaaaaacattgggaatatacaaattttttttttatttcattgaaagggctttaaaattcaacattctgccagggaagcaccttaatcccatagataacccctttgctaattgcttttacctaacttcacccttaaagggga

SEQ ID NO: 560506 - DNA, 133 bp, Homo sapiens
accctatagaagaactaatgttagtataagtaacatgaaaacattcttcttcgcataaggcttcgtcagagtttaaacacttgactctgcacatatatacacagcccatatactctcacatctacaccccaca

SEQ ID NO: 560507 - DNA, 510 bp, Homo sapiens
  misc_feature (344)..(344): n is a, c, g, or t
  misc_feature (416)..(416): n is a, c, g, or t
  misc_feature (435)..(437): n is a, c, g, or t
  misc_feature (449)..(450): n is a, c, g, or t
  misc_feature (507)..(509): n is a, c, g, or t
gcatctcattttaaatcattatgatcaatctctgataaaggcctagaatacaaattatgtcaaaagtgaaaaaatactatctcgaaaatttccttggggataagactactaaaattataatgcttcctctgagaaaatcatctctttgcatgtggtttgtaatggtaacagttctgtttccttcctgtcagaatgaggtgaaattgttcaaatatgtattttttatgaaatttacagtgttacctgtgtattctaattatttgattaaataagcctttggggaggcttgttgaggagagatatggtaggggtatcctggaacgtacataggtgtttttaaaggngatgtttcttctttctctaaaagaaagaaaagatcgcctaaatgtctactcttggtattcttctgctaaggnttaagaaccaggctgctgnnntttttctttttnngtgtcctgtctttctttatataaggttcaccgtaactgtaaaagagaagctgggaannng

SEQ ID NO: 560508 - DNA, 138 bp, Homo sapiens
tgaggttcccaagcttacgagggtagtacacgttcttactctttctttgcctcaattttatcatctttaaaatgggaaagggcacctatctagtaggctttcacttgacatgtttttaccactttcccacccttccac

SEQ ID NO: 560509 - DNA, 195 bp, Homo sapiens
cccccaggtcacactgcgactgtgcagtcattcgaaaggaccttgcccgtacttacctttcaagatgcttcaatcttatcaacgctacatttgtatttttcacacaagtataaattctgcaataaagagatgtagtttttttttgtttgttttttttttttttgtgtttttgtttttttttactgtttttatgtg

SEQ ID NO: 560510 - DNA, 784 bp, Homo sapiens
  misc_feature (23)..(23): n is a, c, g, or t
ggagccattgtggctccggccgnttgcgcgggccctcggaaccctcagggtaggcagagggttcgagggcacgagttcgaggccaacctggtccacatggcccaaaaaacatacacaacacaacaccaaaccaacaccatgtgtgtggggccgcccctgcgcctccggaaacaagacgttttatagaccccattgggtggggccggcggcgggccccccagttggctaacggcgaccgcgtgggccaataagccggtgtcccccacaagggggaaaacctctggggcataagagaccacagagggcgcggcgcattctcccaccacactcaaaaaaagccccgcggggggacaaccgcgagagcgccctggagacaacaacttccccagaagtgaccacacccgggaggggcgaaaaaaaaccggggggcttatatcaaacaaagggggggtgtcccacaaagcgcggagcctacgagaatttcacaagatagtagcccgcccttcgcgtgtggaggacaaaacacagaagagcagccgagcacgagcaacaccacgacgaagagcaagaagcggagacgggaccagagagcagagggctacaatgcgagcgagggacggagcgcgcaccgaggagtcgaggaggaccggcgaggtgaggaggaagagccgaggggggaggaagggggacagaacggggatgcagagagaccctagccagcgacggccgacgccgagcagagccgatcacccagcgcagcgaggaggagcgaccaacagggaga

SEQ ID NO: 560511 - DNA, 438 bp, Homo sapiens
gcacgagcaggacgtctgtcttcccagcacagcctcacccatcagcagtgttgtccctacttaatgctgtgtagactcggctcttgtaaaagcagtaggagcctgagagtgctcgtgtttccccgagtcctctggctgccaaagtctctgctgcaaggtcgaggtttgttttctcaaagtttccatgggcacactcatgacatttttaaaaaataaaatgaagccaaaatgattctggattctctcaaccacattttctttttccttacctgatttttgcctcaaaatcttgggtatcttgggtagtctctaaaaaataagtcatttagaatcatcgaattatattatttgtatataaggaataatagtttgaataatatttcttacttttcctttgaaaataaaataaatccaaacttgtttggcgttggtaaaaaa

SEQ ID NO: 560512 - DNA, 1627 bp, Homo sapiens
  misc_feature (180)..(180): n is a, c, g, or t
  misc_feature (929)..(929): n is a, c, g, or t
  misc_feature (1508)..(1508): n is a, c, g, or t
tacttcttagagggcccgtgatgtgcctggtattgattaatcaccacttggtggatgtggccagtgggcaaaggacctgactgagaaattcagtgattgtggccccgttacgactttccagcgatcgactggctcgtatcgtgcctgcctggtgggcttggttggtctggtcggtctccntccgatacctggcgtcatctctcgcctagctggcgcagcctgcgtggagcgatcgctgcacttgcgtagcggattcatgacctagcgtagaggctcgctgggatacactgagcttaagagtctggtaccggttgggtctagaacaaaaaagtagcgcactgtgacccgcagggaacttgacacgcgtaaccgacgtgcgacaacattgacggagtgactccatgggcatagactttgcttttgcccggggaagaagtttcaaaacgaaaactaagggctttcacatcacacaaactctcgggcggttcctacaccccttaagataccacctagggtaaggggccacctttccggcctcgaggcgaaactccaaccctccgtacctgtcggcggaaacttagggcctcagaagcgggacaaagcggtcgggcgtcgttggaaggccccactgactcggtgggccctttatggggcacggtcgacgcgctaatggacgggtctccaagagggcggtgtaattggctaacgccacgcatggggcccccaccgggtttaccctttgtccacgctggcggccggccacttttccccggagggtaagcggagaagcgccaaagctttggcctacggacatttttggcgaagggggcataacggttgggccgccctcttgtgtcgcctttgcgcctttgacattccaatcttcctaattatcatggctagggttcacgcggccccctttgtgtccnccgaggcttttacccccctcttcttagtgtcaacgccccgttttgggcggcggtccccctttccggcggctgcgcgacacttatgtgtccctctaggccccgaggggggagcttccgcgtgtgtggggcgcaaaagtccacggtggggaacccctttggttttggccgccggcacgtgttggcgggggcgccctttcgagtacggttgggcgcatgcgcatccggcctgagtgcggcggcttggcgggagccctatttaggaccccctcccgttgtccacacattgggtttggagggggtgcaccgcccacagtgataatccccgccatggctgcgcacttcgggctgcaccacctcgcgagcttgtgctggctgcgcaacagcggagaggcgcagagagcgtcggttaatataacccccttgtgtctcgtgtgtcccgtcacaggtaaataggccaccccccccactatagatgggacgtctctattacccaatagccattggaaacagaaacggtccctattttccacaaatgggtgcggaggtgagcaatcacacacgttagagtgtccagcgggntcttcctatcatgagttgcgcccccacgagggggatacacctccatcagagcggtgggacgtatataataggcggcccagggtatgttcgcatctcccgcagcggggcgcacacacagt

SEQ ID NO: 560513 - DNA, 102 bp, Homo sapiens
tgattgcgtcatgagtaaggcacttactgacatacagcgacttccccacactccactgcaagatggcgcgcgagggctggataggacaaggagcacttgagg

SEQ ID NO: 560514 - DNA, 544 bp, Homo sapiens
tcgggatagagcttgacccctcaatgccccttctatcgacgtcatgcgacgcagggagcgcatccgcggcgagtagcgcggcgacctgggcatcgtcgccccagaggcggatatcgacacccgagacgcgctgcgcctcggcagccacatcaacagcggggcagagtttctcgaacgagcgcagatcgtcgacccacagcctgacggtgtggccgcgctcctgtgcgagctgccgggccaggcgccagcacacgccgatgtcgccgtagttgtcgacgacgcagcagaagagatcccaggatgtgatggtgcgcatggggtgaagcggagaaggccggagaaggccgacattgtagtcggcggcttgttctacactgacgccctctgagcctgcgaacgccatgccgcccgaccccacgccccccgatcttcctgagacgcccgagagcgttgaacccagcgcagccgcgaatgtgcctgatttcgacgcgaaagcgaccatcgcgcgcctgccgaacctgcccggcgtctatcgctactttga

SEQ ID NO: 560515 - DNA, 150 bp, Homo sapiens
atcttataggactggagagtcaagtacttaatgaggaatgataggtactaggcaaagagatagggaacatccatggaagtgactctggctgaaactacctgagggaaatattgtgcagaggaggctaattaaccataacactctggaatc

SEQ ID NO: 560516 - DNA, 80 bp, Homo sapiens
  misc_feature (7)..(7): n is a, c, g, or t
actttcntgcccttacaaaaaaatggaaatttagtgtttttcagcctaagacattaaatttcatatcagaacaaaaaaaa

SEQ ID NO: 560517 - DNA, 207 bp, Homo sapiens
tttttttggggggggccaggggccttgtttaaagttgtatttggtattcttcccaatttcggttttttaaaatatggaaattaaaattgtattactcctgttttgatttttttggcccccagggtattttttgcccattttgtttgaaagtataaatgttgaaaattgtttaaaatgcgcccttgaaagaaaaagaatctgaattct

SEQ ID NO: 560518 - DNA, 406 bp, Homo sapiens
tataaccttctgcctcagtcttctgagtagctgggatacaggcacaagccattttacattccagccagcagtgtataagggtttcagtttctccacatcctcaacaacactttttattttctgtttctttgatagtagccatcctgatggatgtgaggtggtccttgtggttttaatttatatttcccggtgagtaatgatgttgagtactatttcatatacttaatggcactgggatatatccttttgtgaagtgccttttcaaatcttttgcccatttttgagttgggttgttttttggttggttggtttttcttgtaaaagttcttttatatcctgcatatgagtcctttgccaaatacatatgttacaaatattttctcccagtctggtttgccttttcact

SEQ ID NO: 560519 - DNA, 989 bp, Homo sapiens
tgcgggggccaaaaaggtttctttttttacaaaaccgattgggcccggggaaaaaaaaaaaaggggagggggccccccccgcgttccccccggcgattgtgttggtgggttgtggcgggccggcccctcctactactccgacgagtgggggtgctcgcagccgggccgcggcggtgggccgccgagaggatgtgtgtgggccgcctcggccccatgttctcgcatttatcccggaaggagagcagatttagttcttccccgggggcagcccagtggctggcgccaaaagccgggggtgggggggcgcctcgtgaagagggcatggggggggagcaccagcgaggagcagccgggggcaggaggccggcccccggaaagcgggggcgcggggaggaccccacccccacagagcggggtccttctacccatagcacgaccgccgcgggtcgttgtcaggcaaaacactgagcagctgggggaccccccaccacacagtccgcaggaggggggctcgacgggagacagcaaaacagaccccccaccagaaaaatctcggggggagacccccgcccgccttcctcctggtggcgacgcagcgaaaacacacccctcatctgtggggcgtgcttcaatccatcctcgcgggggacgaaatccacaccaccacacggggggggaagacgaccggggctttggccggaaacacccccgaaaaaacctaagtatagtccccccgacaacggggtggcgcaaccccaagaaggaagagggggggtggtgctcgcccccacaccagcgtggcctcataaaggtgtcagtgcccacaccagcaggagaacaaaggagggcactaaggtggtgactaacagacaccaaccgaaggcggccatcgagtgtgaccaagagaggagccgtagaccccacaccgagccccggtggattctgtctaacaagcggacaaccagggggcaagacgtgcgagtgggacc

SEQ ID NO: 560520 - DNA, 758 bp, Homo sapiens
tcttcccataaaaatgggtccccacggtgctgcccaggttgctctccaatcccgggggtcaagaaatcctccggcctttgcctcccaaagcgcggggattacagttggaagacgccactggtcctctgcactggaggaggctccttaccgggcggaacatcaggcaggtctcggccaggccaggtttcaagaacttacggaaagctgggtctgggatgtagttgcttgtaagagaagcttctagagagatggggcacatcctgtactgtggctgcttctcctgtccttatgttaattaagtaaagttctggaagtgattgtaaatggctaaaactaatggtaaaactggtaatgccagaaattaaagagagactatgtaacattccaggattataaaggaattgtatgtggtcactggggacagaaaaccacacacctaacagaccagtgtcacaaagagtccgaagggaagagacaaatataggccagggaaacacgtgctaggaagtgaaagactcccagtggcaccccctctcatgtataacgccgtgaagcttgcccctacccgagaacttacgtgaactagaagcataactagcgcacctatgtgagaaagcccgcaaggaccaaagtaacccgaaggggcccaaacgacaatagcagcgcggagacacacccttgaaaaagacccaacggggagaacagcaaagtacagggggacctcaaaggaaaaccaaggcggcaacggcgacggggaa

SEQ ID NO: 560521 - DNA, 710 bp, Homo sapiens
ggccgggcgcggtggctcacgcctgtaatcccagctctcagggaggctaagaggcgggaggatagcttgagcccaggagttcgagacctgcctgggcaatatagcgagaccccgttctccccaaaaaaaaaaaaaaaaaacaaaaaaaacaaacaactgtgtgctgcggcgcgcgcgcccgcgggccctccggagaaaacgtttctaaaacaccaatcgcggtggggcggcgcgggggcgcccagaggaggtgaaagtgggacaccagtgggcgccaaaaaggactggtgtgcccaccaaaggagagagcacccgggggccaatagagacaaaggggcggggggggttctctctcccccaatataaaaagaaccgcccccggggcggcgacacaccgagagcgcggtcttgtgagcccaaacccccaagaagggggggcgcgctccaggggggaggcccactataagggggggagttctttatctaacacgcgaggggaggcctcccagcgcgcgagagcgtcccgagatattatctccacaatttgaccgccccccggtgccctgggggggggggataaggacgtaatcatacgcacatgaccaaacaaacaactatcataaagcaaccaaccggccacggtaaacaccagaacggtaactaccaaactacatcaagcacagacacaacatgacaagacgaaaaccagg

SEQ ID NO: 560522 - DNA, 133 bp, Homo sapiens
tacccacacaggccgtcctgcgcgggccctcccttggaaatctgccctgcctgagggcccctctgcccagcttgggcacagctgggctctgccaccctacctgcttcagtgtcccgggcgcagtcgtgtgagg

SEQ ID NO: 560523 - DNA, 1274 bp, Homo sapiens
  misc_feature (326)..(326): n is a, c, g, or t
  misc_feature (776)..(776): n is a, c, g, or t
gatcaccatggcggctggaagcctgtgacacatatcctgaaaactggaagcggcctctacacacgctctcatcgctgctctcgctgacagctggggctcgaggctccgcctgctgcgtctccgctatccaccctcaccttccgatcttttggtcaagacccagaatcgtagccccatgcaatttgctccgatacaggtcgctgcgcggcccaggtcccaggcttggtgagggtgattgactgggacttactcgtgatagtctggacgacgccatacggcacaatatgctcctaactgagtggttgacggcaattcgacgcgtaggncttgcccgggcgaaaagttaccgtccccaccggacgcgcaagcctagggccgcatgcgatggggtggccaatgctagtgggctagaaagcgtgttgcgcctggaatctcccgggactaattaagtcagcgacccgcaagagctcgagagataactccgtagcgagatcgatttcgcaccaaagcgcatttcgagagcaagttccaatatgggcaatcgcgaacaaaagctatatataccccaggggcgcgccaccgctcgaaacggagagattggcctagaagataagtgggcaccgtgcaccaagtttcgaagagagccttgcaggaatactcccctgcgggcgcagcctttgcggctctggcgcaataagcctttgtggacatctttgtcgcgcaccaccgcaagtggcaacggcggcaaccttgatgatatgacctgtggcgcttangggccgcaggataaccccggaggtgcggaaccgcatgttaggcggcctttgcgaagatatcggaggcaaaaggagtttgggttcctggtggggccaaggcccacccttttgaatcttgggtgaggtaggcagttcccttggacctggaccaattgccacggaaggggggacttgtttgccaattaacggaaatgggcccccgttccccggttcatataccgccatgggtagcccacagggagcgacggatttaatattcaccaccaacacaagtcaacggcccaaaaaggcgcgaaggcgagttgggggattatcatcacccgtatccagacccccacaatttgcgacggaatatgataaaccccaccccgaatgagtcattgcacactctagagaggtaatcctcccacaaggggatagtcccccttgggtgtccacttctaggaaacgacacaaaaaaagcgcgcttggacaagagaaaccgatacgtcggattgg

SEQ ID NO: 560524 - DNA, 101 bp, Homo sapiens
gtgtgatctcacgaaagctgtgcttacttgcgtctggtctagaggccctcctggaaaaggccaggttagtattgtgtccctggaggcaggtacagtctaga

SEQ ID NO: 560525 - DNA, 666 bp, Homo sapiens
  misc_feature (154)..(154): n is a, c, g, or t
  misc_feature (159)..(159): n is a, c, g, or t
  misc_feature (162)..(162): n is a, c, g, or t
  misc_feature (165)..(165): n is a, c, g, or t
  misc_feature (173)..(173): n is a, c, g, or t
  misc_feature (662)..(662): n is a, c, g, or t
cttcagggtctcaagatggccagcttttggacttacaccataggctctactggtccttaggcctttggactgaggctggaaccacatcctcagccctcctggatctccagcttggcaactgcagaccttgggacatttcagattccataatcangacgnagncgntggcagcngttttccaggctagctgtcttcacaacccgatggctctcttcttttctgctgccacagagactgactgtctgcctcctgcaaatttgaaatttggcaaacctgcctcctctgcttctcagaaccaaactggggccaggagaacttctgacccaagtgttgatcacctctcttcctgcacctcactgtgcaccctctgctcaggaaatgcctttggcgtgttgctgacgtctgtccctgctccatctcttaccaccctgcacttcaccctttcccacacaggtttcacctgatctcagctgctttgggcagaccatccaggtattttggagtctgaaaaggatctctgtctctaagtctggtgcaaatggagtttgggggttttaaaattcattcttcttgctgctgtttcacaatttctcagaaaaggtgaaaatgcagactttggcagttatgttcaatatgaaaagtcttaataaagtaatttttgnccta

SEQ ID NO: 560526 - DNA, 105 bp, Homo sapiens
tgaaattacagattttaaatgccatgttcattaagaaatccagggtattcagattctggggtttttcatattgtatatatattcatatacgggatagttcaatgt

SEQ ID NO: 560527 - DNA, 152 bp, Homo sapiens
catatctaagtagtgagactgagtctatattctagtgagtcatggggtagctcccagcttcttataagactcacagtatcactaaacatgatatatcagcttttggctttcaaattatcaatctcttaaagagaatccaactttattacggt

SEQ ID NO: 560528 - DNA, 428 bp, Homo sapiens
tatgacaggcacaaggagtaagagcatatgagtacgctacaactcattgcatagaaatctaaaacaccaaacattaaatgtggatttacctcaatcaatgatttgttaagcactgaacacttactatgtaaagtatgcccactcgcatcaatcgaatgtacccttgtagcaaggtactacggaacacttgaaatcagtttgtttcaccatcaagttaaaaaaagacttttacttacagacgaaggcaaaccaggaggcacctttctagactttttcatgcttgcacaacgcgatctgcacgatggaacacaatacatatctatcagcataatataccagaccaacatccagacttaaaattaacagaataacttttcccctagcgtctttcttgtataccaatatttgcgagtaagcagcaacataca

SEQ ID NO: 560529 - DNA, 300 bp, Homo sapiens
cggcccccatgtaggggagagcccaagttgacaacaagtaatttaacaatattgtatgaacaattgttagagacagctaatcacaaacaacctgcgggcacaatgacctcattccacacgtagcactcttcagcaggaccctataaaactttcctccagcccttgcctctttgcaggtagccccttctctgctgagctgcccactgcaacatattttcacaatttctctaataaatctgcccttctttacctacaactatcttggtaaatggctttaccacctgcaaaactgaccctagg

SEQ ID NO: 560530 - DNA, 393 bp, Homo sapiens
  misc_feature (393)..(393): n is a, c, g, or t
atcgattggttcatgcctggttccagggcgacgttctgcttaccagcttgcctctcgtacgactttgcatgtctgagagccgtgcgcgtatcgaacacgataactgacctgtatgagtgtagaaatgaagatgcgacctgacacttactacgatggaatgtttggagagctaatagcgacgactgacgatgtacatcgagatgatactactcaacaggcgagccacagttgtgtgactgtaccgtgatacactacgaccacatggacaacagtgaatgcatgtatatttagagtggctcgtatgctacacacacttagagatgacgacaggcatggtcacaagagtgttgtttgaccttcatggctgtatcgtagccctggtgtggttcgctn

SEQ ID NO: 560531 - DNA, 128 bp, Homo sapiens
ggtacgtggtgtactattggatatgtattggtatgagccaaaggccgacaccccccttcgggctgctatatatattttatttgtaggtatttatatattgaaatattaaaacctagattttaaaaatc

SEQ ID NO: 560532 - DNA, 267 bp, Homo sapiens
cgtcgactctagtagtatccccaaaaccaggtattaaaggactaagaatgtggaggacccaggacatcaattaagagagtgcccaagggtgttcagcataattatttgcttggttggcaagttattggactctatccttgagtttttttatgttgtcatataccaggccagattgatctaggtaaaaacaacactcttcatttaaaaatatacagagtcgtcctttttcagcactgagtaaattgaggccttggcgattttgaagca

SEQ ID NO: 560533 - DNA, 643 bp, Homo sapiens
ccctcttgtagttattttcgcctctcttgtcgcggcttgcgcgaaagagtgtcttctcttgggaggtgtctctggttatataaattcttgaagacgccagtgagaggtggcacaacacaaattatttgcgttgggcggtaccacaacacaacagcactccctccgtcgtgagataactcgctgcgcccacgagggcgagagaatatagtaggtgattatagaaccatttttagtggagaggggtaattatataacacgcagagttggggacccacacaagcaataggagctatccaatctagttctctctgctgccgcacgcccgctctgtggcccgcacacgcttgtgcgccccgccacaaggatatatatgctgtatctccgctctgtatgtgtatgtgcgatctctatatgcgagagaagtatcttgcagcatacacaatatatgtaggaaacaatcgtggggagacactctgtctctctgtgggacaatgatgtcatcaccgtgttgctagacccatcaaatctccaattatcatgaacttcttataaccccttcatcacctcatttctctcgtttccccacacaaactctattcttgacacactccccgttctcatcaatagatacacaaaatataca

SEQ ID NO: 560534 - DNA, 359 bp, Homo sapiens
cgttaaagcccgtaaaaccccctacgctccaggcactcacgaagagccccaggacagatgccggttttccagtaaactggcagtgaagacggtgcctgtgccagcgtatcacccggacggcggtgctggcgcagcatatcgagggtgatgaaactggcctcttcactcagtaacctgaccggcgttgtctgccgcggatcggatttctgcatccgtaacggctgtaagacgccacggttcgccagcaatgcgtacagttttgccagttcctgcatcgtcacttcgccaccgcccagcaccagcgataaaccataatggttctcgctggacatatccgccacgccagtctcacggagaag

SEQ ID NO: 560535 - DNA, 244 bp, Homo sapiens
accccatttcaaaaaaaaaaaaaaggaaaaaaaaagagagggactggatgcagtagctcacatctgtaatcccagcactttgcgaggccaaggctggaagatcccttgagccaaggagtttgagatcagcctgggcaacacaggaagaccccctctctacaaataatagaaaaattagcagtgagcagagatcacaccaggtcactccaacctggtcaacagagttaagacccctgtctcacca

SEQ ID NO: 560536 - DNA, 231 bp, Homo sapiens
cgggcatatgaaagttatttacctcacagaacctggtggatgatttacggtacttcagagcccttcccgtaatgtgatgggcagaggttccagaatgttgccaagggtacggagtgagatgtctgatgaaagtgagagaactaagggagagctcgtgaagcagttgagaaagaatttgagcctcgggtgaattggttgacagaataaagcccttaaggacacgaatgttca

SEQ ID NO: 560537 - DNA, 1088 bp, Homo sapiens
ataggctaggtggaggccgggtgtaaaatcggacgaggcatatcatagcgactactgagcctgggagtatcatcattgtggttgtcctcatcaaggtgatgctggataaatagctagtgcgtctgcggggcagcctctccaccttcatcccgaggaagcagtggtgtgagcggaagctggactgtcccttgggggaggacgaggagcactgtgtcaagagcttccccgaagggtctgcagttggcagtccgactctccaagggagcgatccacactgcggggtgctggacgtcggccacagggaagctggttctctgctcgtgttgcgacaaacttcaccagaggctctcgctgatgacagggcctgtaggcagatgggctacggcagcaaagccacttgcagagcggtggagatcggcccagagcagggatctggatgtcgttgaaatcacagaagacagccaggagcttcgcatgcggaactcaagtgggccctgtctctcagggctccctggtctccctgcactgtctttgccttgtgggaagaagcctgagagacccgccgtgtggtgggtggggaggaggcctcgtgtggattctgtggccttggccggtcagctatccacgtacgaccactcatgcccgtctgtgggagggagcatgcctggagccccagtgggtcctcagctggcagcccacgtgttcatgaaacataccgatgtgttcaactgggaggtgcgggcaggctcagacaaactgtgcaagttccatccctggctgtgggccaagatcatcatcattgagttcaaacccccatgttaccccaaaagaaatgaccatcgcctcaaggaagctgagttcccattcagtttctcagggaagtcgggccatctgctgccttttgggtgagagtcacatcagcacccacttggtcaatggatggcgtgaagcagatgggggaaatcttgcatggtgggggccgcggtttacgcacggatgccgcagtccgggaacaaaattgggcgcagggggcgcgagggcataacaccgagtggcggggtgggcccacgcacataggggggcagagc

SEQ ID NO: 560538 - DNA, 461 bp, Homo sapiens
  misc_feature (380)..(380): n is a, c, g, or t
gaaatatgacacccatgtgaagtgtcactagtgacggtggaagtgcccccaaaaggtagaaaaaaatcatgacattgcaagaaaaacttgaattgcttaatatgtaccagagattgaagtctgcagctgtggtggcccactatttcaaaataaataatccagtgtaaggaccattgtaaaaaacgaaataaggagattaaccgaataagcagtttctgctgatcaggaggccatagacaaattcccaagtactattaaggaaatcattgaggagaaaggacatttgcccctacagtttttttaatgcagacaaaagtgcactattccagaaaaaatttttcacaaagggcacttattaggaagagaaatgagcaccaggntttaaggcaagaagggaagactaactctaatttttgtgcaaatccagttggatttatgatcagaaccgctcttgtttataa

SEQ ID NO: 560539 - DNA, 929 bp, Homo sapiens
  misc_feature (566)..(566): n is a, c, g, or t
ctcgagtgactggaatcgctccaatgcccccactcagagtccagacgaaggtcagaaggctgacaccatatgtacctccttcatggacgtgctgaaggccttgtctcagaacctcttcaggccatgctcttgggtgtctggattctgctgcttctggcattctctggccccttctgatgggctgatacgtgctgtgtagaatgttcctccgatagctcaaagggaaaagcagaccagtaatgcgtaaactgttgtgaacgctgagatggaatactacgccatgacctctcctgatcattcagatgacctgtgctgcttcttgcatcctgggcagtcccatcgccgtctttcgacatgcatcggcacaggcaaaaggaaccccatggatcttggatggcaaccatggatgcgcctccttcccatctcagccgcgcaaagttccatcccatccggcgccgcacattgacgcccgtcgggcctgcgagcgcacgttgcctccgacgctcatcgacgtttgcccccatgtcgctgttactaccccgttgccccaatcgcaatagcctccngcgttcgacttgtccaccctcacgtagacgtaatgtccattgttagattaccataaacgtcgtcatagtctgattcgttcctccacgcaaaaaaatagaaacatcaacagttttaataatatcatccagtgggccgcgagcaagtccaaaaaaaaaatttcccccctcgagaggggggcgccccagaggcgttttccgccgtatacccccgagctcttctcttgtggtcgcacaccgtgtggccccccctaattggtggcacgctcgtatttattgacgcctaggggcgaggtggccccggtagggtgtttcccaccttttcgatgacctgtgggacaaacggtcggtacgctttggacacct

SEQ ID NO: 560540 - DNA, 159 bp, Homo sapiens
ggtctatgcatctctcgatatccatgagcagagcaaggcacagtactcattactgtaatgtctctatttacagctacatttatcttatacatagctactcatgctcatgaactacttgctgactaaatgttcttcatatcactagataaccttggtctc

SEQ ID NO: 560541 - DNA, 835 bp, Homo sapiens
tcagcgtctgtcaacacggtgagcgtttcctggagcttttctgagtggctcctgcacccttgaggtccagcggcgctggtgagtcctgttgtgagagctgttgctgaacgttcgcgagtggcggtcactgaggctgcgcgtcagacctcgcggaattctggccggtgttcgtgatcccgcttttcgcccccgtaggggttcggatcccgctctcgcccccgaggggttcggatcccgctctcgctccccgaggggttcgggatcccgactctcgcccccgaggggttcggactcccgcgtctcgcctcccgcagggtgtttggagtcccgtctctcgacgccccgttgcagggctcttgtgcgaggtttcaacgcggatcggtactgaacaatgggaggttccacgttcggaggcagagcagtgtatcagagatccgggactactgcatactcagacgaccctgagtgcagtcgccctaccccattcaacgaggtggccgtgagcaaattctccatgacgattgattcatgactcgacataagtacatccgggaaagttcatctacaactgacatccctgtctggcgccagtaaggccccaggctgggagactccaggtctcagaggtctctgaaccccacggagcgatcagtgctgcccagtgtgaaagaataatgccagccggggcagccaaagataacggtgtaaaaattagacattctgtggaaggcccacgttaagcataagacggaagataggagatcacggcgctttacacatcaggcttgagtgacactgcgcgcaacttcggctcattgaacactctagatcccgg

SEQ ID NO: 560542 - DNA, 140 bp, Homo sapiens
ccattttttttttttccccgggggcccccaaaaatttttttttgggggcccccaaaaaaaaaaatgggccccctttggggatggggggggggtttaaaaaatgggggaaaaaaaaaaaaaaacccggggggggtttccca

SEQ ID NO: 560543 - DNA, 356 bp, Homo sapiens
aaagagtgtctatccagcacgtcagcctcatggcagctttcaattcattcaatgtcaaacagtcacctcaacagcagccacaggatcgtcaacctcacgaaacctgcatttacacaatttcggttgggagcagcactcggcagtcacaaccgaaactccgcagcagtcacgtgctcaagcacttcaccagtcccacagcgcaactcactcatactccaattgcatccgacatcaacttgcacccacacggcacaccacagttcaccctcagggcatcacacagcgccaatcctcattctcagcagtcccatcatccacacaatcaaggtttacgcacctcgcatgtctggctccag

SEQ ID NO: 560544 - DNA, 209 bp, Homo sapiens
tgctgtagtacaggcatgagccaccaccacacctgaccataacaagtcttatctttttaaaccttggaaaactcttagtcccagctacttgggaggctgaggcaagaggatcacttgagcccaggaagtggaggctgcagtgagctatgatcacaccactgcactccagcctcggcaacagagaaagaccatctcaaataaaaatacaa

SEQ ID NO: 560545 - DNA, 196 bp, Homo sapiens
aagcagtatacagactcaaaaaatgagcaattaaagacttaaacggccaaacatggctgccttagcgagagtcggtcctgcctcattaattgtatgaacttgggtttgattgcccaaaaggaaaagagatgagaccttgtgccgtctaatggatggatgcgaaggatgaaactgaaatcctgtctatatggctgag

SEQ ID NO: 560546 - DNA, 376 bp, Homo sapiens
  misc_feature (5)..(5): n is a, c, g, or t
gttanctgcagctctctctgatggctggtcttcatctcccttctgctcttagcttcatacagggcgcgagtggggctcgttgaagaagcgactcccacagcaggaggatgatcagccccagcagcagcagccttgacccacgggcaccagcaccatgcacatgtcgatttcggccggcagctcctccagcagctccgagtcaatgtccacagagaaccacgtggtcttgttctccatgttgatggtggggatgctggttcggaggaaatagggtagcccagccatttacccggactcggccaaagtctctgtaatcctcgatgaaggtgctgttccacactcgtgccttcacagtcacgttggtgccaaggggggg

SEQ ID NO: 560547 - DNA, 528 bp, Homo sapiens
ataacttactttctgcaactgttttcttagaaatggtgtccagatagctttcactaagtgtgttaaatgtaagtgagagctatgatatatatgtgtatatgtatagcacatatatatacatcacgagcacagtatatatagtttagaaacagtgagtgttaaagatagaatttgttttcaggacaaattttgaagaacaatgtgggaatgaccaaatgtcctttagtaagaaaaatagaagtttgatttcaagggagcatactagtttcagggattttcagatgggaagctgcatttgttaggattagcccatcttaagagatgcttgcaggaagagattgtatccagatattatagtttatttcatgttaagataattttcaaaggttaattttctagataagattaattctcagtatggtgtttgtgctttctacaatggccaagtaatacatatctttcagtcatcattgtacactaatttatttagagtttaatttgtaagggcttaggaagtaaaatcttgtc

SEQ ID NO: 560548 - DNA, 422 bp, Homo sapiens
tccaggtcgtccctggcgcagggcaggacgaccctggagggcgcggtcgggctgatgcttctgcagtgcggtacccggagtctcccaccgcaagaaggaggaagaggagcgcagggccccctgtgtcctacaccttcccacgatcagaccatgaaccagatgcgtacaccagaaaagcatagtgtcaccgtcgacgagagagacaccaacgatgaagcagaccccactgccgaggagcgaggggagccggcggacagacgggagcagacacaggagacctgacaccacagaccacgcgcggatgccaacaatcaacatgctccaatacgacagccaggtgccaaggaggagccgctcgcctgaaccagcaaagtagataggataataggtagcctgccaacaatgcagcacaacaactacca

SEQ ID NO: 560549 - DNA, 597 bp, Homo sapiens
tgtgtgtgttgtgtgtgtgtgtgtgtgcgtgtgtgtgtgtgtttaacagagaatatggccagtgcttgagttctttctccttctctctctctctttttttttaataactcttgctgggaaggtggtttataagccctgtgccaggtgtaagctggttgtgaaatacccaccactagagttttttaagtctccatattttctccattgtgccttcttatgtatttcaagtattattctgtgcactttaaatttacttaacttaccataagatgcagtgtgacttttcccacacagctggagttgtgaggctcttaacttcttaaaagtataggtggcatcgtgtgaatcctataaggcagtctttatgtctctaaacattcacacctacttttaaaaaccaaatattatgactatttctatcatgggtcgggccctttataactctctctcaaagatcacgacacctttaagaccccatggagttcacgtggtagggcaactccaacttcggagttcatctcttcaaatatgtcgtgtatagtccatatcacagggctgaaactggaccacactatggctgatggtatgcgaacacac

SEQ ID NO: 560550 - DNA, 186 bp, Homo sapiens
gctcttgagaggtatggttctgagtgtcctccgtattttttcgaatatcgttgtccttgttaaggttgtggatgatggacccggatgccattttagtatggctttgaagaaggcgtgggtacagatgtgccggagtgctaggtgtggttggttgctgcctatggttacttttatgagtcctagttg

SEQ ID NO: 560551 - DNA, 313 bp, Homo sapiens
atacctccgtgacactttctattttcagtagagacgggtttcagtatttggcgagactggtctcaaactacctgtatccctcgtagatactgcccgccttggtctacccaaggtagctagtgattgcaggcgtgagccaccgtgccttgcctactggcaaacttttaagttgtttctaagcttttccttattcataacaataaataattgcatatatgtccagtatctctgcacagtacattccctgaagaatttactacgccaaaagatggattcatttagatttttcatagttattatcaaattgtccggg

SEQ ID NO: 560552 - DNA, 473 bp, Homo sapiens
  misc_feature (50)..(50): n is a, c, g, or t
  misc_feature (88)..(88): n is a, c, g, or t
gtactctagagatccgtggtctgtgctgggcgtggtagtctgaagggatnccatgagggttgaggctggagatgtgtctggcctcggnccagtggtgagcgcatgctcatgtgcaggaagatctggtcctctgataactgcttaggctgacccctctttttcctggaggacggctgtcagagatggggctggctttctatttgaatttcagaggcagactcgtgcagatgggtgcgggcagaggaagggagcccatggtcttcctgaacactctgagaattcccagagcaggctgcatgcaacttcctgaggttctcccaaagccagacagggagaacaacttgtgttcaggagaagggtaccatataatttaacaaactgttacttagataggtgccttggccagagaaaaacgtccttgggccctggctcagggaacactgtggctctgcctgttcttggtgtaactcctg

SEQ ID NO: 560553 - DNA, 246 bp, Homo sapiens
gatttctaaaaataagttttagcctgggcccggaagggctaaaataaaagtttttaaggggctggcctttttccccaccttgactcatataccccaaaaacaaagtttttttggtgtaggaattggaaacccaaagtggaaaggaacgtaataactcgttggggttttaaaattagggttttggccagtaacccttattttttaaaaaaaatttaattttaattaattaataaaaattagggtcca

SEQ ID NO: 560554 - DNA, 323 bp, Homo sapiens
ggatcaaaaatttaatcttaatctgtttatttccaagggaaaatttatgtttggggaaccaaattaggatggatggggccccaagggagaagggtccccgcctgttatgcatcctttcaggaggtactggatttgttgttctttcaaaaagccttgaaaactaaattatagggtaaaaaaaaactggaaacccggaactttggggttcctcaaagttatggggcccaattgtctttggggcctttcccctgggttttaaaaaaaggatttttttcttatttccccccccaggttgtgagaaacctccccataaagggctttta

SEQ ID NO: 560555 - DNA, 443 bp, Homo sapiens
atagggacatataaatggcactgtctccatcaacacgtatcagtattgtcgcggtatcacggagtgttttgtggttcctccggagggtcagctttttgttggctttgtttactgatgtatcacatggcacatattacgtttttagcatggcctattctctgagccttcagatcccttctgtcatcgtctgtcatatcagttccgtgttttactacttcatttaatgtgggccatcattttttccaaacttcctagagccatcccagtagtatatttgagcctccactgagcccacgcctcagtgttaatcctatgttaggtcatagtgcctcatttcagccttcatccagcgttcacatttactgcctcgagtaaacattactcagaatcactctggcccattacagaggcacagtacacttctgagtactttagctactggc

SEQ ID NO: 560556 - DNA, 971 bp, Homo sapiens
  misc_feature (640)..(640): n is a, c, g, or t
gggcgcgccattctgtaggcgccctcccaaaaccccattaagcccccgcgccgccccaccttccctctaaggtattgttaacgtggaaaatgcgctctcggagagtatcatggggcaggggtgttccaaatactagtcttcgtcatgtgggtaggtgcatagtgtcattgactatagctctcagactgtcgtatacagcggggcgaacccaaaacaacaacacgcatccccgccaaaggaataccccaaaactggcacaaacgcccccaacgcacccattatccggtctctgtttcgtctctcatgccccgtctcttttgaatattataattatttatttttaataatataaatatgattataacatcgctatcgtcctggtgagggcatcatgtcacagctcaatctttatatagtatagtaactccgctcatacacttccgccgccaacacgggtcgtgcatagtctacaaccgtcgcccatgtccgggcatcctcccacacaaacttgtatattgtctctgtctagtgtggctgtgtagtggaccgattcgtaactactagaacaagctaagacacgagtgacagaacggcgatgagagcgctctacccgctccgctctgccccagcatacgcactncacgaccaactcacaaacaattgtctttgatcagtgaagtagctcccacccagctgcgcggagccgaatatagagtgataagtagtagtcatgctctatgagagtactataaactcactctccagtcagtgtttacgtcaacgcgttaatttacaaacgatgtcgtctgcctactagtatgcccagttatgaacgcgcgaaggaacaagcagtaacgggagagtacgagtaggtccgcgtgagcgcgtcgcacgtcggaccacacgatgcccgccgacgcggaatgtagtgtgagagatctcatgccccgcgcgcgcgcgacgcccgacat

SEQ ID NO: 560557 - DNA, 1308 bp, Homo sapiens
  misc_feature (1231)..(1231): n is a, c, g, or t
tgctgctgaggaagcggagccggagcccgagctggcggctccgggagaagatgcagagccgcaggcggggccgtccgcgcgcggctctccgagccctgccgccccttgtggcccccgtgcgggcccgctgccccgcattggaccttgccacttgtgcggggcagccccttgcgccatccagacccgggcccggccggcggccggggccgctcagcaccaccaccgcccgccgccggggggggcccccagggtacccccagccttgcccgcagggagggggaattgggctcaggtgcccgcgttgaccgagggccgttggagggaatttcttctccaaaggggctgatccagcagggatcggcctcttgggcccccggagggagggaccccgggccaattgaggggcggggcgccatcctttgtcccccgttagcactggcgaaaggaaggtctgggcacccctctttgtgcctttcaaagaagccctcgtacaccgcgggggttccacggggactgattcttagagacccagccccttgggggcagcttccccgaaaccccgaaaaaacctacttttggggcgaccttacctgcgggccggccaaaccccgttcccaggcccgtggtggagacagctagggggggcgcttgacggggggaccaccaggcagccccttgacccctttgccgggcggggaggcccgacctttcgcttacccagagggagaattgcagggcctaacttcggagtggatacgtggctggccttgcccgaggaaggaggcgaccgcttgggttccagagccccggacagaagccgggcggccctttagagcgggggggagaacacgggagcttgcgctcccatccttttggagccgggggggttccacgttaattgcgtgcgcaagagatagggcgtctcgcagaggccacggcggtgttcccgacgcggagaggagagccacgcaagttggggcgctcagaaaggcgggggctacgaatggtggactatggacggtcaccggggggcgcccccatttttattaattgcgcgccccttttttttttgggccccttgagaacggtctgcgcgaacggggggaatcctcagtgaaaaaaggggagggaaagatgaatacgcagagatgcgggagaagagagcgaccactggtctgaaggagaggagacaccaaacgaataagagatgtaaagagcgcgcgacgagagngctctctttttcctattcactctcttcttctctccttcctttctttctttcgtgcgcgtgactccgagagggagaag

SEQ ID NO: 560558 - DNA, 420 bp, Homo sapiens
  misc_feature (46)..(46): n is a, c, g, or t
  misc_feature (67)..(68): n is a, c, g, or t
  misc_feature (78)..(78): n is a, c, g, or t
  misc_feature (81)..(81): n is a, c, g, or t
  misc_feature (83)..(83): n is a, c, g, or t
  misc_feature (110)..(110): n is a, c, g, or t
  misc_feature (118)..(118): n is a, c, g, or t
  misc_feature (120)..(121): n is a, c, g, or t
  misc_feature (123)..(123): n is a, c, g, or t
  misc_feature (139)..(139): n is a, c, g, or t
  misc_feature (141)..(141): n is a, c, g, or t
  misc_feature (154)..(154): n is a, c, g, or t
  misc_feature (158)..(158): n is a, c, g, or t
  misc_feature (160)..(160): n is a, c, g, or t
  misc_feature (163)..(164): n is a, c, g, or t
  misc_feature (166)..(167): n is a, c, g, or t
  misc_feature (190)..(190): n is a, c, g, or t
  misc_feature (205)..(205): n is a, c, g, or t
  misc_feature (213)..(213): n is a, c, g, or t
  misc_feature (224)..(224): n is a, c, g, or t
  misc_feature (229)..(229): n is a, c, g, or t
  misc_feature (234)..(234): n is a, c, g, or t
  misc_feature (248)..(249): n is a, c, g, or t
  misc_feature (255)..(255): n is a, c, g, or t
  misc_feature (257)..(257): n is a, c, g, or t
  misc_feature (266)..(266): n is a, c, g, or t
  misc_feature (271)..(271): n is a, c, g, or t
  misc_feature (278)..(278): n is a, c, g, or t
  misc_feature (286)..(286): n is a, c, g, or t
  misc_feature (289)..(289): n is a, c, g, or t
  misc_feature (295)..(296): n is a, c, g, or t
  misc_feature (385)..(385): n is a, c, g, or t
  misc_feature (400)..(400): n is a, c, g, or t
  misc_feature (404)..(404): n is a, c, g, or t
  misc_feature (407)..(409): n is a, c, g, or t
  misc_feature (414)..(414): n is a, c, g, or t
  misc_feature (416)..(416): n is a, c, g, or t
tcacttccactcttcttcctttttaaaccattgctagtcattttantacatatgaaattctgtttannccgggcagcntcncnaccatcaccatcttgatcatgagagcntatttaananngngccaataacgtgtttngnggcaacacatganaagngnagnngnngacccagggggggctaggcatcngcggctatcattgtnaatttacngtacgtatccnaggcnaacangttcaatgaaaagnnctttananatggcaganatganatcattnccatcagnccnataaannacccatttgagcgtcagacaataattgtcctccctacacttaaactatcctactatatgttaaatgatacaactccctctaacagtggnaacagaaaccaaggnaatnatnnnctccncnaggg

SEQ ID NO: 560559 - DNA, 773 bp, Homo sapiens
gtgattccataatcaggcgtttaatgaaaatgaatcgaggaattaaaggagctttccaagagtgtaaactgatgagatttgatgatccactgttggggcctcgacgagattcctgtcctgggacaggagtacaccgagaagacccgcgatttgctgagcatgctgttattcaatgtgtgacctcatgagcaagaaaattgcatctgactgagaatgggataagggtggatagttgtggatagcaataatctatctggttcattgaaactcatgcacattggagatttatcactggtttcattaggaatactacatacatctgattggtgtctactagattgggctatcagaaccttaggctaggacctaaatagattgatttcatttctaaccatccgaattctgcatgtattcataattctatcaatgtcatctgttgattcgctggacctaataaagtttttgttgtaccctttctttgggtgtgcaagagaaatggttgtggacaaaggtcttttgtaaaagaacaaatagttgctatttgcctagaagttctggtattcaagatgaacataaaagtgtcagtatgcttcttttcatgaggtgtactttatagttcgatgaaggctaaggtgtacctaaagcttcacatagtatattcatttatggagttagcggtattcctctgaccaacgaacagtagtaacttagcagcttcagatcacacatgaagagaacttcctgaatcattcaacagcagttctcacaaatgt

SEQ ID NO: 560560 - DNA, 629 bp, Homo sapiens
  misc_feature (138)..(138): n is a, c, g, or t
tttacaagcagcacttggcttccaaaatggaccccctgacaatgttggggtcacatttcacaatgcgcctctttctctaaaattaaagctttagccctctttccaggtttaccaaaagttacttttattgaggcagtncccgagcttttaaaaagccgcttgtcctctaagaatccatattaacataaagaggtctttctacaaatgataagagactcttaaaatgagcacttccaattacaaaaagaatcgcgtattgagcatcaaccaagcgtctgacttctcgggaacctagtcaaatcaatacatcagttgtaaccaacagtagtttcattctgcgggtagacagacacaagcacgtttcttcctctggtgtaattagttctaaacaaataagctgggaattgccagaccaggacagtttgtttttattccagtctacaaataatcaagtcaatgcctgagtaagccctctacatagatttaggcacatgctaacctcgttgtaaaatctgtatttagctacaagttaatgaaaatacatatgttcattttaaaatcataactgatttggctggattatactaccccttacccccaaactcattatttttaggccaagatttccc

SEQ ID NO: 560561 - DNA, 798 bp, Homo sapiens
  misc_feature (23)..(23): n is a, c, g, or t
  misc_feature (63)..(63): n is a, c, g, or t
  misc_feature (66)..(66): n is a, c, g, or t
  misc_feature (108)..(108): n is a, c, g, or t
  misc_feature (132)..(132): n is a, c, g, or t
  misc_feature (158)..(158): n is a, c, g, or t
  misc_feature (189)..(190): n is a, c, g, or t
  misc_feature (203)..(203): n is a, c, g, or t
  misc_feature (216)..(216): n is a, c, g, or t
  misc_feature (231)..(231): n is a, c, g, or t
  misc_feature (237)..(237): n is a, c, g, or t
  misc_feature (386)..(386): n is a, c, g, or t
  misc_feature (390)..(391): n is a, c, g, or t
  misc_feature (429)..(429): n is a, c, g, or t
  misc_feature (543)..(543): n is a, c, g, or t
  misc_feature (625)..(625): n is a, c, g, or t
  misc_feature (677)..(677): n is a, c, g, or t
  misc_feature (679)..(679): n is a, c, g, or t
ttcaagaaatgggaattccagangctattgtctattcaattcaaaatctacctgaaggatttnggnatcgggtttactcagaagttcgatttcttactccaacagatnatgtatgtttctgttgggcggccngaaaaccctatgacttaggccggggnagggggaaaagggatatcagagaatgagganngggaagatagggnggtgacaagagangattacgaagaaaanggacanagcggcggggaagagaaattggagaggtaagcaactatttgggaaggaaagttgtgaccataaggttgaatttctaaagttcctgttaaaagaggttaaggaactgtgttaccttttgtcctaagaaaaaggcgtgaaggtatgtaaanactnngatcgattgctaattttcaaaggcttcttaggtaggtnactacagtaaactgtaactcagtccacattttcatttaggagctagactaccataacaatgcttatgctgtttccaagggtaggttatttttcattaaaagaagaatgaatgcnttttaagtttaattcttcatagctgaaagcacaaatttaacggcttcactggacagttttccttagaaggtagttttgtgtnactgtgactaaactattttattttaaaatgtcattcttatttatacattccnanagttggaaagactgatcttatatgtgtataatgttatattttgtacccctagagtcacactttaaaaggcgtcggagcactaagcctaatacaagtttttttagaaccactaaaaacaa

SEQ ID NO: 560562 - DNA, 846 bp, Homo sapiens
atataaatgacaggccctatgaagagtacccgtaagaatcaagagaaaaagaacctacaattggtacagaaagaggagctgagtcgatttttatatcataattcagaacgttcggctcacacagatcaaattttgtcttcccagtaccaaaacagtatccatgatcaggacaggcattacgcttaaagctgtaacctcttaactttctttgtggatatgtactaattaacaagtagttgatgatttaagtcaaatcataaacatatcagatcgatcacatgtcaagcaccgtgtttcctagcaaccattcaccaggttagcatttctcaggtggaaggtcagtgcttgcacacgtaaccctaaaagtcttagtggactcgaatcacatttcattattataaatctcagataccagtttttatcattgatcattaatttgggcttcatagggataacttggggctaacttattatggttgcagggcattgacagattttctttaaaagccgtatttcaagcaagatactagaattgttcatgggaatcgtttgattatagcatgtcttctcaaattataatattaggactgcttgaacacggaggccaaactcatattcacgttatatttccagttatagagttattgctcttatcagttggatgggtgtgggaacaaatttaataaaagttgaggtaattataggtttacaagtttaaattatcaaactgggaaataggatcgaaatattcccatctgaagacatgatcaattcaaatgtcaattttgtgattttggctaactgtcatgcttggagataggaaaagcactatcaaagaacagacta

SEQ ID NO: 560563 - DNA, 1320 bp, Homo sapiens
gatccttggatgaggaaactgaactctactcctctttacatctctatctctcttaaacaattactgctactcacacttctctttgccttcgcatatgcctggaacttttcactttcttcttaaccttactcttaagccactagaagaataagcaaagcaacacgggccggggtgccagtggcctcacggccgtggtaactcctcagcaacttgtgggaagcgcatgaggccaggcagggactcaccgctggaggctcaacggcaacttgcgagaacccagccgtggaccaaccagtggctcgcacaacccccaagctcttcataacataaaacacattcacaaacacctctagccctgcggccgcctgcactgggcggccggtgcccttaaataactcacccgagcactaaccatccaggcgcagcgcccatgacgcgcccagcgagccaaattcagccctgagaacaacccctggagcaaggcgccggcaacgctcggccacgcgggcacgccgcgcaactcactctgcgaccccaccgcgcccaactctcccaagacccgcgcgagccacgccaccgaccgtcgacggcccttcccacatcctccaaccaacacaacacacacaaaaaacacacaccacacaacaccaacacaaggcgacacgcccacacgacccacacgccacccaccacagcacgaccgcccgccctcacccacacacccccccacgccggccatctgagcaccacaaatggcccacccccaccatagagagaaaacagggaaacaaacaaggtgagaccagaatcagaagacgtaaccaacacaacaggaaaaacacactcacggggagcccccacacaccccatcagcaagccacgaccacaactccactacaacacaaataaccaaacacacaacccccccaagagagaaaaaacaccagacgaccacagacctacagagagacacgaagtatcacacaagcacagaacaaccccctccgcacccaccaaacacgacggcgaccatacatatcaaaccaagacgtaaataccacccacgtaacgaagacgcccagacaacccaccaaccacaacacacacgcaacacacccgcagacgaacctcacacaccaacccgctagaggacagacgcacagccatccactacgcaccgcacgccgcccccacacaaaagacgaccacccaacagaacaaacagcctaacgacggagacaatcagactacgacacacaaccaacctcaaccaccacaccacgcacccgcaacaccaacgaccacgctctaacgaaccac

SEQ ID NO: 560564 - DNA, 918 bp, Homo sapiens
caaaagaaagaaaaaaatcaaggggagtaaacacacctgtcgtgcgccgtggagacacgatggggcgtcagacctttgggagcacactataaaggggtcttttaatgcgagcgcgccgggttgcggtcacaaaagactggggtgaataccagtatgagaggtgaaaaagtacaaaacttgcagggggactctaaaacggccggggaatttcttcgggcgcccgccgaaggcgcaaaccacatcagaggggaaagcccagcggttgccgtgccccacgtcagggcaacgagcttcccagaaccggggttttgctcctcaaccccccaaggcaccctgtttctgttgaaagcccctagcgccggctatgccgcgcccgcttttaggaaaaggggctgttcctgccccacaggggagccccttttgctcccaccttattgggaagatttcttcccgcgtgcaagggccacccagggtctttcccagatattttctgccacactggggagcaatgctttctcttaaaataataactgtcgaacgcacaatgcggtgaaaaatgtgcccgctctaattggtgcacgtagtctcgtcacccgcgtagcatgttgggcgtccccgttttttaatgccgagggggtgactgtctccctcttcctgctttaaaaaacaattgtgcccaggatgtttgcccaacgaattagttgaccccaagaacccgctatgttggttgtggacaaagcagggagagcctcaccccctatgttgcgggtcgtattctaatcattcgggaagtcttctactaccagagaacgatatggagagcgggcgcacacacgagagaaaggtggggggaccaaaaaaaaaaaggcaaaaaccccctttttaaaaacccacaaacaaaaaaaacaaacataaaaa

SEQ ID NO: 560565 - DNA, 151 bp, Homo sapiens
  misc_feature (122)..(122): n is a, c, g, or t
  misc_feature (132)..(132): n is a, c, g, or t
aatcccagcactttgggaagctatggcgggtggatcaggaggtcaggatatcgacaccatcctggctaacacggtgaaacctcgcctcgactccaaatggttgaaaacagatctacagcctngcattcacangagatgggctctgcggtct

SEQ ID NO: 560566 - DNA, 105 bp, Homo sapiens
cctttcagttggagtaagaggttagctgtgcgttaagaactgtagaaatagggaaagcgctggaagatgaaatgaatgaaatgaagcgagaagggaagtttagag

SEQ ID NO: 560567 - DNA, 1004 bp, Homo sapiens
  misc_feature (12)..(12): n is a, c, g, or t
  misc_feature (93)..(94): n is a, c, g, or t
  misc_feature (142)..(142): n is a, c, g, or t
  misc_feature (762)..(762): n is a, c, g, or t
  misc_feature (857)..(857): n is a, c, g, or t
  misc_feature (935)..(935): n is a, c, g, or t
ttaggaggacangagaagccgttgtccttggtgccccctcagaaatctgcctgcagttctcaccaagccgctgtgaaaatggggataaacacnnccgggagctgtttctcaacttcacttattgtcttgattaccggttatntcttatcgtggctccttcgtgagggtcctatcagtacctgagaggccatgccccatggtcctgggattcgactgagatgctcccggagcttgcctgctcttatgccctgagagcgcccactgctgtcatttgtcacacggatgccatttctccatcctgaggggcacctggtgaccttgcacctcacaatatcacgctattgctgtagtgcataggaattgattattgtgcttctgccaaacgatgcctgcctcccaacgggctgaccaagtcgtacgctcaggcgaaccggttacattctatttctcccacccttctcaacttcgaaacattgtcgttaatcacaagtgcctacaagagcttgaaccactaaatcttgcgatttcataggatgatttgttaggaatctggctaccaacagctccgctgcgaaacttgctattcacccaccatattacgattttaatcccgcgtacggcgactgccaccctcaacatttgatcctccacgactggccctagaaggggcgcacgtttacgcgggatggtccttccgcccacgcccctttatcaatactattcactggtcgaataacacgtcagaacgtcaaccttctcatnacacccaccaagcaacgacacagtgtccctcctctctaccgtcctatcgctctgtgccgcacacatcttagctaattacgtctattactccgttntatcctcgagcctcactatctctcaactcctacctctcgcgacgaaccttcactctactctttgtcgtcatccagcantctactccttcgttcccctgcgcgcgcgctcgtgtcatctctctgcacacatacaacgcggcgctctcg

SEQ ID NO: 560568 - DNA, 536 bp, Homo sapiens
  misc_feature (10)..(10): n is a, c, g, or t
  misc_feature (40)..(40): n is a, c, g, or t
gagaaatgcnaggaatagacttagcattcacacgtcctgnttgcagcaatgagtgaaaggaatgagctctggttatgtatggagacttcatctgatagtatgtgatacagtacagatagagagatgagttgagccaagatgatgacgagagagatgagcgaaggatcagatactgatcatcaattgttataattgatttgaagactatgctagtggctatgctcactatgaggaacaagagaactaggggagctgctctggtggccgtgtgtgagaggagcaggagtgagtgtgtgtgcttgatgaattgtgtgtggttgttcaaaagtaccttagccacttagccttgtgcagaagactagttacacttaatgggccaagcaatagggtgtagcgttttatagaactgataatcaggcttatggataagaaaaatgagtttcaaatttaagatgtatattgatcgaagcaattgaagtatcatggattggattgtactgattcagtaaagtatgtttgccatagatactatataa

SEQ ID NO: 560569 - DNA, 738 bp, Homo sapiens
taaaaacaatggggaagggtttaattggtacttgggtatgaaatatgtgcggaaggggggtaaggaaggtattgaaataaaggcttgtatctgaataccccctgtggatataatgcacaacccggttgtgaatccccgttggactccctttttctctcccaacagctccagaaacgagcccatctcactcccgtggggctgctaccatccacccttcaacttcaggcttccccttccacgtgtcccatcacaagaaggtagttgacaagctgtgaactaccttctggtctcttttactttaagtttcctctggcctcttcttgagattggacgcttcatccaaacatcccttttaatccagaggctgggtgctactttcagcagactttatccttaattccctcaaacccatcttgcagcgtgtcctgggatccccgtcgtaccttaaggggaaactttcacaatgtccggagcccttgatgtcctgcaaatgaaggaggaggatgtcctaaagtccttgcagccaggaacccacttagtgtggcaccaatcgttgatctcccagatgtgaccagtacatctataaagggaacacgtgagggcatctatatcataacatctcaagaggacctgggaaaaagcttctgctggcagctcgtcgcattgttgccattgaaaaccctgtctgatgtcaggtaaatatcctccaggaatacgggccagagggctgtgcctgaa

SEQ ID NO: 560570 - DNA, 283 bp, Homo sapiens
tcaaggcagtggtctgtggctacaggaagctggttctactgtctgcttaacaaactgtctttgtgagtacagagattgggtttaccacttctgctgaggagaccacttaaaattcattcctgagtttccactgtgggagaatacccatggaataagataaaaaattaattccacaccctagtgtgtgtaagttcctcgctcataggaaatgcaacagtttgatgggagcatttgccctttgttcctgtgaggactggcaggcttttgactgacctctcattcc

SEQ ID NO: 560571 - DNA, 482 bp, Homo sapiens
  misc_feature (17)..(17): n is a, c, g, or t
  misc_feature (66)..(66): n is a, c, g, or t
  misc_feature (82)..(82): n is a, c, g, or t
  misc_feature (85)..(85): n is a, c, g, or t
  misc_feature (115)..(115): n is a, c, g, or t
  misc_feature (123)..(123): n is a, c, g, or t
  misc_feature (201)..(201): n is a, c, g, or t
  misc_feature (208)..(208): n is a, c, g, or t
  misc_feature (215)..(215): n is a, c, g, or t
  misc_feature (245)..(245): n is a, c, g, or t
  misc_feature (287)..(287): n is a, c, g, or t
  misc_feature (317)..(317): n is a, c, g, or t
  misc_feature (328)..(329): n is a, c, g, or t
  misc_feature (338)..(338): n is a, c, g, or t
  misc_feature (344)..(344): n is a, c, g, or t
  misc_feature (445)..(445): n is a, c, g, or t
aatgatttcaaatgtgncatgttacaaagaaagcagattgttactagtacttgtgcaaatatgtgnattaccataaaaatancanttctcatgaatagttgcccaattctggggnagtaaggnagaaagcaaaagtaaatgtttcaattacggttcccagaaagtatagtttattgaactgctataagctgtagatagatnaaaaganaaaaatnccaaaaatgaagaaaaaaaaacatttaaanaatcagcaaaattatcaaataaaaaatcataaaaacattaanttcattattaacaaatatttcaataaaaanaatgttcttanngcttggtcnaggcgnggaatattatgatgatatcagcctgtttgttaaagttttcgaagttctaagacaaattaggagggtaaaggagaagaatttgggatttgcttgtgcacatnggaaacaggctgggaatacaattgttttcctgactct

SEQ ID NO: 560572 - DNA, 212 bp, Homo sapiens
tgctcgaagagggccctctcgaaatccagcgctgacgccagcccctcgtcgccggtccgtccgccaccgaacaggatcccaccccgtgaacatccgcgaactgacccgcactcgcgctgtccctcctccttctgcggcggcgaccctcggcgacgcgcacggccacgacggaccgcgagcacgccggcgccgaagaggtcgagaaggctcgc

SEQ ID NO: 560573 - DNA, 109 bp, Homo sapiens
cgctctcgaggattcggtattgagtggcatgtgaaatggcgtgacaaaactctgtagcttatgctgaaactgtgtgccccctgaggctctgaggagacagagaaaggag

SEQ ID NO: 560574 - DNA, 470 bp, Homo sapiens
tcacgcccatgtcacaattcccacatgacatttccaggccagccagttcagttaaaggctgtcctgtgtcataacaaagccataactaggtcactcctgtctccaggcccctgtcccatgggctgtttcctcagctgagaagaatgggtagtcttctcctgcctgcttcctcccaggtctagctcaaggatcatctcttttggaaagaacatttctgatctcccaagcccacagtattcttggccatttctgaacatcctgtggacagagatggcctaaggatttacgtcctagcagtacagcagtcgctcccgaggggactacttccaagcaaataagacatctttgtaggtgttaatcatggaatgattattaaacttcaattagacaagtttgctaagcatccattagttttatagttatttctcatttaactgttatttctacattacaaatgaatcttattgcta

SEQ ID NO: 560575 - DNA, 871 bp, Homo sapiens
  misc_feature (514)..(514): n is a, c, g, or t
tctagccaaatgctatgttgcaaaagtggcatcgttagtttttatgtctggtcttcttgtttactatacctgggtaatttgtgttaccaaaaaaaaaaaaaaaaagggaagggtaggtcagacacacaagaaaagcaatcagggtggtaacgcttaaaggtacaactttcaagggtcattaccaaacaagcaggggtttgttttgtatactttaaaaacattatggctacatatcatgggccatttccatatttggggggtttgggctactcttatacaaggggaatcacttgggaaaatggtcatccagccactgaattggccattatatatatctaaaaaggtttctaagattgacaggttatcactatttgggtgtatatctccaggctggactttggaaagagggtactagtatccctctagccagatggttagttttcggtggggtaatcaaacaacggtggtactaagggaaagtaaaagctaggacctaaatcagaatcatagtggnctgcatatgtggtaccagggtcgtgtgcatgtgttcacagggatgagtgagaggttgagaagaacttattggacatttttctgtggttgaataagaaaacccctttcttggtcttcaggttaaggaaggagatactaagataggagtgttcatccctatctaaggtcgggggggaactaagaacgacagaagcgggggggcttggctttacagtgttctcccctaaaagtgatttggggacgtactatcactttaagctaacttggtggttgaactatttttacctagtaacaggttctttgggttaccatgtattgccacgcttgttttaagccaacttacgttagccaatgtctt

SEQ ID NO: 560576 - DNA, 517 bp, Homo sapiens
actgatactaggaaaaggctgtggcgacgccgggacgcatcggtggtgcagaacatcggtgcaccaaatcataacggccaggtgcttcgagtacttggaatctcctgggtgactgtagctggtgccatatctcctcatcaacccaaatcccgcttcccagatggacctggccattgtctaggatatacttgtccatgacaggcgcaggagcggggtaataggacgacgtatttgcttcctcactgaaagtgctccgcaactccggctcgggctcgaaacattctgactttactttttccagatcaatggcgggaccgctgccaagcctcaggagcagcacgtcctggagcctccggttaaggtcacggagctccttcatttcagacacaagtgccccgtactccttgagcttctgggccggtggtaccagctgcctacgagtccgctccagctcctgcgggaggtggcgcatctcttcctgttgctgctggtagttgcgcagcagctcctcatacag

SEQ ID NO: 560577 - DNA, 141 bp, Homo sapiens
gtactctagaggataccgttgtgctctaatgcagttgtgctctaatgcagttgtgctctaatgcagttgtgctctaatgcagtttgtgctctaatgcagtttgtgcctctaatgcagtttgttgcctctaatgcagtttgt

SEQ ID NO: 560578 - DNA, 446 bp, Homo sapiens
actcttgaggaatatccataaaatctttgactaccagtgtcctcatttgttttcctgtttacttctaatagcattatagtcactggtcttaggtttaagactttacttactaattagtgaagtatcttccatatatttggagatggacatttatgagtggcttccccatcattcatcttccttcttttaagggacagctacaatttttatatgaggatctactttctataactcttagtccaaggctgaaatcatcttcaccattagctattgccaatatattgccttttggtttaaggaaatttaggttggattccctgcaataatgcaaccataaccttccaacggctgaatttatcaaccatagggtcttggtcttcaataacttagttgggttttggcagacaagatcaaatttgggccaataatagttgctctcactttca

SEQ ID NO: 560579 - DNA, 418 bp, Homo sapiens
  misc_feature (72)..(72): n is a, c, g, or t
  misc_feature (136)..(136): n is a, c, g, or t
  misc_feature (288)..(288): n is a, c, g, or t
  misc_feature (314)..(314): n is a, c, g, or t
  misc_feature (377)..(377): n is a, c, g, or t
agctggtgttagagctgcttcatatttaaactagtccatcccatagtctaggtcaaaccagttttacagccncctggggggcgcttgacccaaactcttgtgtgttacattttgagaggtttcataccagaatgtnccaaaaagtgcacaaggtaaaggaatttacagccagaaacaaatatacatttgttcattcttgacttccctaagcagataagcagaaacttgttaacttcatactttgtttatgtgctacatatttttgactaaaagttatagaatgttatnctctggggaatcttttacaggtgagnatgggatagcagtattcctcagattaaactggatcaccataaacctgtaggccagggtgaatnagtagtcctttttatagttgaatacaattttttattcacca

SEQ ID NO: 560580 - DNA, 780 bp, Homo sapiens
  misc_feature (685)..(685): n is a, c, g, or t
  misc_feature (695)..(695): n is a, c, g, or t
  misc_feature (742)..(742): n is a, c, g, or t
  misc_feature (744)..(748): n is a, c, g, or t
  misc_feature (753)..(754): n is a, c, g, or t
  misc_feature (759)..(760): n is a, c, g, or t
  misc_feature (762)..(763): n is a, c, g, or t
gacttgtcttttttaagtttgaaacaatttcttagggagagtaggattgaaagagtagagaaacaggggagataaagacagagtagggtttgggcagattcctgttgtttttcttataagctctttgttagtaatttagtattgtatttctaccacatatgttttctaccctatgcaagcatgacaccttttaaacaagatagatataaactgtattaaaatttacaacacagcttgcatgccaacatagtcttccatgatttggtctctgcgagtgtttccagatttgcctcccacctctatcccttgctttctttattccagctgtgatgcacacatttcagcgtgaatgcggccctccttctcatttctacagattgttctgtgctcctgggtcattcctttcttccacctgtccttccctccacttcacaatagaatagagaagtttctgatgtttgggcttccttttgggtagaacaacaacaaaagtcaactagaaaaatgtccttttttagagttatattttcagagtgaggactcatttatcatttatatttatcataagaaattaaaacattttcactttttgttttttcctgttaaatctttaagtatctttaaccaggacttaattaaacttgaatggtctgcaatctttttcaaatgtgaataatttcaatgnatattttctncattagctaaatttggttagtgtttagtgtgtatttttaataaatcnannnnngcccnntgggnngnnaccactgagccaaccgg

SEQ ID NO: 560581 - DNA, 635 bp, Homo sapiens
cctggggtgcaaggagacttttcccggagggatttcgcctccccctgtaaaggggttaagttgtttcctttcttaaaaaaaaaaaaaatctccccggccggtcttttcttcacctggttgggagccccaagggtcctggggttacatttaatggacctgtctccgggcgttaagaaaaggcctttccttttggtcacaaccaattccagtctgggaattctttcccgcagtagtgctcccctttaaaatgaaaggggaattaagcgccctttctttttgaagtgccaacgaggtattagcagtcatttctttgggctcaggtttccacaaaaaagggccgttttatttccgtcaaaaatttgtctcctggatagcgagcaggcacaattttatatttttgcacatggaaaagtcaagccctagtgtccctgggtgcgggtggcccctatgttcttaagaatggtgtatatttttttaaagtttatcatccattcttgttgggcgggtgtgtcgtccccaaaaacaccataaaactgggcggttggttggccaccattggatggctgggctgtcaaaaataacaatgggttttgaacaaaagtcacatactacgtggctcccaaaaccaaaaaaaa

SEQ ID NO: 560582 - DNA, 355 bp, Homo sapiens
  misc_feature (75)..(75): n is a, c, g, or t
  misc_feature (330)..(330): n is a, c, g, or t
gactgaaaatagattctgcaatcaagggtgctgatattaaataaagatctctgaaaataagaagaggtattcttnggggcaggcgcggtggctcacgcctgttaatcccagcactttgggaggcgagcgggtggatcatctgaggtcggaagttcgagaccagcctggctaacatggcgaaaccccttctctactaaagatactaaagatgcagtggcacacacctgtagtcccagctactcgggaggctgaggcaggagaatcgcttgaactcgggaggcggaagttgcagtgagccgagatctcaccagtgcactccagcctgggcancagagtatggctttgtcgcgtcgac

SEQ ID NO: 560583 - DNA, 349 bp, Homo sapiens
  misc_feature (6)..(6): n is a, c, g, or t
attttnttgaagtttatttattacaattatttggttttttgaccattggaaaagttacttatttaataaaagttcatggaaaaaaatgagcaaagacagacttgtgaattagacaaaatctcactgaaatttaatatactcatctctcaaagagagaattattcattgggctgcatgaatgacaactgactgtattgacctgtctctaggagccagcacactcagggtttctccactctctttgtctccaagtctaaaagatagagtttattatgacaagtacctattacagtgtgctcttcatgcagttggccaaattcatctaggtctcgcccctttgggaaggagg

SEQ ID NO: 560584 - DNA, 555 bp, Homo sapiens
  misc_feature (8)..(8): n is a, c, g, or t
  misc_feature (49)..(49): n is a, c, g, or t
  misc_feature (73)..(73): n is a, c, g, or t
  misc_feature (79)..(79): n is a, c, g, or t
  misc_feature (109)..(109): n is a, c, g, or t
  misc_feature (124)..(124): n is a, c, g, or t
  misc_feature (507)..(507): n is a, c, g, or t
  misc_feature (549)..(549): n is a, c, g, or t
acctttanccatacagccccagttggcacacacacctcacggaacccgnaaccagtcctccacacccggcatnagtagncagataatggtaaaaggccccttggaaaanagataggggatcctnaggggcccatcaatttagtggaccttcctatcaaaattgagaagttttatccctgaaatagccttcccaatggaagttagaagtgggcctgacattgcattatttggtggaaaaaaccatcaaggtctgtgcagtaaagctgatgcagctctgtgaactagcaaatcctattagtacttagcctgatcacctgggaagatgaaattgtccttactgagatgtggaaggctgaaagtgaaacaggttgatctatatttattggagtattgctgggtagaaaatttgtcatcacgttatccccaatgcctagtatctaggtatctagtggcacttaataggtattcggtaaatatttgttgaatgaattccctgaattctaaaanggcttcaatctgagctatttttcacatcacctacctgaaaanatgaga

SEQ ID NO: 560585 - DNA, 792 bp, Homo sapiens
tatttgtaataattaaactttgatgttgagaaagtcaaaaaataaattgaaaaactaaagaaataaaaaacaagagaaaagaaataaaggacgggggcacccagaattcgccagagtgggagctccagaaccgtcactggcgccctgcagcctctttatcttggagaggtgctccccatagggctgcgaagctagaactggaattgggcccgctagtacatcaattccttagaccgtgaacactggagcctcactaccagtagatgaaggaactagcgacaacatgaaacgttgaggagagtggagaccattagggcgaaggatctgccgctcagattttcaagtctggacgtgtggactcatgactttgactttgaacctgggcggtacgagcccatcgaaaacattgggcctggcctatgtctaggaccttgagcctgacttttaaattagggatcattgttatagacgtgggacctccgaaatctggatgtctaaagattttctctggatcttgtacaatagacctggacataaccttggacctggaaccttgtacttagaactttgatccttgatccatactgtggacctgaatcctgaactttccctagatgttaaacacaaatttataattgtttcaacctgtactttggaactgaaccaatacctggatttggacctatttctaggatctttgaggtaaaccttgtaacttgctgctttaccttgggaatccaggcagtccagatctggaccttagacttgaaactggattacttttggatatgg

SEQ ID NO: 560586 - DNA, 143 bp, Homo sapiens
agcttctctttgtgcagtgttagtattcaccctggcagtgagtgccatgttttttgggtgagggcagatcccagcacctattgaataccatagagtaatgatgtaacagtgcaagatttttttttttaagtgacataattgtc

SEQ ID NO: 560587 - DNA, 377 bp, Homo sapiens
agctcgatcaaacggctaggttcgcgttttgctgacccactgcatctatccataatggggaacctacccaacaaccggctaagtgtcagatgcagagaagctgtttgatgtcatcatcgttcaacatgaaaaccggtgacgagccttcaactccagggcttcccataatggcgaggtcaacgtacatatcccttgtaagggcaaagccttgttgagaggttgggggggtgaagtcgcctttgaactgcaaacctgcacgctcatagaacgaaatcaaatcgtgattgcatagcaggcaagtgccttgcgaatagtccaatacaccattcagcaactgagtgccaatgccatgccccctatagggttagatcgagcta

SEQ ID NO: 560588 - DNA, 436 bp, Homo sapiens
gctccttaccccaagaacaagaaagcgacgagccgcaaagatgaagaattagaccccatggaccccagctcatactcagatgcaccccggggcacatggtcaacaggactccccaagaggaacgaggccaagacaggtgctgacaccacggcagctgggcccctcttccagcagcgcccttacccttccccgggcgctgtgctccgcgccaatgcagaagcctcccgaaccaaacagcaggactgactgaccccttgttccctgtagctttggcagtttgcgtttctgtgtttcttccttgtggctctgggacaggagccatggcttctatgtgctgcattattattccaccagtgagctacactcccggcccctttagtgttgtttgtaaacaacaagcccttgttgtttaataaaagctttttttgtggaacat

SEQ ID NO: 560589 - DNA, 212 bp, Homo sapiens
ctaattaaatcttttctaattttgggactttatcaggaaggttttaagtgtggcccataaaagctacagtgcatagttgtagacaaagtacattttggggaaacaacatttatatgtaccctttactgtttgataaaccaaattaaaaaaaaattgtatttcattacttatactgggaccccattcccaaaataataaaaatccctttcata

SEQ ID NO: 560590 - DNA, 1020 bp, Homo sapiens
tggaaaagcaacttttattgaaaaattgggagggaaggttccatattattttataattagtaaaaaatacataaagtaggaagtgtgtgtaaaaaaacgccggtggctgcagcggcagcggcagcgttgtggccaggaggcgtggaggggcccagggagtggccacccccacagggagttcagggagggccgtggggacgaacaaggcggaaagaggtataagcgtctcaaaagaggtcaaggtgcatacgcggggaagaagaatcactcgtgaagggggaaggccaccgcgggtggcgaacagtacaccaacgaaaccgtggtgacaccaaagcaggggacagggggaagggcatatgcgggtccacaaagaacttaaaaacccccaaacaggccacttgcgaccacaaccacctacactacacaaataacaaactataacaccctgggccccctacggctcccacaggggcgataaaccccagtggccccaatcccacaaaatcccgtgagacccaaaacccagggggccacaacacatcacgcaagaccgatccaaccaaaaagacacgaggacccttagagagcgctggggagagacaagcgatgtatggcgccctggcacaacacccccacagaggcaaaagagcgtagcagaggacccaagcacgtaaccactaagcagaagagatggacactacggcagtgcccaacacagcggattgacacctgcagggccccccggggcccccacaagagcaacgaacgacacgaaaacacagaggaaagacaagacccaacgcaccaacagagccgcacatgagcattgacaaaagaacataccacgggaggcacaaccacatgggggccagggaaaccctgcaccaggacccccccccagaacgccaacaaattacgcaacaaatcactgtacacaagactccatacacaacatatcccacaacaaacagcacacgccgagaaataggcaccaacaacgcacacacaaggaccacaaat

SEQ ID NO: 560591 - DNA, 1434 bp, Homo sapiens
acctcccattccgataaaatcaccatccaccccactggccctccttccagataccctctctctaattgggttctgcatgtaaaatactccacaataaataaataattgaacaaattaaaaaaaaaaaaaaaaaaaaaaaaaaaaaaaaaaaaaaaaaaaaaaaaaaaaaaaaaaaaaaaaaagagagagagacaagaaaaaaaaaaaaaaaaaagaaacaagaagaaaacaaagaggagaccccgtaagagggcggcacgcgaggaacacacgagaagcgcaagaaggcaagaggcagcagaacgcacgcacagggcagagcaacacgagacagcacaaagagagacaaaaaaaaggggaaaacacgcggaacgacgaccagcggacaagaaaagaacgacagaacacagaagagcgcgagaagaagagaacggagaaaaagcaccgccaagagaacacgaacaaagaaaaacacagacagaggaaagccaacggggagacaacgaaacaaagacgcaaacagcagaagaaaaaaagagaagcacagcgcaagagaacgagcacaacgacaaaaaaaaaaagaagaaacaaaaacgagacgacacacacaaaacataaagccagacaacacaaagaagacaccacgccacgacagaacagaaacagagaacacagaacagacaagaagcacagagcgcacaacgcgaggaggagcgagacaaaacaggaaaaagagaatgaaagagagagagagaagaacacgacagccgacaacggaacagaaacgagagagcaggaggacaaaccagcaaagcaacaagcgagcaagcgagcacaccaagagcaacacacgagacgaagacgagcaaaagaaggagagaggagagaggaagacagacagagaagagagggagacgagagaagcagaagaagaagagaaagcagcagggagaggaagggaggagaaggcagaaggaagggaaagaaacgagcggagaaaaagagaaagaggagaaagagagcggagagacagcagcaaagagaagagagagaagacaaagagaacaagacagagcagaagcacacggaaaagcgaggagaaagaggcggagagaaggcaaggagagaacagaagaagggaagggagaagagagcagcgagagagcaacacagagcagacagaggaaaaagagcaaaagagaggagagacgaaagcggggaacaggcaacagagacagacaggccaacacaagaaggaagagcaacgaagcaaaaaagcgagacagaagagaagacgaagaggacggagagaaggaagaaacaaaagagatgagaggaaagcaagtaaagaaaaagaaggaagggagtgagcgcgaagaacgccaagcaagagcgcgagacagaagagaaaccagacgagacagaccacagaag

SEQ ID NO: 560592 - DNA, 218 bp, Homo sapiens
gaaggcacggcgacaagagcacactgcaagatggtcttacaaaccacttactactatatccggaaaactcacggctcacactgcttaacacgtctcgatcagccatcctataaataagcctccactggtacgctctcacgcctgagcgaacagcttcttgctggcaaccggatcatagttacagacaagattcatcgcatccctcagtctcccctaca

SEQ ID NO: 560593 - DNA, 1938 bp, Homo sapiens
  misc_feature (516)..(516): n is a, c, g, or t
  misc_feature (692)..(692): n is a, c, g, or t
  misc_feature (719)..(719): n is a, c, g, or t
  misc_feature (757)..(757): n is a, c, g, or t
  misc_feature (769)..(769): n is a, c, g, or t
  misc_feature (852)..(852): n is a, c, g, or t
  misc_feature (898)..(898): n is a, c, g, or t
  misc_feature (902)..(902): n is a, c, g, or t
  misc_feature (1548)..(1548): n is a, c, g, or t
gcctgtccttttcgtcgtgctgtggtctacttctctcttcagtgtccgccctggctgagtgtgtcactctatgttttgtccggtgactgtggcgtgctgctcgttatggcagacgccagcgtgtgggtttggctgtctgcactggtgctacgtcctacgcctactgttggtgtggctactccgctcgtcagctcctagagagcggcttgtgtggggcagcctctataccactctgttgggtcgcgttctgctctctcgttgtcgcaagcactcttgttgcctgtgctttttgggagattttttcgcgtttttgtgcatgcccccagtgcgctcgttgtatactcttcgtgcgggtcgtgaccacagccgcggctgtggttgggaggggagatcgatgggtgtgcgccgacgaccgcccgagctggagtgtgggtggcgcgcaccaccatgtgtcggtgtggtagtcgtatgtgcgtccgccgcgtggtgtgagtcagcacctgttgaggtagtggntcactctagtggggcgctctcccggcgtggtcttgatataatatatcggcggtccccgtcagtgggtgcgcagtcacccacagccggcccgtcgtttctgattgggtctttcctcgcgttgcgcttggtacttaagttgccgttctggtgtccgccgcgctgtcctcgcccccgcncgtggcgtgcccgatgagggtgtagcngcctggcttgctgtggtaaggatgctggatgagatgtnacaccgaccgcngtctggtgtggaagatgaggcttctgtggatcagatgcagtgaccgcttcggcctgggtccctacgtacaaccgtactgtggngcgtgtaagggaaaaaaatggtttaatgaaatcgtgatggtgaggncccntgctgtgaatatattggttgtatatataaacttggttgggcccaccaccacacggcgggtgtttaataatgtgtttgttgtctcctaccacgtgttatagctgtaagcaccgttccgcctcccctgtggtccgcccccccacattattcgtcggtagggggtctttatagtaacaggggggacacctcctttgtggccaacaaatttccaacgcatatcacaccagcggaagaggaggtgttgagagaaaacaaagcgttaaacagttttaagggcgagaataatttttaataaggagacattatttgaggggagacacgactgtgcgccgcgcctctagaatactctagtgtgtgtgtttgtgagtagttgtccccgcgcttctcgacggagtattgtccccactgctgcgtgtgtgttgtcctgtgtgtcggctcgccccccactttgtttatggccccaccctggacttttgggacacactcttgagctcttctgtatgttgtcgctctttcacatagactgtcacacacagctgataaactgtctcggtgcactcaacacctctagagaggcctctcttacatcacagagagagagatagtccactgcagatagagagagactctgtgaaaagtgtgagatnaatttagtgttatactctggtccaccttatggagccacgctatagtgttgagagaaattaaggagagcacattttatatttagacaagggtttgtagaattatagcactataggcgtgtgataatcttatatggtttctaccacagcgtatccacaggagactatagaccacaggccaccggagaacacaacccaccactttctatggcccacaccttcttccactgaaacttgcacgatgagcctacccacaaatcacttttatataatgtgcttgccctttttctgtgttaaatcacgaattaatgcttatctgaacaagcgaaggttttctctcccattaaaaagccacgtgaaggcacttttccaaaattaaagaatgagggggga

SEQ ID NO: 560594 - DNA, 539 bp, Homo sapiens
cgatctagaggatcccagcggctgcctttttttttcgttgcggcgccgggcgggtgaggttgtctagtccatgctcggaggccatgcctgtccaaggtgcccgctgcagtctgtgcaggtcttcggacgcaagaagacagtgacagttgtggcgcactgcaaatgcggcaatggtctcatcaaggtgaatgggctggccctggatgatgattgagcctgcgcatgcttacagtacaatgcttgctggagccagttcgtgcttctcggcaaggagcgaatttgttggtgtagacatccgttgtccgtgtccagggtgggtggtcaatgtggcccagatttatgctaattccgtcagtccatcttccaaagccctggtggcctattaccaggacatatgttggatgcaggttccaaggacaggagcacaaaggacatcctcatccagtatgaccgtaccctgcttggtagctgacccctcgtcggctgcgaagtccaacaaatgtttgcaggccctgttgcccgtgctcggtaccagaaat

SEQ ID NO: 560595 - DNA, 859 bp, Homo sapiens
ggcggtttgcagacgccaccgcgaggaaaaccgtgtactattagccatggtcaaccccaccgtgtcttcgacattgccgtcgagggagcccttggccgcgtctccttttgagctgtttgcagacaaggtcccaaagacagcagaaaatttcgtgctctgagcattgagagaagggatgggttataagggtccctgtttcacagaattattccaggtttatgtgtcagggtggtgacttcacacgcaataagtggcatggtggaaagtccatctatggggagaaatttgaagatgagaattcatcctaaagcatacgggtcctggcatctttgtccatggcaaatgtggacccaacaaaatggttcccagtttttcatctgcacttgcaagactgaggtggttggatggcaagcatgtgggtgttgcacgttgaaagaaggcatgattattgtggaggccatggagcgcttgtgggtccaggaatggaaagaccagaagaagatcacattgtgatgtggacaatcgaataatgtttgactgtgtgtttatcttaccacagatattcctttgtagctcaggagagcacccctccacccaattgtgtcgagtatctagaatcttgtggtctcgctgcagttcctgtggttccatgttttcttgtccctccatgctaagtgattgcgacgttacgtattggttttgattaaacccatagaaaaaaaaaaaaaatttgggcgccgcgccgaaagtttacacctcgtgggcgcgccaagatcggagatgtctgtcaaagactggcagttggtccacaaaaccggagcggtacacacagggtttatagagtctataccgcgccaac

SEQ ID NO: 560596 - DNA, 265 bp, Homo sapiens
atcctgttcgacaacttccttagagacgatactacgaaatagtacacggagtaagctgcttcctgggctcctacctcgatttccaaggtttttacttggaaaagccctgggggttatagaagggatttgatctccaaggtcctcaactgatactgtgacattgaatctgggattagggagcccccacagtatgtactggagttgccagtcctctgcgtcagagaagtgataatacatctcaattttccagtgcttagcacaagca

SEQ ID NO: 560597 - DNA, 104 bp, Homo sapiens
tgtagcggctgggatgctgtctagagcggaagctttgaggctctagctgggggctgttgttgtttaacctttccgtcatatgacgaaaacggcatcttcatcgg

SEQ ID NO: 560598 - DNA, 367 bp, Homo sapiens
  misc_feature (25)..(25): n is a, c, g, or t
  misc_feature (231)..(231): n is a, c, g, or t
  misc_feature (235)..(235): n is a, c, g, or t
  misc_feature (347)..(347): n is a, c, g, or t
tgggggctctcgctcctccttctangtcagctccgcccgctgccgtctccttgggtagggggccctcgagactagagttcaacagcgcggcctcggtcagccccgagtcgtcatccatgctgatgaagatgcccggggtctcgcactcaggcccctcctcccggaaatccatggcttcctcagacgggggcgggcctggcccgggccgacggagagggagagggggagganaggnggggtgtgcccccaccccccccggcctcagcctcctgttccccccccagctgccgctttaaggccttctcctgggccagttgcagccgatgaggtccgaggggggccggggnggctggggccggcgcaaagg

SEQ ID NO: 560599 - DNA, 242 bp, Homo sapiens
catggatgtaatcccgaggtacttggggggctgaagcacgagaaatcgcttgaacccaggaagacaggcgtagcagtgagctagagatcatatccactgtactaccagcctgggcaacagagtaaaactctgtcaaaaaaaaaaaatcctaaattcaagtaatatgggttaagaaaaaaaaaatcagcaggaattaaaaaatactgaggctcagtaattctacgcatccatgatccacactt

SEQ ID NO: 560600 - DNA, 285 bp, Homo sapiens
agccccaggcatagcttcagggcacaggcgatgaatgccagagcctccagctggaactgagggggtatctccagctcctcctcctcagcctctatctggtgcttgagcttctggtgctataaaatacctgaatgatcacatctaccattgggtcagccatctcttacatcttcgccttaggaaccttcctcttcctccatctatgtagccgtctgactcctcccttatgatcagccggacatcggcgctcaccttgaagccgtggtccttcttcctgccccgacc

SEQ ID NO: 560601 - DNA, 114 bp, Homo sapiens
tttaatattatttgggaagaataaatgaagctctacttgtcttatgttactaatacgatgaataacgttcttcacaatatttacataaaacttctcagtcaaaaacgataatat

SEQ ID NO: 560602 - DNA, 448 bp, Homo sapiens
gcccacctcgtgcctttatccgccctgtcccttcctctctgcgcatctcacccgcccggctggccccacctcgactctgaatcccgggcgggaggaggaccccgcagcctccaggtgtagtggtctgctatgtgcgtcctggatggggaccttgtctcctctcctgttgtctggccggtacattgatgatgtagagcccgtccttgggctctggtccctgcgaagcaggctctcccgggcccacggggcggacgcagcaataccaaatttgccactaaaaccgctggtcccaggagacggagccccgaaggcctgccaatggcggctgtgtcacacggatgcgtggcagcactgacgtgacgggacacaaagggacaggctcaattcctgaccccaaacccaggacccaggacagagtcaggagccatgccacgggagacacacacaa

SEQ ID NO: 560603 - DNA, 102 bp, Homo sapiens
tgcaggatcttatggctgcgccggcaactagtcgggctcgcttttggcactgtcgggaggcatttgtgacctgaacctgaaaatcccagaaatcaacagcag

SEQ ID NO: 560604 - DNA, 911 bp, Homo sapiens
ggaaaaaaggcgggagaagccccggcgaaggtttgaagctgcttctgtcgagatatgcaattcattcatgaaacatcacctcggagctgggtaaccgagaggcgctaaccctgtctttagatttacaggccaatgcttcattcagccattttaagctctatcgccgcactgatgttcgccggaccgtgtgagctattctctacatatgccacaaagacattggaatccactatatcctataatacggactgcattgagcatggtagtcctagggcagcagactctgaaacgttgcttcctatattgctaaaggcccggagcgtggtgcctaacccacgtgacacatctctcctagggtaacgaatcacatctaccaacgtaatcgtgcacagcgccatgcgttaggtaataatcttcttcatagtaatacccatcataactcggaggctttggcaacttgaagtagttcccctaataatcggtgcccccgatatggtgttatccgacgtataaacgaacataatgcttcttgagtcgttacctaccctctctactactcctgctcgcatctggctatagtggaggccggagccggagcggttgaacaagtctaccctctcttagcaaggaaaatactcccaccatggagcttcgtagagctaacatcttctccttagactagcggggtctccttatcttaggggcatcagttcatcccaccaatatagttaaaccccggcatgccaatacaacgccctgtcgatgtcagcctatacaggagcgaacgagattttcaggctaggggatagatctgtaagagaccacacactttgacgcgagagaccgttaacagacaattgttggcaagaaacacagggaacccatgaacgacaggaacttgtaaggaagga

SEQ ID NO: 560605 - DNA, 1627 bp, Homo sapiens
  misc_feature (250)..(250): n is a, c, g, or t
  misc_feature (282)..(282): n is a, c, g, or t
  misc_feature (576)..(576): n is a, c, g, or t
tttataaagagatcatggtggccactgttgcagctattgaagaatgaggtgctggacttgaagcgagcttctttcgcctgcatcatgtaggtagcgtgcactgcacatagggaacaagaactattgcacctataaggaagtaaagaaaacgagaacgaaacacgtggcgctctgtggtcattcgatggctagtttagtactggagcatgcttaaactagagacagaaggtaagtaccgcagttgacctgncgcattatggactaggggatagaacgtgtaancatatgctgtgttcgctgcttgacgtgttacgcacacaattagtctcgtgtcctactgtggacttgaactgctggaatttatcttgtaaaaattggatggagtgtggctctcatttgttgttgcagatcattagcgcgaccatctaaagctaatcgtaaatcaggcccaagatattcagtgcagacaaccgcagtctataatcccatatactgtcgtgggtgagtaaaatttccgaatgatcgataacattggcaagtttcatctatatatggagacgtcgcgtgcatatttgncaatatgaatgtcacagctgtctgtataatattataattgcaaaaagatatccagacagaagagtatgcgaaccaggatgagatgtcatgacatatggtgcataaatgaagcccaacgtaagtagagtggaccacagcagtgctctcgattgacgaaagcacattggcgctatgtttgggcaccatatgcaccaggaattgagggaagtgtggcacctctgaaacccttgtgtttagaactaattctcgtaaaggtgatggccaatcggcgtcataggatggtctgagcctatggtcaagacacttcggcccatccagggatagtaggcaatgaacaacaatttcaggtaaccacttcaacagggatgttgaaaacgggagaaaaagggggaataatatcgtacagaagtttaaatttgagagacggcgaaagagggtaaaacaacaaatttggggacatataatgagaaagcgtaaaggaaagacccatatataacgctgaaatgagcgagacatgtgggaagagggataatcaggatacgattcagacactattatattgaccccgtaaaaaaattaaaaatttgtcttataaaaaagctcctgtaaaagtaattggcttgtctaggaagattaatataacgattgttaaaactaaaatagtgactaggagacataaagctattgggaacaaatacaaagacaaaagataactacttaagggaaaagttagatagaacagaccacaaacacacagatgaggccaccccgaaagaaagacaatagcgttcaacacgagaaatctgtatgcaacaaaagaacaagcagcaaactagcagacagaaggacgcaaagagaacaggatgagctaacgaagcaattcacaaagtcaacgaccacacagagggccagacaccagacgagaaagaaggagcacgaagacgaaacaacacaaaaacaaaaacatgagaagacacaagcaagagccacgcccagaaaacacagaagcaatacaaacacgaccgacacagacaacgaagacacacacaaa

SEQ ID NO: 560606 - DNA, 98 bp, Homo sapiens
ggttgtcgggggtaagatgccatattgattacaggccagcaaagaccagtaccaggatttacttgaccattccccttatttttcatctagaggaatct

SEQ ID NO: 560607 - DNA, 467 bp, Homo sapiens
taacgaatccactgtaaattgattacagattaaaactactcaatgttcgtcagtaatcgcattagcccctagtcatgttagagccgtatggtgagttgcctcgaccagcgtggtaaactggtgattttccggaatacctcccttacgcgtgattggaaagaagcaatgcatcgtgtcagtttaggataggcacgtggctcagtcaccaaatgcagtattttatacaccgtgtgatatgcttagctcttatactttgttgaaggcagctttcatggaatcttccttgaaagacccttggagatcaatgcacggatacctcttgggcttgccacgagaagaccatgatcccgggcctctttggctctatgtcgacaacaggtgatggttgccgtggcccttataagactcagcattttctaatgccagggcatgagactaaggtgccgtatcctctgtggagagttcta

SEQ ID NO: 560608 - DNA, 347 bp, Homo sapiens
  misc_feature (257)..(257): n is a, c, g, or t
  misc_feature (300)..(300): n is a, c, g, or t
tggaacatgtagaggagaaagatctcacaaagaaggtgacatcgtaccagggtcatagttgttaccttcttgctcatcctcagattattaagcgattattcacatttaattttaatagtttgcaagaaaaatcaacactggaaaattaaatactttaagtgaaaaaagtatataaaaagattaaaaatttctaaaataataataatctaaataggctacttacctactactttttggaaatggaaaaaggaaaaggnaaaaaacagctattaaatatatctttggggttaccctggaaangttttaaaagtttaaaatttttaatcccctatagcctatattgtttg

SEQ ID NO: 560609 - DNA, 302 bp, Homo sapiens
gaattccccccccccccccccccccttgtttgggttaagggggtttttaggtttgtttgtttgtttgtttgtttaggaaatggagtctggctctgaagcccaggtttttgtgaagtggaacaatctcggttcactgcaacctccgcctcccaggttcaagtgattgttctgactcagcctcccgagtagctgagactacaggtgactgccactatgcccagataattttaatatttatagaagagacggggtctcaccattttggccaggctggtctcaaactcctgactcgtgatcccccc

SEQ ID NO: 560610 - DNA, 1255 bp, Homo sapiens
tttcttacttggtgtttctgttgctgttttcgcctctggtcgtcgtcttttgttgtgtcggccgtgtcgtcattgtgccctctcctgcgtgtgttgggctactgtcttgcttccttgatatttgttgcaccatgcttttatttgctcttcataaggttttctcgctccatgttacgggccttttgacagggtccttcctccctcgtgggtctcggcgccccgcggtgtttctctctctggtgccatcttgctgcggctctccttgtggacctctcccggatttccccttggcctggagtcttcttgtgcccttcgggcctttcctcatggggctatccactcgggggtccccccgttgtgagccttttttttttccggatttctccccgttttggaattggatgtacccccgaagttctgcgttgggcgttggtttcacgggagctttcattctcgtccccttttccccaagactttggaagggccccggcttgtatcctgtcttgtgaagaatgaggtttcttctcttgggccccacgcggggtccaccgggcccccccctcatgggcctctctgcatcggtgttcttctccacttgcggccccatatttgggaggcgcccccccgtcccctagattatcccccatccctactacccacgccagaagggaatgtacggagaggatgtatgcaccatatggacccctgtttttggcccagatgtcaccaataggaggtagagtaggcaccaagagagagcctggcacacagcctttccggggaagaggaaccgggcttaccggcacagtatactcccggaggaaagaatgggctccacgaatgcccctgcaccctgtggtggcccaagtctcctccactccctgctttggaaatttcacaagcccttgggaatgaatgaagatccggaacactgggctcacgctggaggcctgtgttgcgcctttattccacgcctggaagcggctggttctggggggcttcccaacctggtgcccgctggggctatccggtattccgcgagagctacacgaattcacgtgtgtggtggaaggacgaccacggtggggacacgaacttgctggaggaaggaggatcaccccagtttgaaggaggcacacgtgcacagaggtgtcgaatatcgcacgctttccacaccagaattctgaagcctgaggtgtgtgtacgtgcgcgcgtgcgtgaggccctgtccccgatttaagcctgagaccggcca

SEQ ID NO: 560611 - DNA, 322 bp, Homo sapiens
actctgcagtgacctagatatccactgtggaattgggacttatgctactcttgttgtgggggggtgtcttagtgctgcacctggagggcactccttggttctggagggtgaccaccaatggacacaggacaggaagcccaggatggttagtgcaactcgggatgaagtgcaggtagaagcgggtgctctgcagtggccggataggtccagacgctgaggccgaggcgcttcctgttacgtgcgggcgttccgctctgtctctgccaggcactctctgactagggcccgggcatggatgatacctctcctcaggggtaccgag

SEQ ID NO: 560612 - DNA, 895 bp, Homo sapiens
  misc_feature (72)..(72): n is a, c, g, or t
  misc_feature (83)..(83): n is a, c, g, or t
  misc_feature (96)..(96): n is a, c, g, or t
  misc_feature (171)..(171): n is a, c, g, or t
  misc_feature (177)..(177): n is a, c, g, or t
  misc_feature (186)..(186): n is a, c, g, or t
  misc_feature (192)..(192): n is a, c, g, or t
  misc_feature (201)..(201): n is a, c, g, or t
  misc_feature (234)..(234): n is a, c, g, or t
  misc_feature (236)..(236): n is a, c, g, or t
  misc_feature (241)..(241): n is a, c, g, or t
  misc_feature (254)..(255): n is a, c, g, or t
  misc_feature (260)..(260): n is a, c, g, or t
  misc_feature (268)..(268): n is a, c, g, or t
  misc_feature (272)..(272): n is a, c, g, or t
  misc_feature (276)..(276): n is a, c, g, or t
  misc_feature (291)..(291): n is a, c, g, or t
  misc_feature (296)..(296): n is a, c, g, or t
  misc_feature (298)..(299): n is a, c, g, or t
  misc_feature (301)..(301): n is a, c, g, or t
  misc_feature (305)..(305): n is a, c, g, or t
  misc_feature (307)..(307): n is a, c, g, or t
  misc_feature (309)..(309): n is a, c, g, or t
  misc_feature (317)..(317): n is a, c, g, or t
cccctcaatctaatattttatttaaacaaaaagaacttcgttctgctttattcctattattatacaatgttnacatatagttnaaactctcaaganaacgtcctttaccagttgtatgtggtgtctaaatctttaacatgaaggactgaaaagagtggaaatccacactgnttgttntcctacagnttgtcntgagctgcncgtgtgccaatcagaaaggaatggaagtctcanangagcngcgtggcttacannccctnggctttantganttcnggcatgcgggatccntagtntnntntgtngnanaactcaanacaaaatatattagtgattgcacaaattctactttttacattggtagacaaaagaccacccggggacctattagttcaaagtattgcccctccacctccgagtgtgtttccaacaatgtcactcccccgaataatctatcataggaacctagtaagtaatctcaacctcctatgaggcgcggcttcttgacctaggctaagtaaaatttttatttttattttatagattataggtgggtaacgagacgacattacaagcgccaatataatgctttgccaggcgcgatctcggaagtaccaaggaccagttatagcacccatgcctagaataatgtgggaatgagggggagaatttgcaccgattgtaagatgcagcaagactattcgagatgaatggcgtcccgcccatataactgccagtggtataaatcaccttagggatattcttccctactacctccatcgttcgagtagattgttggtatctgatgattatatcaattttgaaaccgcggtggacctatcaacaggaaacattactactggtgcctagaatatcctgtgatttcatgcgctca

SEQ ID NO: 560613 - DNA, 677 bp, Homo sapiens
  misc_feature (72)..(72): n is a, c, g, or t
  misc_feature (83)..(83): n is a, c, g, or t
  misc_feature (96)..(96): n is a, c, g, or t
  misc_feature (171)..(171): n is a, c, g, or t
  misc_feature (177)..(177): n is a, c, g, or t
  misc_feature (186)..(186): n is a, c, g, or t
  misc_feature (192)..(192): n is a, c, g, or t
  misc_feature (201)..(201): n is a, c, g, or t
  misc_feature (234)..(234): n is a, c, g, or t
  misc_feature (236)..(236): n is a, c, g, or t
  misc_feature (241)..(241): n is a, c, g, or t
  misc_feature (254)..(255): n is a, c, g, or t
  misc_feature (260)..(260): n is a, c, g, or t
  misc_feature (268)..(268): n is a, c, g, or t
  misc_feature (272)..(272): n is a, c, g, or t
  misc_feature (276)..(276): n is a, c, g, or t
  misc_feature (291)..(291): n is a, c, g, or t
  misc_feature (296)..(296): n is a, c, g, or t
  misc_feature (298)..(299): n is a, c, g, or t
  misc_feature (301)..(301): n is a, c, g, or t
  misc_feature (305)..(305): n is a, c, g, or t
  misc_feature (307)..(307): n is a, c, g, or t
  misc_feature (309)..(309): n is a, c, g, or t
  misc_feature (317)..(317): n is a, c, g, or t
  misc_feature (343)..(343): n is a, c, g, or t
  misc_feature (355)..(355): n is a, c, g, or t
  misc_feature (361)..(362): n is a, c, g, or t
  misc_feature (364)..(365): n is a, c, g, or t
  misc_feature (377)..(380): n is a, c, g, or t
  misc_feature (390)..(391): n is a, c, g, or t
  misc_feature (396)..(396): n is a, c, g, or t
  misc_feature (468)..(468): n is a, c, g, or t
  misc_feature (488)..(488): n is a, c, g, or t
  misc_feature (499)..(499): n is a, c, g, or t
  misc_feature (511)..(511): n is a, c, g, or t
  misc_feature (675)..(675): n is a, c, g, or t
cccctcaatctaatattttatttaaacaaaaagaacttcgttctgctttattcctattattatacaatgttnacatatagttnaaactctcaaganaacgtcctttaccagttgtatgtggtgtctaaatctttaacatgaaggactgaaaagagtggaaatccacactgnttgttntcctacagnttgtcntgagctgcncgtgtgccaatcagaaaggaatggaagtctcanangagcngcgtggcttacannccctnggctttantganttcnggcatgcgggatccntagtntnntntgtngnanaactcaanacaaaatatattagtgttggccaganttctcccttgtnccatgnngnnccaaagcccccnnnnggcccttttnntcccngtcgcccccttccccccctgtttgtctttcccccttttcccttcctgttgactctttccttggccctttgcntggcccttctcctgctttcntgcggcttccnccgctgcctccnccccctgtgttgctttcctctctccccagtgtggccgcctccccccggggcttggcccttttgcccccggctcgccctgccctgggcttgcctttttgtctgtcttttcccccccccctgccctcgctggtttcttgtggttgtttctgtgcctgtggtccccntc

SEQ ID NO: 560614 - DNA, 543 bp, Homo sapiens
ggtccaccgtacggtggtggggggcaagtcagcgtcacctgagacgggcggtggtgggatggcaacagcctccggggggtcggacttgtctggctccggagcgcccccggccggtgtgggagctcaggcggcggcggccgctgaggaggaggagcgagaggtggtgcgggtccgagtcaagaaatgtgagagcttcttgctgtcagagttccgctcttttgctgtagatccccagatcacctcgctcgaggtgtagcagcacatcctcatccgagcctttgatttgagtgggaagaagaactttggcatcagctacctggggcgggaccggctaggacaggaagtttacctctcacttctatctgactgggacctcagcacagcctttgccactgcctcccaaaccttacctgcaattgcgtgtagatattcggccctcggaggacagcccattgctagaagactgggacataatcagccccaaagatgtcattggctccgacgtgtagctggctgggaaagggtcatcacgtgacgagtgct

SEQ ID NO: 560615 - DNA, 468 bp, Homo sapiens
  misc_feature (222)..(222): n is a, c, g, or t
  misc_feature (373)..(373): n is a, c, g, or t
ctgggtgctttctttcccctcccctccttgcaacctggatctgaggctgttgtaaacagcacagccctaaaatgggaatgtagatggggaagttctctgaagtacagccatgtgctggctgctttagcaagcatggaaataaaagcagaggtcccagaagagcccttcatccaccatctcagtcacaggaagaagctgctcaggagatcctcacttctaaanacttcgttcattccgcatttgataggcacagactcaccagcaggtaccagccaagttctggagttggaaaggaacagctaccctccagggcttcaggagccaggaggagaaatggtcaatgaatacataaataaatgactaaaatcactgnctaaaatgacttggagtcctgtggttgacacaagaagtagaatgtcccagtgaagagagcaggaggatgtccaagggggggggcctctagcaagc

SEQ ID NO: 560616 - DNA, 247 bp, Homo sapiens
gtgagtgtactgttgtcgagattgtacaggagtggtgattgtaacggagacgaggtagaagaatctggctggttgtagatgcaaagtagtgatcaacgagggaaagtttgtctgtaaaattcaaaggggcacatgggctttgtaagctggagaatgaggtgaggttaaagctgtgtgtcccttaccactgtgctgatcagtgcctggcacagtacctaacacatagtaggcacggttcaccaatata

SEQ ID NO: 560617 - DNA, 253 bp, Homo sapiens
  misc_feature (27)..(27): n is a, c, g, or t
tccctgggggggggttggacccccccngctttttttttttcctgccccccccccactctccctgtaatttatggaccccgcccccccgggggttgggggtatttcctggcccttttttcccaattttttgggggtgggaggggggggtttttcccttaaaaaggggggacccccaaagctttttttattttcaatcaatcagtccctgtgtccccaacattttcaataaacccaaattgggtcccccccccca

SEQ ID NO: 560618 - DNA, 1026 bp, Homo sapiens
ggagagaactagtttcgagtttatatgtgtttttttttttgcccctaaaggggttaaaggggttccaatgggttacataagaaccctattttcaaagaatttttaggggaattaatttctaggaacgagtggtgcattagaaacgtggtggattggcacctccacagaatttctcagaagcctatatgaccgtatagtataataccccgcggttcggtgttagcgcgtacaacaggtgctttgtgctttaacaactttccgggaaatggccactctgtgtatttacaagcccctaagtgtgtggggaaccagctcaatgaagtgtgccacaacacgttctggcgtagactgttaattctcataaatacgaaacagtgggggactcacaactcgggaacactacataatctgcgcatgtgttcaacaccgtctccaaggaggcgactttcacgaagagtctccgcacccgctgagcctacacctacgggacaaataaacagtgggggacgaaaagaacagtgacccagagacaatctccgacaacgccctctcagccccccgacgccagcgcacctccggcgtgataacaccccacacacaggcatcacgacaccaaccccaacaacgggggagcgagaccacccacatcgcgcacacccggcgaaggccaaaatctagggacgaggagtcaaattccgatcgtgccaacacgattcccccctctcgtattctcaaagtgcatccaaaaatagaaattagtcaggatacacgagacagcaattgcgaagctaaacgaccaagtcactcaccagcgccccacaagaactaatagcaatcagctcgacagcgatctgatacgaccactctccctcaatcaactgaatccgtgacttcgtacaacctcagtcaactcaagcaagccatattacgtttcgagacaagcaatgcgtaccgcagagaaacaataaccactctagaacacctcactcgcaatagagccagcccaacatgatccatactagtcag

SEQ ID NO: 560619 - DNA, 618 bp, Homo sapiens
agagactctcacagcactgtcaaccaatatgacctaattgacatttatagaacactccaaccaataagagcagaatacacattcttttcaagtggatatgaaacatttaccaagatagattatattttgggccagaaaacaagtcctcataaatttaaaaggattcaagtgatacaaagtatcactctaaccacaatgaaattaaacttagaaatcaataacaaaataatccttttaaactttccaaacgattagaaagtatattacttacatgtaaataacagatgggtcaaaaaagaaatcaaaaacaaaattagaaagtattattaactgaatgataatgaaaacacaatatatcagaatttgtggaatgtcactaaactactacataaggggaaatttgtagcattaatgcctatgttagaaaaaaagaatggtctaaaattgatgacatcaacttccactttcagaaactagaaaaagaagagcaaattaatcacagtaaacagaagaaaggatgtgaaaaagggcaaagcagggatcaatgaaaccgaaaatcaaggaaaaccaaaagctggtcaaaaaacaacaacaacaaccaaaaaaaacttaggagaa

SEQ ID NO: 560620 - DNA, 465 bp, Homo sapiens
  misc_feature (362)..(362): n is a, c, g, or t
  misc_feature (385)..(385): n is a, c, g, or t
  misc_feature (421)..(421): n is a, c, g, or t
caccacagcacaaggatgcctcctgcctctgtagactccacctctgggggcagggcatagctgaacaaaaggcagcagaaacttctgcagacttaaacgtccttgtccgacagctttgaagagagtagtggttctcccagcacagagtttgagatctgagaaaggacagactgcctcctcaagtgggtccctgaccctgagtagcctaactgggagaagcctcccagtaggggccgactgacacctcatacagcctgtgcccctctgagatgaagcttccagaggaagggatcgggcagcaacatttcgccattcttgcaatatttgctgttcggccacctcggctgggtgatacccagggnaaacagggtctttggagttggancttccaggcaaaacttccaacagacccagcagcttnaggggtcctgattttttaaaaagggaaaattaaggaaattagga

SEQ ID NO: 560621 - DNA, 1490 bp, Homo sapiens
  misc_feature (233)..(233): n is a, c, g, or t
cgccggtataaagtgtcgttaaaaaggcctttggttttgggttttaccgtgtttccgagaaatttgtggcttttagtggaatgtagccgcccacccagtgaaacccccaatcccgccagtgttgtggcttcaagtgtggtgcacagtcttattgggattctccagttcgttcttgtgggttgcaacatcaagttaccccatgaaggccaaaggttggaagtggtggtgcaatnaaactgctctcaaaagttcaagtgttagaggacgacgccattgaaagctcattaccagtagccaataatttttggctctccctattctcaaccagtgcacagtttgacacagtggcctcaggttcacagtgcaccatgtcactgtgctatcctacgaaatcatttgtttataagatgtgttcattcctggagtgacatgccaccccgaatggctcactttcgctgagcatgctgtcctctgatttagctgctgcctccagcctctggcttgagaacttactaaaggcacttccttcctgttaaacccctgttaactctccataaatttggtgattctctgctaggcctaagattttgagttaacatctcttgaagccaaactccaccttctgtgcttttgcttgggataatggagtttttctttagaaacagtgccaagaatgacaagatattaaaaaaaaaaaagaaagaaaaaaaaaaaaacacctacttttaaagaaaatccctaacagaattttaaataatagtttaatcttcttaccactttctctttctctagtttctcttgattttctcaggtctcaggcgtgcattctctaacctcattccttggtgacaccacacagggtgtttttgtgattctcagaaattatttttgaaattcctgcattagtcttaatttggttcaaaaattaaagaaaattccttaacctttaaaaaaaaaaaaaaaaaaaaaaaaaaaaaaaaaaaaaaaaaacaaacaaaaaaaaaaaagaaaaaaaaaaaaaaaaccaaaaaaacaagaagaaaaaaaaatagaagagataacaaaaaaaacaaaagcaaagaacaagacaaaaacaacaaagaaagaaaaaacgaaaaaaagaaggaagaaagaggggggcgggaggaaacacacagcgcagaacaagcagagcggaacagagacacagacggggaggaagtcaaggggcgaacaatgagaaagaaccacagacagccatcggacagcgagcacaaaggacacgggcgaaagtgccgcagtaatgacaccacagacgcgaggagaccggaccggagcagccaagacagactagggaggaggagactaccaaggaagaagaaaacgcaccaccaagcgacgaaccgccagctcaaagacagaaaaagagagagagaacacaagaagagaacaagcgccaaaagaagaccggccccgtcgcacgcacacccacaccggccgaagcaaacaca

SEQ ID NO: 560622 - DNA, 992 bp, Homo sapiens
  misc_feature (367)..(367): n is a, c, g, or t
actttcgtgtgtctgtttcttgctggtgtctcgtgttctttttgtgtgtatagtagctatgtctcagcgcgcggcgcagacagcgagcaccgcccttgtaggtgttgcggtcgtttcttttagtggcccctttgtgcggtttttttcctccaaaaatttggggccagggcttctttccctttctgtctggtatggttggggattaaaaatgcgccctgggccactttgtgtaatctcgtgcccagatgtgcccttgatgggtcatacaggcgttcctgccccactctccgaggccttgttccgggagtccccccggcactgcgtcagaagccccattaccttttgagtggtgcacaggaataacatngctatggctttggaagttacttaccggggacgactgtatagatatataagggcagttaagaatccgcctggactatcataatatctgggccagaacctgatgcgtcgaaagggaccaggacaccatgataaattgggtggagaagcacctggggccaagcatctccacacaccagccgggaaaggaggaccattgcccagtgccattgcggagccttaagctgctggccaagaaggctccagcaccagcccgttaatgtagaacagtgatctatccccattgagacagctagagaacacgttgagctgagctataaattgggaactagtctatttgaccaagtctcttctcgtgcttggtgtctactgaagttatagtttaccctctcctagaagaatgagaaaggttgtgttcatatagtgagagagacgagaattcttctatcggccacgtcagatgttttctcatcctttcttgctctgcctcttgagttgttccgtgatcacttttgaataagccggttgccctttattaaaacttgctgcctgaatataagattaaccggttatagtttaaatttgtaattaattttaccctccttgccataaagtgaccattggatgga

SEQ ID NO: 560623 - DNA, 621 bp, Homo sapiens
agaatacactgcaccctatttgtagtcttttatccctcacccccttcccagcctttccccgtgagtccccaaagtccattgtgtcattcttatgcctttcatcctcatagcttagctcccacttacgagtgagaacatatggtgtaggttatccattcctgagttacttcacttagaatagtaagtctccaagtctcaatccagatcactggcaaatgccattcagttcattcccttttaatggcgtggagtagtattcccattcatatcatatcactatattcataagaaagacttatattcactaatatggcatatatccaaaacaccagagataacatataattccaacttcggtggacatgccatgggcgccattcggggcagcggtgaccactttgactggccctttgtaaaaacctaacccgagattaaacgtggctgggccccaattcaaaggaaagaagctcacattttccacgtgtgtcaccacgaccccccactaacggtcatgtgacacgatgtcaacaggacctgggaacccacagctattatcaccacacaccacttttcccacgacgaaatggggaaaccccacacaccgtctccaccggacggaat

SEQ ID NO: 560624 - DNA, 103 bp, Homo sapiens
cccccacacttcgatcgcggtataaggaaatgaaaagaaaagaaaaaggaaaacaaccaccaccaatgaaggttaagattctccgggtaccgatgctcgtaat

SEQ ID NO: 560625 - DNA, 145 bp, Homo sapiens
gaagaggcggacatgacccagcaagacgagaagaccctatggagctattaataatattactgcacggcagtacctaacacacccacaggtcctaagactaccaaatcctgcattaaaaatttcaggttcggggcgacctcgagag

SEQ ID NO: 560626 - DNA, 296 bp, Homo sapiens
tactggcattatcagacttatctgtaatgtcttctaaaaataaagattcctggtcacacctcaaacctgcagaatcagaatttctgagacaggggactggaaaccttttttttttttttttttgggaaaggagtcctttggcccccgggttaaagcaatttttctggcttaagcccccttaatgaagcgggattaatgggcaccccgtgaaaaatggcccacgtgtaattttttgggaattttcacaagaaaaagcggggttttcacccattgtgtggggccaaggcgtgggtgtg

SEQ ID NO: 560627 - DNA, 658 bp, Homo sapiens
agtcacagtacagtttgcacgacatctttgttcatacatagctcagtgcttctggcaccaaagcaagatatgggttaggttggtgtatgcagagacaacctatgaggagggcccataaagcaccctccactttagtcctgaggagatacgaaagcagaaatacatggcatctgtcacttggtggcactagagagggtttcagaggatcctatgtgaaacactagtttaaagatgacgagtggggagaagtgacgaggaaataaggaaatctaggtccgactggttttctggtactgcaccattgattcaatggagactggcgggaggaaatggaagactagggttggagatgggatgggtggggcaagggatggaaaggaaaaggcagacaactaatgcgttccatttataacaagtaatatatatcaaagacttaaaggagattaaagaccaatcagaataatttggcaactttaattcttaggaagatcaaagttccctccaaacctaatttgatgttttattactaaaagcaaagaccagtatggtacagtattactccagagaaattagaggaaaatccttagggcggcttcacccacattcattttatgagtggatacctcccctacgtcaaatgctttagggaggtactgct

SEQ ID NO: 560628 - DNA, 110 bp, Homo sapiens
cacataaatagtatggcttcgaagaaggcgtggctacagatgtgcaggaatgctaggcgtagcatgtggatgagactatttatacccaaggagggatgagcagggtaccg

SEQ ID NO: 560629 - DNA, 381 bp, Homo sapiens
atctacggagtgtatagagagcacaatgtggcatctctttctgttttagcttgcagtggtacttctagtgcggttggtgctctctcctggtgcctggtggatggaagggagcagtgcagtgaggggtggggcaggccctgcctacagagcctgtcagtagtggaaccagtgagtcaccagaagtccaatcactcagtccagctcctggatgctgttggatcacgggatctgtctgagcatcagtttccttttctgaaacagtagggatgataacagcctaggatggtgggtgactcagtgaggtaatgcagatggaacaatgcatagtaaatagttttatgccagagttgggtgagatcgataaaaaagggtaccgagctc

SEQ ID NO: 560630 - DNA, 507 bp, Homo sapiens
cagtgataaaaatgtcctaaaattgactgtagcgatggtcacacaactctgaatatgcttaagaccattgaattacacactttacgttggtgaattgtatggtatgtaaattatagttcaataacatagttaaaaaagataatcaaaagcatgaaagcactgttgatgtggtttggatctgtgtcctcaccgagtctcatgttgaaatgtaagccccctggtgggaggcgatgggattatggggcagagtcctcacaaacggtttagcaccacccgctcagtgctgttctcctgatattgagtcctcatcacatctggttgcttcaaagtgtgtggtgcctcccctctgtctccctcctgctctggccatataagatgtgcctgcttctccttcgccttctaacatgattgtaagtttcctgaggcctccctagaagcaaaagctgctgtgcttcctgtaccatctacaggaccgtgagccaattaaacctcttttctttataaaaa

SEQ ID NO: 560631 - DNA, 392 bp, Homo sapiens
  misc_feature (55)..(55): n is a, c, g, or t
  misc_feature (250)..(250): n is a, c, g, or t
  misc_feature (296)..(296): n is a, c, g, or t
  misc_feature (375)..(375): n is a, c, g, or t
gcggtggggacaggaaacaggatgggaagaggacctgttgtgacaggttctaaanggtatagtttagaagcaggtttccaaatgccttgagccacatgtgttcagcagcatgaagatggtttgtggcagatatatttctagattttcaggagagtaagtctagagtaaatacccatctctcttccttgctgtttcctctagcctagagttgtgaggtcacaattgcaagtgactttacggtcccctattngagttaaagatgggagaaggaaaaaggccttttgagccaatggctnaaacatttatttcaggtccagtccatattaggtgaaatgtactagtttggggagattctttagttattttggggcttanccaaatttaccccgttt

SEQ ID NO: 560632 - DNA, 194 bp, Homo sapiens
  misc_feature (7)..(7): n is a, c, g, or t
  misc_feature (27)..(27): n is a, c, g, or t
  misc_feature (32)..(32): n is a, c, g, or t
  misc_feature (35)..(35): n is a, c, g, or t
  misc_feature (43)..(43): n is a, c, g, or t
  misc_feature (70)..(70): n is a, c, g, or t
  misc_feature (89)..(89): n is a, c, g, or t
  misc_feature (137)..(137): n is a, c, g, or t
  misc_feature (142)..(145): n is a, c, g, or t
  misc_feature (165)..(165): n is a, c, g, or t
  misc_feature (173)..(173): n is a, c, g, or t
cgggagnacccccatggagggagcctngcctngtnaccaaacnaaagggaagaaagtttgcctccaaacnaaaccggggaacaaaagtngggaaggcccgaagatccgcccgcccaaacatcccaaggctagaactnacttnnnnatccggtgaacgccccaacncagccctncagcccctagctgcccaattt

SEQ ID NO: 560633 - DNA, 379 bp, Homo sapiens
ggggttccccccgggaatgccccgggggccggttgggttccaaaagttttaaaaggggtggttaccttcccggttccttttttgccggtttttaccaataatccagggccttttttttgggacccctttggtttttatttttttgggttcccggctttggccctttttttgcccctttaaattttaagggccttaatggtttggggcttggtgatggttttgggccttttgggtccctaccttttggattttaattaaatccgggggtatggtttttggccgcctggtttgggggggatttttatggtccttaagggaattaatttttgtgccggaagggctgggttaaattttggttattccaatgtggttttcctga

SEQ ID NO: 560634 - DNA, 428 bp, Homo sapiens
  misc_feature (357)..(357): n is a, c, g, or t
tgatcttccgctctccaggcctttgctcaggccatgccctccgcccagcacatctgctcctccacctgcacctgactccctggccctcgtgaagccactcccatactcctagacagggctgctgcgccctccacttctgggctcctgaccagctctggtatgtcagtttctgcattcattcctgtctctattagttataaggcaagttctgtgggatgggaactacatctcccttttacagaggggaaaccaaggcccagcacaaaacctgagaccacaaagcatcttgcctcaaaaaatccctcttggctcggcgcggtggctcatgcctgtaatcccagcactttgagcactttnggaggtcgagacgggtggatcatctgaagtcggaattcaagacagcctggccaacatggtgaacgccatct

SEQ ID NO: 560635 - DNA, 251 bp, Homo sapiens
gatccgcgctacaacgccaaggcgatccgcacatgccgtccggtcgaacgcggcgggtaaaacccttcttgaggtcctgttcacagccgcgagtagtccccacggccatctttcatccgaatcgcggcatgcagatggtcggggagcacgacgtaagcaaggacggcatgcggaacacgttcgcgcgccgcgcgccatgcggcaaaaagcgaatcgatttcacggaccagaagatcgccttggcgttgtag

SEQ ID NO: 560636 - DNA, 477 bp, Homo sapiens
  misc_feature (3)..(3): n is a, c, g, or t
  misc_feature (119)..(119): n is a, c, g, or t
  misc_feature (125)..(125): n is a, c, g, or t
  misc_feature (134)..(134): n is a, c, g, or t
  misc_feature (149)..(149): n is a, c, g, or t
  misc_feature (151)..(151): n is a, c, g, or t
  misc_feature (168)..(168): n is a, c, g, or t
  misc_feature (221)..(221): n is a, c, g, or t
  misc_feature (228)..(228): n is a, c, g, or t
  misc_feature (237)..(237): n is a, c, g, or t
  misc_feature (246)..(246): n is a, c, g, or t
  misc_feature (261)..(261): n is a, c, g, or t
  misc_feature (265)..(265): n is a, c, g, or t
  misc_feature (284)..(284): n is a, c, g, or t
  misc_feature (300)..(300): n is a, c, g, or t
  misc_feature (305)..(305): n is a, c, g, or t
  misc_feature (311)..(312): n is a, c, g, or t
  misc_feature (319)..(319): n is a, c, g, or t
  misc_feature (341)..(341): n is a, c, g, or t
  misc_feature (365)..(365): n is a, c, g, or t
  misc_feature (369)..(369): n is a, c, g, or t
  misc_feature (450)..(450): n is a, c, g, or t
tcnctgggatgggactcaggggggacagacgccccctcctcaggcagctggctcagaacttaggtagcagggtcagagggactggaaataggaggaaggggacccggacggccctgganatgtanctggccacnaggcacatcggccgnanatggggaaatggcatgntccagcaggcgcagggctgcgcaggtagacacctgccgggctcctcgggctcncaaatgnaccagagangccgggaanaggttcgcctgaaantttntctgcttttggtcatccangactgttttttgaggngtgangaaaanntaaaatnacagctcggggttccccaggtngctcctcacaaagtctcgcaagtncccnactgtctcgctggggcggaagaagacctgtaggaagtagcggtcggggaacaggaccctcagagccacctttgggtagcgntcaagcttctcctttatctgcgcctag

SEQ ID NO: 560637 - DNA, 776 bp, Homo sapiens
ctcctctcctaacctcgctctcgcgggctacctttacccgcccgcctgctcggcgaccagcggggatcctcccccaggcgcaggtccacgatgaaatgcagatgaatgaggaaacttactgaaggacacacgagacagctcatgactctcctccgggtgtcgcgctgcctaagctgtcgtctcgtgctttctgtctgcactacgtcgtgttgaatctgtccagggtgagtacgatctcggatggtcacagagttaaagaccgtgtaaccgctagctcatcctttgcctcttgtctcgagtgagcgaacctctcgcctgtggggcgcttggcacttgcggtggtcgttgatcaccctctgtttcgatcacgatttcggcacgcatcattcgcgctaggaaagattgcctttcccttgtggttgcgttttgtggcaaccgccaggggctttaatgtaatgcccttctttgggacgcaacactacggtcacgggggtaaacgccattgggtaccggacccagtcaagatcagtgggccgccaaagctttcctccatacaccgatcacggactggaaactgccacaagagcatggtcggcttttgcaacactaataagcaacggtgtggagacccaaatataccccccccgtttgaaaaccacccgtggaaatgttaaacccttgcgcctttattggcaccgcattatacaacaccacgttggggctcgagagcccgtaggcggcacgaaaaaatctcaagaccccgatgttttcccaca

SEQ ID NO: 560638 - DNA, 234 bp, Homo sapiens
tgtatcgcaagaagacgggtagtatggaatgtgtcgagactaactgcagatacaagaggatgctggccattgagatatgcaagcattttgaactgggaggagataagaagagaaagggccaagtgatccagttctaaactttgggatatttttcttcaattttgaagagaaaatggtgaagctatagaaaagttacccgagggaaaataaatacagtgatagggtggtatagct

SEQ ID NO: 560639 - DNA, 548 bp, Homo sapiens
gggcggccggctagctaggacgcctgtggaaatgaggccctcgccaggtgatggcagggccatgggtggcctggggcacccagtcggaatgtgcttatgtatttggtcaccatgccgtcatcctgggtcttttcctacgtgtgtcttgttactaaggcctctagtcaaatccacagcaacatctctctccttccttgccacctgtcgagcttctctggcttctgaagataatgcaaccgatttgtgtaacaccaactacttcaatcttcagcaaagcactatgctattgatgtggtgtagatcaagacccgatgctttcagatgacctacttacatcttcaatgtggataacgataaagaacaaaacacatgcatctaggaactgctgggctagattccagtttgacttttaagactgtatagaagtggaattccaaacagcttgaagcacattcagctatatgactagcaagagtaacatctatggatagtggtattgtcgtgaatgactctttgtaaactacaaacgaaataccttacgtaaagag

SEQ ID NO: 560640 - DNA, 860 bp, Homo sapiens
agcggactgggctctgacccagacccggctgacccaccctacccgcgatcctgcccatggctgacgggctctattcggcgcagtaccctggggtctcgagcagattcgcccggagccgagtccgaatggcctgtttgacaagcctcccccggaagaccctccctgctgccctgcgggcccaggtcaggacgtcggcacagatgggccaagaaggctggtcaggcgcgcagaggcacgggaagggcagcaaagaaagagaatgcaggaaggggagaagcacagagggcaaaagggctgaggcaatatggaatatatatgaatgatagaaaaaaacaggacacggcagtacgagaacgcacactgatgaacagcaaggacatgttcaaatgtgccgatggacaaaggtatatacgcagaggcctatatggcagcaggagagcgcaaaagtcagaaacggaaggataagttaggactaaatgaggaagaaatacaagcaagacaagggcgaggaccgcggacacagaacaaacacgaagagtgagcgaagagaacgcacaacaacaagcggcgccacaaacacagaagcaaagagaggaagtagccagccaaaagagacaagcgagcaaacgaagcacccccacggcgaaacacaacaaagggcaaagagcagcaccagtgtatagaccagcagaaaaaccaaccaggaaagacaacaaacagaaagagaagaacgaaggggacatcaaagaacacaaaaaacggagacactgcgaaataatgcgaacgataacggatgagcaccacaaaccatgaggaaaaacgaaaaaagagcaaaaacgaccaccaagacggtgaaaaca

SEQ ID NO: 560641 - DNA, 127 bp, Homo sapiens
ctgccttggctcccaaagtgttgggatacggtaaacccaaccacacctggcaataagcttataacctctctaacacctcagttttctttcttgtaaagtcagggaagataatagggttatcgtctgg

SEQ ID NO: 560642 - DNA, 361 bp, Homo sapiens
gagtgtcttttcttatgtgattttttttaattgctatttgatatggtttggctatatgtccccacccaaatctcatcttgaattataatccccatgtgtcaagggagggacctgacgggaggtgattggatcacgggggcagttgtccccatgctgttcttgggatagtgagttagttctcatgagatctgatggttttataagtgtttgacaattcctcctttacacacactctctctctcatctgctgccatgtaagacttgcctgcttccccttctgccatgattgtaagtttcctgaggcctcctcagccatgtggaactgtgaatctattaaacctcttttctttataaatgaaaa

SEQ ID NO: 560643 - DNA, 637 bp, Homo sapiens
accgatgacgcatgcctgatttaggcaagattggacataatctaccaattaccggaaccaagatggagtgcttgggcaaggacatgaagatcaagatactcttggagcatctgtatctgatcagtgactaagaaggaattagcgaccattgctagcattatagtcgactctataaagcttagccgactattgatactgccagagcagactcagacacgagtctttacgttgaataagatcatactattagttgatagcggcgtcaacattgttcacgttatactaggtagacaaaggctgaaacataagtacgaataatttgctacacataacatggtcatgggttatattgatttgcacgcatagatatcttagattcagatcggcttcccgccagaggcttgagggtgcaggccttacggatctgcgagcacgattatcatgtatcaaagtataagaattgttctacaatggcctcaaatgctatcataatgtatgtacagagtctgattacttacatataggactgacatgattgtaggcatggcaacttgaacctgctatactactgtacacacctagctgtacagcagatcagtaatattttggatactatcacgagattcttcacccctcg

SEQ ID NO: 560644 - DNA, 1039 bp, Homo sapiens
  misc_feature (506)..(506): n is a, c, g, or t
tggcgcccccccattgtggggaagacttcgggccagatgagagcgtgtccaaaaaaaaccctcccaaaatcacgggcccccacagggagaggttatccacccgcaggaaaggccttcctccgcacgggaattggcctgaaaagagtctccacaacgcgtggtttttgtgaaaatgaccgggttggggcctttcagagatgcccctccccgtgtattcctaatgtttatattggggaggggcttcttcgttggaacttggggggccaaacccgttggcaaaagggaggccttggggcccaagagcccacagcgccctggtatatatgtgggaaatggcctttcccctcgtgtttgcgagtagtgctgctgttctcccctctaaatgcgccccgcgacatttcccgtgggagacactgcacgtcacaattgccccacaccacacattgagggccccccacatcccacgtatgttctcctaatacccccttgcactcggccacaaggcnacagcggagcttatatcgcacggccccacagagatggcccaccgctaaccttgcccctctcttcccctcgcactatatagcctttctctgaataggtgtttacatatctagcttccctcttcctcgtggccctctcatatccacaacgcgtgatatctttccctctttactcgtgttgaaatatcttaccaccccgctaaatgtgttgggagccacggccacaatccctttgtccacacttaactaataaatggcttggagaactataaacgtcacccacaaggtggctttatccctctggctgtaagaagaatggaaagggcgctggtgggaatttgctccctcgggttccctacggccctagtgagggcacgaaagaggaaaccactcctttccctttttaacacccctgagggcccaagattcccctcacgaaggcacaggagagtgctgccctcctcccctggtgcccgtgcctttttgctgtgtatgtggaccacccctgtgagggaataaacctggcaactaaggga

SEQ ID NO: 560645 - DNA, 197 bp, Homo sapiens
ccggatatgagcggtctcaggcacatggtcgcagaggcatttagaactatcagcctcatgtgtgtatgagggatgaactaaagatttctgttccagatgtttgtattggaccttagcatatattaaatagcattctaatttgctttaatttaaattaacggagttcccgtcgtggcgcagtggttaacgaatccgac

SEQ ID NO: 560646 - DNA, 1064 bp, Homo sapiens
cggctaggtagcgaggcctgggtggtgcaggtgtgatccagtgagaacgcgttcaggcccgaggtgcgttggtccccatccggctggacatggagaatcgatgggcagaagctgcgagacgccttcacctggaacatgaatgagaagttgatgacgcctggagatgttgtcagagaaatcctctgtgcacgatctggattgtgaagcccgctgcacgtttgtgccagccatcgcctctggcatcatacagcagatcgagtgctaccccacggatcaggcatcctgggagggacccacgtcagaccatgcgcgtcatccatctagagctgaacatccatgtgggtacacagcatttccgctggctgggagccgagtttgaagtgggcacgatgtcagagcaaggagtacactcaaccgagaggaagtttgccctgtaagctgtggctccagagcttggggttggggctggggcagttgtgtcgaccgaacgcatcgcattactacgcatccggtggcacgagctgaagctgtgcatcgaggagaagaccatatcgcccttcaggcagagaagcgccatctggccacgacggtggaagatgcgtccattctcggtagagcagcggcgcgaatgcggatcccagatgggtgcccactggcgtgtgagtactctgaacatgatgctgagaatgtgagagagatgggatccgcgagctaggacaggaagcatcgaggcggtgtgaggcgtcttgccaagggccggcccggggcgtggtaaccagtgcattagcacatcggcgtcccagcggagcatctcagatagatggtgcccgctcgtcctccagtcttctggcaggggctgaggcgatgggacaggccaggccatccttgaggatcggcggtgggggtggtcgtgggggttccgggtggcccttggccggccacttcctttggttgggcccgggtttgcccccaggtgtcccggcccgccttttcgtggaaggggtcccttgcgtggcggcgtggccggcccttgccggggcctattgggcttcgggcccgggtcc

SEQ ID NO: 560647 - DNA, 148 bp, Homo sapiens
tgactgctccctcttcatgacttccatattgaaactgacaggtcatggggcactcctccaagaagcttacttgagcaccaatctagagaagcttgtcttgtcccgaagtcctcaatataccaaagcctggtgtattaccctcacatag

SEQ ID NO: 560648 - DNA, 111 bp, Homo sapiens
agggcggcccgtgcacgcgctttcaagaaaatgttctcggaacactcggtcttctctattgaaagacattttctcattggttttgccgtaaaatcctgtggaacttcgcaa

SEQ ID NO: 560649 - DNA, 557 bp, Homo sapiens
gttctttctttcctgtattccatttttaaactagtaacagcaggccttttgcgtttacaatggaacacaatcaccaagaaattagtcagggtcgaaaagaaaaaaataatactattaataagaaaccaacaaacaagaacctctctttctagggatttctaaatatattgactgttccttagaatgtttaacttaagaattatttcagtttgtctgggccacactggggcagaggggggagggcaggatactgacatggctgcagatttctcagatcttcactaagggatatccaaagtgaatcagcaagtgaacgggcaggatggttggatctgtcggtcaaggtgtacatcagccctaacgtcagccagttaaaccacgacgatgattggaactcttgatagttggcgattgcctatgactaactgggaattgatcatgccggtatgtctcgcagaatacgtgagcgtgtggagaggagcacaccaaacaggcgggagtactaactcctaattcactgaggggactctgtgggcacctttcataccttatcgggc

SEQ ID NO: 560650 - DNA, 1826 bp, Homo sapiens
  misc_feature (1)..(1): n is a, c, g, or t
  misc_feature (1564)..(1564): n is a, c, g, or t
  misc_feature (1596)..(1596): n is a, c, g, or t
ntgtgtctgctcgcctttgttttcacgctgtctgttgcgctggatacctagatgctttcttctttggtggctgtgccatctgttcttgccgcctcccgctcttcgttgttcgcctctccctgcgcctcgtggttaaataggtggtcttctcgcccccgggctgtctctccctcgtgggggtgctttatgataaagcgccacgaccgcccgcgtggcgtctgtacagagcgtgataagcttggtggtcttccgggcgcccccctgctgtcatcaatattgtggggcggccccgcccgccttgttgtagctagcctttgggtggcgggatataaaattctcctcggttgttcctgattaatatttaataagtagggatgtggaagtgaaaatttcgtaaagacgcttctgctggaaggagttaataatttgtggggataatcatgccggggttgttgcgccccccctcgtggaagggggttgggtgttaacacccaccaagggggggttgtcccgaccccacggagaaagataattagtggtttaacaaaaacctgttgtgtcgcttcgcttttgaatctggcgatacgcaatactgtgattttggtcgcgcgcatgttgggatatcttggatcgttgtgtaacaatgatgcggacttttgaatgtggtagctggaaaacggaagttgtgtactgtgcgacttgatactgtgaactatcgaaatcttttttggaaacttagtactggaaggcgaagactctcttgtataacggtgatatatatgtgccgtccccccccgtgtgtgataaggtataaatttctttattttttccggaagagatattattctgtctccccgcgtccccttactaaaaagttgcggcgcctcactaatatggcttcctcaacaatctccacaggaagaagttggggaaataaaaaggaggcgctcctttgttaagcccgccacgttcgtacgatcttgatccccccccccaatgagcttctcaaaagaaggggacccacacaggaatgtccccctcttctcacagggaggagaccacacggggagaaattaaaaaggtcttctcccttttagaaacgcacggccctcacaaagggggacgaccccttatagttgtgtctcgttatagaaagagacacactttataaacgcgctcacataaaatgggcacacgccacacggtatatatgagagaataaggttggggtgtcttctttgtctcccccaaaggtgggagaagcccagagaattctatttcactaatatatatgtgtgagaagagaattggcgcttctccgggagatgacgctctgagcccacacagagaggcgctatatctcacacagagatctctcttggcgccacacgtgtgagaaggagaagttctctccttgtaaagagaaaattatggtgtgtataacccacacatgtgtgggttataaagaaatgtgttctcgctgcttaatgttcacatgttgcgtgggaaccacgcgtgtgagataattctgggctggtcctcgtgttgtagataaatgccacgnaggtgaggagaactttgttccgctgaccgctngtttggataaaatagtgtgtgccacggtgtctcattggccacagaattagtggtggtgcccaaatagcctcgtttagtgttttaaagatgggactcccacccctcttgcttgggtgtttaagtatagtatggaatagttatgataggacatagtagtagcggtggtccagacctggaaatggtggggagcaccaaaaataaaccatgtgaaattaaactccagtatttta

SEQ ID NO: 560651 - DNA, 338 bp, Homo sapiens
  misc_feature (282)..(282): n is a, c, g, or t
  misc_feature (317)..(317): n is a, c, g, or t
cccattttgtttattcacacatcatttggacatttggattatttctggtttttggctattatgaacaatggtgctatgaacagttgcgtacaagtttttgtgtgaacatatgttttcaattctctcattatatacctaggagtagaattactgggtcatatggtaactgtatatttttgaggaactgccaaactattttcccacgtccatgcaccatttcacattcccaccagtaagtaagaggggttccaatttctgcggcattcttgccaacactagttnatttatctggactttctgggttataaatcattctnaatggaggtgtggaagtaggc

SEQ ID NO: 560652 - DNA, 325 bp, Homo sapiens
agcatgaggtgaatgggcttttctctgactctatcagctcccactgatatacctactttcgaccaattttgtgatgatagtaactgaagccattctctggcttatctccacacaaaatgaaaaggtattatccattttgtaggtgatatgtttttgagagggttacttgtcccaacgtgtcacaggtattaagcagttaatagtgggcttttttggcatttctcccctcccttattcctgtgcgtatttcaagcgttaaaaaatgcaaaacaaaactatttaaataccttaaagggttgtacatgtctacatatcatatatcctg

SEQ ID NO: 560653 - DNA, 197 bp, Homo sapiens
aacgatggtcctcagcttggtaactcgctggtggtccgggagggttcaggcttggtgtgccttcttcggttggtctgactttgggctcctatggttcatctccggcccggcccaccacagaaaaggatgctgctgcacagcttctccaaggtaccagtcatggaggccagcgcgcagcactttggggtaccgagctc

SEQ ID NO: 560654 - DNA, 134 bp, Homo sapiens
gtttaactgttagtcaagaggacagctcttggcactaggaaaacttgtagagagagtaaaaatttacaccatagtaggcctaaagcagccacaattcagaatgcgttcaagctcaacaccactactaaaatcca

SEQ ID NO: 560655 - DNA, 602 bp, Homo sapiens
gcaggctgtacggtcccaatcctttagatgcacggccgtgtgcagcgctttgtggtaggggatctctatgcccttctgatccacagcagacgggcagcctgcaccatgatcatcaactcagcgtttggcatgtggcttgactgaagaggatgagggggagctgtgtgcgtgccgtgctttctcgtctcctggctgaggactttgggcaggcactggagcaactgatgatagttcactcccaggccgttggatcccccaagataccctcagtgtactgacatgatgtgggttggactgccaggaggtgaagaaggagatccctggataccattcagtttcccccttggagcaccctgaggctactgagcctgggactgagacgctcatgccttctgatccatgggctccctgtgcaacggcaagagccttctgtccaacgcagtagccactgattgcatccttaccttcctcaacgtgaagggtccagaactcattaacatgtatgtggtccaaattgaggataatgtgcgggaagtgtaatgccaggccaggctgcagctccatgcattatctaactttgatgaactggactctttggccca

SEQ ID NO: 560656 - DNA, 478 bp, Homo sapiens
  misc_feature (6)..(8): n is a, c, g, or t
gccggnnnttatataaataactttgcctccccctatgttctgggtttacaatcaagcccagtggttttaggacgatgtcatacagcgcaagagggagctgttgccacctgaaaagcttcaagagatagagtaattcaaaaagaggttacgtaagcggcgttaggaaaagctccttagagactcccagtaaaacttctgaggcctccaagtaagagtcctagacccttccctgatgaaatatacatatactcagtttcttgtaaaaaaaaaacaaacaaaaaagcaaaaaaacataaaaaaaccttttcagcccgtttagccacagtcgaatttacatttaaacaagcttattaatgcggccgaaattaagcttaatttgccaatttccccaaaaggaagtttattaaaataaattgcccctttttaacaaaacggtaatttgaaaaaccttggtttaccaaactaaatcccttttaaa

SEQ ID NO: 560657 - DNA, 1182 bp, Homo sapiens
agcggagtgtgtggcccccagcaccctataccttgtccccctcttccctgggccatcattgcacgccccttcaccttctgtcgtattctgctagagtggcgagaatgtgaagagccatacacgggcaacaagacggagaacctttcgataatcagatcatccgcggctagcatggctagcgcaaagggagttgacgcctcaaacattcaagtaggttcatcatccaggagttcagcccgagacagattgaccacgccaaggagcttatcgaggaggagatcgagggtccatctcatgtgccaggtccggagcatggcccaggtggtccacagtgcaactagtctggtccaattgggggccctgtcacctccatggggaacccttacaaatcgaggggtccagccacgtgaggactttcgaaccgcactattagcgagtgcggagtgctcactccattccatcaagcaagattagcacgatctgaatggacatggttggcaagtatcacttgacagctggataaggtgagtcagagtccacgcacgcggttgacgtctcattgcaatgtgacctttcaagcgcgattagacctggttcttgacatggcttggacccacgtccgggtatcacacacccaataacgggctctgctgtttaggtgtcacacgcgcataatcatatacgtacaaagaactttaacgttagacaaagcgaggacgaccacggcggggccataaaattggcggtccacgcaaaaacgggattccttacgccttattgaaaaagggacagtcttggggaacaagtcctttcataagaggctaacaattagctggtttccccaattgtcaaatgcggccccaacagggcaacaccacccaggatagaccaagggccccaatcggggaccccatatgcatacggctggaggcgtatagaaacatggacaggggttaagcaacacacaggctcacgtcgcatgtgccaactcactgacattggaaacaggaaaccaacatcaccgactacccaacaagtcgacacaatataccaccagcttaaaaaacaacagggcactcaaagctggacatttatgagacaaacaagcacgcatggacgccaaacagcgcaacacagaggacaatgtacaacacaaagcacaaaacggaagagggaaacacc

SEQ ID NO: 560658 - DNA, 80 bp, Homo sapiens
gagtggggggcgggctcccgcggtcctgctcggcggagtggcctctctgctcctgtcttttgtttggatgccggcgctgc

SEQ ID NO: 560659 - DNA, 102 bp, Homo sapiens
tactatggtacatagaccccccccccaagatatagggcaactgatatttggacaaactgagcaaaggtaatacacgaaagacaacgatagtgtcttctaaca

SEQ ID NO: 560660 - DNA, 324 bp, Homo sapiens
tggtacttttagtaaagagggggctccaccgggccagccaggagggtctcgatctcccgacctcagcgatccacccacctcagcctcccagaagggcggggattacaggcatgagccatgggtgcctgtggccgaatgtgagtttcatttctataacacttatggaaagtgataaaattatagaaaaagagaatagattagtcatgtgtcagggttaggggggtggccagcgtggaggggtggcatgaggaatccaggtggtaagggaaacgttcacgtcacgtgtcagtatctgggtggtgacagcccactttcaggggtgag

SEQ ID NO: 560661 - DNA, 154 bp, Homo sapiens
gcgatatagtatacacgctcacaaacaggcgctaccttgaaaagtgcattgcttattgcagagagccatgatcaggcatttggttgggggataagtcgctggcatttaggtgatggatgccgaaatgtatcaacatgagtgtcctgacgtcttt

SEQ ID NO: 560662 - DNA, 763 bp, Homo sapiens
atagggatcgtccaacccgagaacatacaacctcctcttcagatgtcaaaaaagccacggttagaccagattcctgccgccaaccttgatgcagatgaccctctaacagatgaggaagatgaaattcagacagactactcaggatgtccctgaagaggttcgtaaccgggacttcaggagagagttggaagaaagagagagagctgctgcaagacgacgaaaaataggcgatcgtccaacccgagaacatacaactctcctcttcagtgtcaaaaaagatgacaactatgcagccgaggccaaccttgttgaaccgtgccagaggtggaaggggagaaggagaaggtgattggaggccaacgtgtcaaagcagtattcatagctagagacctaccctctcatgcaaagataacatacagacatgactactcaggatgcccctgtaagaggttcgtaaagccgtgacttgctggagagagtcggaagaaagagagagagctgactgcaagagagaaaaggtagggtatcggtccaaaccgagtaacatacaagctcctctttcagacagctctgggcgcagaggtttctgggagccaagagtggtacatggcgtctgtatgatcttcggagcctgctgcatcggacctcggcagtcataaaagatgacacagcagccaggcaactttgaacctgccagaggttgaagggacggcagagtggttgagccatttcaagcagtattcaagagagacctacctctata

SEQ ID NO: 560663 - DNA, 141 bp, Homo sapiens
tgactctagaggattttcaccaggcgcttgttggggaaatgcattgttagaaaattgcctgtgttctacctgtactgatggaggttggagttgctggtcctcttggagcccctgtgtccaagggaagaaaacaagcgcctg

SEQ ID NO: 560664 - DNA, 196 bp, Homo sapiens
cacgatacttctaggagccctgcgctctcgggacgcctgcgagtcggtctccgagtacgggggcggcgcgggcgggtacgtaggcctcttcctcctcctccttgatggggtatccatccatctcctccgaccacatatcttccatcacagcactcctcccagtagccgcccactcataaggggaccggtcccctgg

SEQ ID NO: 560665 - DNA, 293 bp, Homo sapiens
ccaatgggggggggggggggggggggggggggtttttttaacccggctttttttttttccccttcgttttgtttggggccccccccccctttttttttcccccctttgaaaccccgggggcggttccccccccgggttttttttttggcccggggggggggttctttttttctcccgggacacgtttttcccctttgggcttttttgggggccctttttaaccgttttttttcaaaaaaggggggggggccggggcgggttttcccgggttttttttccccccggggtcccga

SEQ ID NO: 560666 - DNA, 863 bp, Homo sapiens
  misc_feature (223)..(223): n is a, c, g, or t
  misc_feature (251)..(251): n is a, c, g, or t
  misc_feature (372)..(372): n is a, c, g, or t
gaccgctttccctctctgggcctaacccggatgaagtttaaccacgggcattttaaacgcttttcttgggcccaatgttaaaggtgggacctaacgagttctattcttggagcaccccggctattcctcccgcgggcctctttttgagggacattcgggcctccgacactcggggtcccttgtttataacccctcccgcccgccggatacacccgggcccttncccacggaaagggcggatgaccgacgtnttctcctccacatcttttggccacggcccccatcttgaagaatcctttgaaagagtacttcctccacgtgtaggctcctcctttccacatgaaaggttgaatgattatagctgcctgtganaacggcgctgggcccacattgccttctgggtggccccaccgactagagaacatggtggcatcttagcaggatggccattttacaggatgctgccctcgtactgcaaggttgcccggcgacagcagcttgccccctggtgtggggcccaatgctcacccacatgcgttctccacaatagccattgcaatcctcaagtgcctgcacagcaccagccaggggctacaccagccactcgcccccattgtggccccccggaatgtgaacttcaaggactgaggcccgacctggctctcgctggaggggcatcctgagactccttcctcatgctggccccgactggctgctggggacagcgcccctgagctgccaacaaaggtggaaaacagggctggaactgcctttctttgtgcaactccctaatgtgacaactttaatcccaataaggtgaaacctccttcaactactccaattcttagaaaaaagaaaaataa

SEQ ID NO: 560667 - DNA, 586 bp, Homo sapiens
tggaaatggagtttggctcttcttgcccaggctggattgcaatgggcgatcttggtcatgcaacctctgcctcccgggttaagtgattctcctgcctcagcctcccgagtatttggaattacaggcgcctgccaccatgcccggttaatttgcttttaataaaaacggggtttctccatgtgggtcaggtgggtctctaactcctgacctcaggtgatccatccgcctcagcctcccaaagttctgggataacaggcgtgagccaccacacttggccatagtgtgtcttactatatggtggataaatctgcatgtgtccctaaagaactcagaattactgttgatgcttcaaaagggtgtgtgtgcagtgtgtgtgtgtccagcaaatccaaaaattcctcccaggaaattcagaacgaccccgaggaggagtggggcaacaaaactcttctatctgctagagggcacaacaaaatctctcatgaaacgccaccgatgaacctccaaacatcgatgtgctccaccaggccggtccttagctttgatccaaagccccaaccttgacacttctctgcttgaacgcact

SEQ ID NO: 560668 - DNA, 234 bp, Homo sapiens
ctgactgagcatggcggttacgtgatcgtcccgtgtgccgcttgactctcattaccggcgatcggcgtctgagtgtgtcacgttgtgcgaccttggcgcgtcatggctggattgcgtgactcgttgtggcgagactcgcggctctcaccgtgatcctacgtcgtcgagaccgtcatgcgtgcactatccctgaatgaaatatctgtgcgcggaccatcgtagcagatgattgac

SEQ ID NO: 560669 - DNA, 288 bp, Homo sapiens
tcgaccggcgtccaagtatttagctgactcgcacactccacggaaggcgctatgacatgatctgctgcagtgctctgagcccctaggattcatcctttcttttcagccgtgaggtgtcctgagctggcattgtattatgcgaactcatcactagacattgtactacatgacacgtactacgttgtaacccacttccactatgtcctatcaataggagctgtatttgccatcataggaggcttcattcactgatttcccctatcctcaggcacccccctgaccaaagct

SEQ ID NO: 560670 - DNA, 872 bp, Homo sapiens
cacccacaggaagtcaactgcgaggagaagggaagaagacgacgactttatttaccaacgtgttagtctagggtcttcaagggaactttgtgcgatttgcctgttacccgcaatacaagatgtcaaattttaaaacgtgcccactaaaacatgtttcgcaacattggggggtttcacacaggtatctggtcccggccgttggccccgaaaatctggttaagagcacgcggaccaccatcgtgtaaaactcgttccccccctggaaaaatcaaaatggatgttttaaccaaacatacagactttttgtttcattgtgcatggcacaccccgtttatccacgccaatacaaaccgtcgttttcccctatgttctggcacttttcgtgcccacaatccactggtcgccccatgtcataaggaactcacaagagttgtcttgacccccccccaaaaaggcagtaattatttttttgccaaaccaaaaaacacacgcgcgtcaacacttctttgtgggcgacccacaaagaaaatgttcaccttggttcaactacccgcctctgatatttctgtccccgctagaaggtgccagtaacaggctaacactcttcaccctgtagtagcacccggcagtatttagacgagtgcctccacgaggtctacccgtgtgctgcggacaagcgacccaaaaagcaggtggtgtatgagggcctctccaccttgggaggaggaatgtgacaaaccctcggcttcaagatcaacatatgttttctccgaggaaaaatctttaggtaaaaattcaaggtgagataaaaaatgtcaatcatgttagggggttcttaaacccattaaagtaagccaccagcacaatagaca

SEQ ID NO: 560671 - DNA, 174 bp, Homo sapiens
gcctgagatgtgttctgtgcgcgcagatgacctcgtggtagaaccaccagatcatatggtccctctttgttagcatcttcaaggcgggcatcaggacaaatgagcagatcacggctacactgtactgggtcttttccagccaggactgcaacggtgaccttaatcccagctcgc

SEQ ID NO: 560672 - DNA, 630 bp, Homo sapiens
  misc_feature (9)..(9): n is a, c, g, or t
  misc_feature (61)..(61): n is a, c, g, or t
  misc_feature (70)..(70): n is a, c, g, or t
  misc_feature (98)..(98): n is a, c, g, or t
  misc_feature (107)..(110): n is a, c, g, or t
  misc_feature (150)..(151): n is a, c, g, or t
  misc_feature (155)..(155): n is a, c, g, or t
  misc_feature (161)..(161): n is a, c, g, or t
  misc_feature (165)..(165): n is a, c, g, or t
  misc_feature (184)..(185): n is a, c, g, or t
  misc_feature (187)..(187): n is a, c, g, or t
  misc_feature (192)..(193): n is a, c, g, or t
  misc_feature (196)..(196): n is a, c, g, or t
  misc_feature (205)..(206): n is a, c, g, or t
  misc_feature (209)..(209): n is a, c, g, or t
  misc_feature (213)..(214): n is a, c, g, or t
  misc_feature (216)..(217): n is a, c, g, or t
  misc_feature (220)..(220): n is a, c, g, or t
  misc_feature (222)..(223): n is a, c, g, or t
  misc_feature (228)..(228): n is a, c, g, or t
  misc_feature (231)..(235): n is a, c, g, or t
  misc_feature (238)..(238): n is a, c, g, or t
  misc_feature (240)..(240): n is a, c, g, or t
  misc_feature (246)..(246): n is a, c, g, or t
  misc_feature (250)..(250): n is a, c, g, or t
  misc_feature (312)..(312): n is a, c, g, or t
  misc_feature (345)..(345): n is a, c, g, or t
  misc_feature (405)..(405): n is a, c, g, or t
  misc_feature (414)..(414): n is a, c, g, or t
  misc_feature (447)..(447): n is a, c, g, or t
  misc_feature (486)..(486): n is a, c, g, or t
  misc_feature (568)..(568): n is a, c, g, or t
  misc_feature (572)..(572): n is a, c, g, or t
aattgtttnataaattatacttgatattcattgttgggtttctttaggtcattctgctgtnctctcagtntcccagtgtgttttgtgttttttacttntcagaggannnngtaagcgtcatagtgcgtccgaacataaaatcaccgtaannaaantagttntttnttttttacatataattggnntngtatnnaantagtatatnngangaanngnncangnnaaatntannnnntgntnatatcnaaanttactccgggtgctcccctttccgtgcatagcagagccattgttgatatgttatctactaangtggctgttaaaccgccgtggagagtgcctatngcattggtatgctcttcttctactttcatttcacaaatcactttcccaggagcagcaganacaagagtnatctttcccaaaactcttttaaaattgcgagcnttggtcatggcctttatcacctcccgcagagactgagtnatgctggtcatcgtggacggttttccagcctttgggctttgcgcaagaacgaacttcggaagagctggaaagtccagaagtnagtnaaagaaggacaaaaagggcgaagagcccgcatcccttcttcgcccctaggagcgcaag

SEQ ID NO: 560673 - DNA, 279 bp, Homo sapiens
agcgcaataccgcccattggtggaaaccatattccatgccttcagtaagaagccaaagttcatgggctgcttctcgtgtgaagccaagtgccttgagcatctttttttgtatatccatagcgatgattatggattgaccctgaacctaattcgtaccatttaagaccaatcgtaactttgtgcatgggcttggtgcggatcttcaccctcatcaagatagtgcaaatctgcctaatttggcattgtaaatggatggtgcgcggcaattccagcgatcaa

SEQ ID NO: 560674 - DNA, 408 bp, Homo sapiens
  misc_feature (91)..(91): n is a, c, g, or t
ccctgggggtgttcgcggggggccttgtcgctgcgctcggggctcccctttggccctctgtgtctccctttccgtggcgcctggtgctctncgtctcttgcttcccttgtcctccgtctcggcctgctcgtccttttctcgctgtgctggcttttctcggccttttgtgtccttttggccgccttgctgcttgttgcccctctgtggcccctgctctggcttgctcgttgcgtgtgggcctcttgtgcgcctggtgcggctggttgtcttcctccgtctggttcggctttccttgcctgtgtcgtcccctctctttggggtccctgttgccctgttgctcttgtgctcctgccgttgtccctttctcgcgcgcttgtctcctcgttccttctttccttcctttgggcc

SEQ ID NO: 560675 - DNA, 246 bp, Homo sapiens
attagatgcaccaaaaacaatttcaagtgactgtggggcattgtctttcgtgagaatgatcaagagtcctgatatgacttgttgttcatatcctaaacagtgaaaacttcatccaccaaatatttaggaatagagggagacagaaagatgtgttctgaaggtatcccatatgtagagtattggtcacatatacttaatgttggttttaacatatagttattcaataaacttccgcgtcaattctta

SEQ ID NO: 560676 - DNA, 464 bp, Homo sapiens
gcggcgttccttcccccgggtgtggggcagggccccttcagaaatgtgggtcttgtgacccacagtcagacaaggtaggtcagagaatttatggccagctccacgacagaaaggctgggggtggttagagtcccttgttagtcttatggcctgccttggggaaaaaataacaagagctgtgagagttttgagccaggaactgtagatgaaaaccagtatgtatgtataatatcacaattggatattatgcaagtggacttgtcagattttgtaggaaagccctcatgttcctaccaacaactgtttgccctgcagcgcagacctgctccctgtatcgtaatccctcctagcttcatctgctttccttacacagcacatggtgattaaataggtgtgcgactgcttgatcagtaacagtcttctgccagactgtgtcttccgtgagggtaacagagaccatgtct

SEQ ID NO: 560677 - DNA, 353 bp, Homo sapiens
accgaatgttgatcatagagggcatgcaggcaagcctatctaccaaatgtcgaagtggtgggcacgacgtcgctccagtgtgttccgctctatgttgatagcggcggcaacgaaggctccggaagacaaatcgcatgccgcccgactcgtgtgggacaactactacgccaaccatcagaagaaaggcacattcaagcacctgaaaggtggcggacatcttcatgggtggcgggaccacactagttggaaggctctcgcctcggtatgcagactggtcggcaacgacctcaatacgggtagcgtggttcggggtcaagcaagaactggcttgacgtacgatcctccggagatgt

SEQ ID NO: 560678 - DNA, 260 bp, Homo sapiens
  misc_feature (197)..(197): n is a, c, g, or t
ccggccctgccctccctccggtggacttcccctcacgcagacttaagctgaggtcgttggatctctggcggggtgcagaacttaagcccaggccacagtaccctattcacgctctgtgctttccaagggggcaatggcggcttcctctgttctactccacactgggcagaagatgcctctaattggtctgggtaccncggaggagtgagcctcggtcaggtaaaaccacctttaagtatgccctcagcgtgggctacccc

SEQ ID NO: 560679 - DNA, 155 bp, Homo sapiens
gactgtattcagatgagattgcatggggacacaggaccaaagcatatcggtcttccaggtttattcattgtgtgcagatgacagaatttccctctcttaatgctgaataatattccattgtatatatataccaccttttctttattcattcatct

SEQ ID NO: 560680 - DNA, 581 bp, Homo sapiens
ttcggcacgagtagacccccaaagttacataatttgctctttttcttttttgcaagatcctttctgttttgataagtcctgtcttatgacaccgagttagggacattttcggtatctggttttgtaagatgttgacccatactttctccaaaaagacgaaacagagagtagacaaaaagagcctgtaatctaagcgactgactagggataaaataacgattgtaccatcttatccgatcaatgatttctattgtattggaattgttccagaacttgtgctgctgtcgcggattttccgatgctactattagggtaaatgataaacgatataggattcaacgactacttggagaaggtggaatgtcctttgtgtatttggtacgactgtcaaagaattctctgattatagacaacggcatcgcaacaccagaattatacgcactaaagaagattatttgtcctagtgtggaaagtatatccaatggtatgcgagaaattgaaaattacaaacggtttcaaagtccttatgttataaaaagtatcgactcacaagtaatgcaggaaaaagatggatcaaaaac

SEQ ID NO: 560681 - DNA, 136 bp, Homo sapiens
  misc_feature (41)..(41): n is a, c, g, or t
atagtataagtgtgattctacgtacgatatagcgtattgantctttaaactaaaactttcttactcgccggaaaatccttggattcgagtatggatcagctgagaacactgaaacagctgatgacttgtgaaagtg

SEQ ID NO: 560682 - DNA, 891 bp, Homo sapiens
  misc_feature (53)..(53): n is a, c, g, or t
  misc_feature (105)..(105): n is a, c, g, or t
  misc_feature (110)..(110): n is a, c, g, or t
  misc_feature (136)..(136): n is a, c, g, or t
  misc_feature (138)..(138): n is a, c, g, or t
  misc_feature (147)..(147): n is a, c, g, or t
  misc_feature (154)..(154): n is a, c, g, or t
  misc_feature (159)..(159): n is a, c, g, or t
  misc_feature (174)..(174): n is a, c, g, or t
  misc_feature (184)..(184): n is a, c, g, or t
  misc_feature (210)..(210): n is a, c, g, or t
  misc_feature (286)..(286): n is a, c, g, or t
  misc_feature (293)..(293): n is a, c, g, or t
  misc_feature (301)..(301): n is a, c, g, or t
  misc_feature (306)..(306): n is a, c, g, or t
  misc_feature (310)..(310): n is a, c, g, or t
  misc_feature (317)..(317): n is a, c, g, or t
  misc_feature (325)..(326): n is a, c, g, or t
  misc_feature (356)..(356): n is a, c, g, or t
  misc_feature (371)..(371): n is a, c, g, or t
  misc_feature (374)..(374): n is a, c, g, or t
  misc_feature (385)..(385): n is a, c, g, or t
  misc_feature (397)..(397): n is a, c, g, or t
  misc_feature (415)..(415): n is a, c, g, or t
  misc_feature (419)..(419): n is a, c, g, or t
  misc_feature (438)..(438): n is a, c, g, or t
  misc_feature (470)..(470): n is a, c, g, or t
  misc_feature (485)..(485): n is a, c, g, or t
  misc_feature (490)..(490): n is a, c, g, or t
  misc_feature (505)..(505): n is a, c, g, or t
  misc_feature (508)..(508): n is a, c, g, or t
  misc_feature (516)..(516): n is a, c, g, or t
  misc_feature (526)..(526): n is a, c, g, or t
  misc_feature (549)..(549): n is a, c, g, or t
  misc_feature (597)..(598): n is a, c, g, or t
  misc_feature (600)..(600): n is a, c, g, or t
  misc_feature (623)..(623): n is a, c, g, or t
  misc_feature (649)..(649): n is a, c, g, or t
gcgggtcagcgtatctggttgcgctggttctcttggttaatgggccacttggnggtctggctggcggcaagaagactgtcaatcagttgttcagtgttccttccngaggngggatactccataaccttggattcanantaagaattnaaaaagncagtncctagaactcccacntcccgggtgncctgtggctccgtggtgtgatgccgntggagtgtgctgcagtcagagccagggtgctatcaggcggtgtgtttcactctcatctgaccgcctggcgcggcgncgcggcnggccaggnttgcntggngggtgtnctgttttnngggggtcagggcagcctctcttccagtggnaccctccatcctgcngtnggcacattggntccatccaaggntgggtgtgttcggttagntggnctcctgagagtcctagggncaccctgggaggggggatgggttgggggggcnaggggcggtgctgtnttggncagtgtcctcttctnagntgcgatcngtgtgctgtncgtgattgaaaaccttaaaagcngcctctgccaaagtcaacagcagggtctggggtctggcctccaaattnncngtaatttccttctaatgtccggngctgactgaaggataaaatgcatggnacgcgatgcttcccctctgctgcctctgggtctgcatgggtgcatttcccaagggcctcagggactcgattgaggaagactactgggatctccttctttctctgggtaattttcttgaccctgtcatagtgtacaggttttactatacatttccttcttccttcagtcaggcaggtgacaaagtggctcattctagctttttctaggttttctccatagtctcactcacgtggagactatgc

SEQ ID NO: 560683 - DNA, 538 bp, Homo sapiens
tgattacaggatccttaagaggacaagggaggggatggactgggtgatttcatggtggcccgggataggtgaggtcctgggcttgagtcaaggggatgtttctcgagcttggggtcacttctttcttgcaatcactatgcatgcctaccatagtgtctgaggacgtaggatctagccctggtatgaggccctaggtctgttagtatctggggaggaaggatctggtacaggtatgaggacctgggtctgtccatgtctgaggaggtgggattgggccatagggtggggctgcaagctgcaatcccttatagcctgtactgcctttatccctccagaaaagcaagcgtgtatctagtcgggggtggcctcttgggactacatggccctcttctcccttgggatctccagagccccccgagaggcttagcaggccctctcctagtcacatcatgtcccagaaagcttttccacaccggtccctgcttttttgtcgggaccaagatctaactcggttcccaaggctgcattgcagggcccc

SEQ ID NO: 560684 - DNA, 85 bp, Homo sapiens
gcggccgcctactactactactgctcgaattcaagcttctaacgatgtacggggacatgggaataaattaattttctcaatgtag

SEQ ID NO: 560685 - DNA, 183 bp, Homo sapiens
agtatccccttacaccccacgatcaccacaggtgccaggagggggttagttgtggcaataaaacatgattaaggatactagtataagagatcaggttcgtcctataattgttgtgtatggctatcattttgtttcgaggttattgcgattagtcatcgttgggtggtgatcgtggggttgtaa

SEQ ID NO: 560686 - DNA, 473 bp, Homo sapiens
aaggtaaagatctgtctttgtaaccagcgatcatttttacgaaatcaacatggggaactattaaatcagggataattttaaaagatataggggacatccaatgaaccttactacgacattttaaaccccaaatacagaaaatctgttgactatgaaaatacccaaaaaattgccaactattacaactgtcgaacaaaataatactcattacacacttaacccgtagccaaacttaaaagtgacccgagtctctggtcaccatttcctcacaacttcatcagtctcttacccaaatacatcttgccattaataatgtcttccatttagggctaaccgttgaatatattatccaccatcctactaccaacgggatgaaccactctacccaaatgtcctctccaaacacgagttctaatctgacaattgcgagacataaatatcacttgccaaatatctatcctatcataactcag

SEQ ID NO: 560687 - DNA, 467 bp, Homo sapiens
  misc_feature (396)..(396): n is a, c, g, or t
accgtctgtgaagataacaatcagctctcttcaacggcaaactacacctatgctgtcagggtgtctccgacgatttgaatttcctaaaggacacacatatggtgagttcccaagagataagctggcactgggcaatcccctgtgcagaaggttgctttgggcaagtggtcattgcctactccctggtaattgacgatagaccagcccatgtaggcggttaccgtggccgtgaagatcttgaaagatgatgccacagagaaagacctttctgatctggtttcacagatggagatcatgaagatgattgggaaacacaagaatatcataaatcttcttggagcctgcacacaggatgggcctctctatgtcatagttgagtatgcctctaaaagcaanctccgagaatacctccgagcccggaggccacccgagatggagtactcctatgacattaaccgtgttcctga

SEQ ID NO: 560688 - DNA, 436 bp, Homo sapiens
gccttaagcctctcatctgtgtgtgggagcttagtgtggattgccgttttgcaagtacccgatcatatagggattcttcctctgttccatttagcactttgtctggaggggaggatgtagcgcgtaagtatactcatctggggatcctttgtgccggttaggtaccatttgctctttatccacctccttctgaagttgtaatgccaataacctgtcctgtacttcttgttgatgtctctcaaacagtatatgctccaaatctatcagtacgcgcgtaaagtttatttctgtatcctctgtgatctggggaagattcgggggacacttttcttcttttcgcagaaaagcattgatccttgactgcttcaaaggaagattcttggttttctctttgggaaatctccttactgatcagtaggcacgactcttcattttc

SEQ ID NO: 560689 - DNA, 322 bp, Homo sapiens
aaaatttaattcttaaaaaggggccggcccacctttggttccggataaaattcctcccgccgggctttggggggaaaaaaaagattttgaaccccccctgggttggccggggacccccccccccccccccccccctttttccaaaaaggttaaaaccgggtttccgggctggttttaaccggttttttttttgggaaaaaattcccttttttgcccccagggttgaaaacccggttaacccccggccagggtttggttttttttcccttaacccatttttttttatggacggggcccaattaatttaaaaattaaaaaggga

SEQ ID NO: 560690 - DNA, 523 bp, Homo sapiens
accggggaagtggaccccaaggtgatcctgtagggggtgcaaaccccaccgctatggaccagtcaaataaaagccttcaggcccctcgaaaaaaaaaaaaacaaaacaacagaaaaaaccttctgtaggagcacgccacgagcctccgcaagaagcccctaacaaacacgtacgattaggaccagctggcacatgaaactgaaaagaacacagttgctccagcagacgggtccgactaagaagacaaagcgggaaacgaaaagagggggggggcaactacacaccgaattataataaaacacccgggtggagaaacacgaacgactggtctacagcaacacaagctccaccaaaggaaggagtggatgcgaacaactaaccagtgcgaaataaaacacaacgagaggggagctcagacacgaggatggacctgcaactctatcatgcatattccagccctgcacctcgaggtggacagatccgaagtactaacctctaacaccaacgcacatctacactctac

SEQ ID NO: 560691 - DNA, 709 bp, Homo sapiens
  misc_feature (20)..(21): n is a, c, g, or t
  misc_feature (32)..(32): n is a, c, g, or t
  misc_feature (39)..(39): n is a, c, g, or t
  misc_feature (41)..(41): n is a, c, g, or t
  misc_feature (44)..(44): n is a, c, g, or t
  misc_feature (54)..(54): n is a, c, g, or t
  misc_feature (590)..(590): n is a, c, g, or t
  misc_feature (592)..(592): n is a, c, g, or t
  misc_feature (598)..(599): n is a, c, g, or t
  misc_feature (606)..(607): n is a, c, g, or t
  misc_feature (609)..(609): n is a, c, g, or t
  misc_feature (613)..(613): n is a, c, g, or t
actagtccacggttggcttnnaatatgccttncaatgtnanctnccaattccantccagcgtagactagtagccaaccgtggactagtagccaaccgtggactagtagccaaccgtggactagtagccaaccgtggactactagtccacggttggctactagtccacggttggctactagtccacggttggctactagtccacggttggctactagtccacggttggctactagtccacggttggctactagtccacggttggctactagtccacggttggctactagtccacggttggctactagtccacggttggctactagtccacggttggctactagtccacggttggctactagtctacgctggaatggaattgtccacggttggctactagtccacggttggctactagtccacggttggctactagtccacggttggctactagtccacggttggctactagtccacggttggctactagtccacggttggctactagtccacggttggctactagtccacggttggctactagtccacggttggctccacggttggctactagtccacggttggctgtgcntnccgctnncagtggnngnccanttgatggcttcagaaagctttgagtggacagaggcctggtcgctttctacgcacatcctgcatattttggagaagcctaccaaccgtgatggtgtg

SEQ ID NO: 560692 - DNA, 337 bp, Homo sapiens
gaggtaatcagaaactcaaaagaatacagccatttgtcccttacatacctaagaccgggaagccccctccccgctttgagtcttaccacctttgctttgagttgtcctgtctttccagaccgaaccaatgttcatcctacatatgttgattgatgtctcatgtctccctaaaatgtataaagccaaactgtgccctgaccaccttgggcatatgtcatcagaacctcctcaggctgtgtcaacgggcacgtatccacgaccgtgacaaaatacactttctaaattaactgagacctgtctcagaattgtgggttcacaattcagagttctgtctcct

SEQ ID NO: 560693 - DNA, 617 bp, Homo sapiens
  misc_feature (20)..(21): n is a, c, g, or t
  misc_feature (32)..(32): n is a, c, g, or t
  misc_feature (39)..(39): n is a, c, g, or t
  misc_feature (41)..(41): n is a, c, g, or t
  misc_feature (44)..(44): n is a, c, g, or t
  misc_feature (54)..(54): n is a, c, g, or t
actagtccacggttggcttnnaatatgccttncaatgtnanctnccaattccantccagcgtagactagtagccaaccgtggactagtagccaaccgtggactagtagccaaccgtggactagtagccaaccgtggactactagtccacggttggctactagtccacggttggctactagtccacggttggctactagtccacggttggctactagtccacggttggctactagtccacggttggctactagtccacggttggctactagtccacggttggctactagtccacggttggctactagtccacggttggctactagtccacggttggctactagtccacggttggctactagtctacgctggaatggaattgtccacggttggctactagtccacggttggctactagtccacggttggctactagtccacggttggctactagtccacggttggctactagtccacggttggctactagtccacggttggctactagtccacggttggctactagtccacggttggctactagtccacggttggctacagtccacggttgctcaagctggtgtgcagtgacacaatcaccataacctcaaactgctga

SEQ ID NO: 560694 - DNA, 611 bp, Homo sapiens
  misc_feature (20)..(21): n is a, c, g, or t
  misc_feature (32)..(32): n is a, c, g, or t
  misc_feature (39)..(39): n is a, c, g, or t
  misc_feature (41)..(41): n is a, c, g, or t
  misc_feature (44)..(44): n is a, c, g, or t
  misc_feature (54)..(54): n is a, c, g, or t
actagtccacggttggcttnnaatatgccttncaatgtnanctnccaattccantccagcgtagactagtagccaaccgtggactagtagccaaccgtggactagtagccaaccgtggactagtagccaaccgtggactactagtccacggttggctactagtccacggttggctactagtccacggttggctactagtccacggttggctactagtccacggttggctactagtccacggttggctactagtccacggttggctactagtccacggttggctactagtccacggttggctactagtccacggttggctactagtccacggttggctactagtccacggttggctactagtctacgctggaatggaattgtccacggttggctactagtccacggttggctactagtccacggttggctactagtccacggttggctactagtccacggttggctactagtccacggttggctactagtccacggttggctactagtccacggttggctactagtccacggttggctactagtccacggttggctaactccaccaggtaactagccaaccgcgactagtgggatcctcagagcaacgagag

SEQ ID NO: 560695 - DNA, 622 bp, Homo sapiens
  misc_feature (20)..(21): n is a, c, g, or t
  misc_feature (32)..(32): n is a, c, g, or t
  misc_feature (39)..(39): n is a, c, g, or t
  misc_feature (41)..(41): n is a, c, g, or t
  misc_feature (44)..(44): n is a, c, g, or t
  misc_feature (54)..(54): n is a, c, g, or t
  misc_feature (533)..(533): n is a, c, g, or t
  misc_feature (616)..(617): n is a, c, g, or t
  misc_feature (620)..(620): n is a, c, g, or t
actagtccacggttggcttnnaatatgccttncaatgtnanctnccaattccantccagcgtagactagtagccaaccgtggactagtagccaaccgtggactagtagccaaccgtggactagtagccaaccgtggactactagtccacggttggctactagtccacggttggctactagtccacggttggctactagtccacggttggctactagtccacggttggctactagtccacggttggctactagtccacggttggctactagtccacggttggctactagtccacggttggctactagtccacggttggctactagtccacggttggctactagtccacggttggctactagtccacggttggctactagtccacggttggctactagtctacgctggaatggaattgagccaaccgtggactagtagccaaccgtggactagtagccaaccgtggactagtagccaaccgtggactagtagccaaccgtggactagtagccaaccgtggactagtagccaaccntggactagtagccaaccgtggactagtagccaaccgtggactagtagccaaccgtggactagtaccaaccgtggactagtggnnagncc

SEQ ID NO: 560696 - DNA, 653 bp, Homo sapiens
cctccgagccaggtgcgtggatatattctcgtggtgcgccgttttttaagcccgtctggaaaggcgcagtatttgggtaggagtgacccgattttccaggtgccgtccgtcacccctttctttgactcagaaagggaactccctgaccccttgcgcttcccaagtgaggcaatgcctcgccctgcttcggctcgcgcatggtgctcgctcccactgacctgcgcccactgtctggcactccctagtgagatgaacccggtacctcagctggaaatgcagaaatcacccgtcttctgcgtcgctcacgctgggagctgtagaccggagctgtagacaggagctgttcctatacgggcatctcggctcctccttgaccaagcttgaaggtgagcacctcgaagggctacttatcatgtcgaaaggcacgggtttgcatggcggttcatcacaggtcaataccccagtctgcacgacagtccactgtggggcacggcaccgcgagacttcaacaagccctggcaacaccaaagaatggaaccaccctccgctgacttcgaccatctggcctggctgatgcggcctgactcccagacccataccgccgcttttgcagctgcccacactgcactacgctacaacgcattcaaccatgg

SEQ ID NO: 560697 - DNA, 331 bp, Homo sapiens
  misc_feature (12)..(12): n is a, c, g, or t
aaaggggggggncccccccccccccttcctggggtggggggggggggttttttttttttaacggttttttccccccccccccaaatttttggggggggttttttttttttggggtccggggggccgtttttttttttttttttttcccccccgcctttttttcccccgggggttttttgtcctgcttttttttgggtttttcttcagtaaatttgttgtgggtggtgtgattgataaaaataaaataataataaaaaaatatatgaaaagaaaaaaatttgaaaaaaaaaatttgaattatatgaataaattggtaatgtataaaaaaaaa

SEQ ID NO: 560698 - DNA, 580 bp, Homo sapiens
  misc_feature (20)..(21): n is a, c, g, or t
  misc_feature (32)..(32): n is a, c, g, or t
  misc_feature (39)..(39): n is a, c, g, or t
  misc_feature (41)..(41): n is a, c, g, or t
  misc_feature (44)..(44): n is a, c, g, or t
  misc_feature (54)..(54): n is a, c, g, or t
  misc_feature (345)..(345): n is a, c, g, or t
  misc_feature (374)..(374): n is a, c, g, or t
  misc_feature (491)..(491): n is a, c, g, or t
  misc_feature (574)..(575): n is a, c, g, or t
  misc_feature (578)..(578): n is a, c, g, or t
actagtccacggttggcttnnaatatgccttncaatgtnanctnccaattccantccagcgtagactagtagccaaccgtggactagtagccaaccgtggactagtagccaaccgtggactagtagccaaccgtggactactagtccacggttggctactagtccacggttggctactagtccacggttggctactagcacggttggctactagtccacggttggctactagtccacggttggctactagtccacggttggctactagtccacggttggctactagtccacggttggctactagtctacgctggaatggaattgagccgaccgtggagccaaccntggactagtagccaaccctggactagtanagccaaccgtggactagtagccaaccgtggactagtagccaaccgtggactagtagccaaccgtggactagtagccaaccgtggactagtagccaaccgtggactagtagccaaccntggactagtagccaaccgtggactagtagccaaccgtggactagtagccaaccgtggactagtaccaaccgtggactagtggnnagncc

SEQ ID NO: 560699 - DNA, 751 bp, Homo sapiens
  misc_feature (20)..(21): n is a, c, g, or t
  misc_feature (32)..(32): n is a, c, g, or t
  misc_feature (39)..(39): n is a, c, g, or t
  misc_feature (41)..(41): n is a, c, g, or t
  misc_feature (44)..(44): n is a, c, g, or t
  misc_feature (54)..(54): n is a, c, g, or t
  misc_feature (307)..(307): n is a, c, g, or t
  misc_feature (342)..(342): n is a, c, g, or t
  misc_feature (358)..(358): n is a, c, g, or t
  misc_feature (516)..(516): n is a, c, g, or t
  misc_feature (545)..(545): n is a, c, g, or t
  misc_feature (662)..(662): n is a, c, g, or t
  misc_feature (745)..(746): n is a, c, g, or t
  misc_feature (749)..(749): n is a, c, g, or t
actagtccacggttggcttnnaatatgccttncaatgtnanctnccaattccantccagcgtagactagtagccaaccgtggactagtagccaaccgtggactagtagccaaccgtggactagtagccaaccgtggactactagtccacggttggctactagtccacggttggctactagtccacggttggctactagtccacggttggctactagtccacggttggctactagtccacggttggctactagtccacggttggctactagtccacggttggctactagtccacggttggctaggctntggtctcgaactcctgacctcaggtgatctgcccncctcggcctcctaaantgctgggattacaggcatgagccaccgtgcacggttggctactagtccacggttggctactagtccacggttggctactagtccacggttggctactagtccacggttggctactagtctacgctggaatggaattgagccgaccgtggagccaaccntggactagtagccaaccctggactagtanagccaaccgtggactagtagccaaccgtggactagtagccaaccgtggactagtagccaaccgtggactagtagccaaccgtggactagtagccaaccgtggactagtagccaaccntggactagtagccaaccgtggactagtagccaaccgtggactagtagccaaccgtggactagtaccaaccgtggactagtggnnagncc

SEQ ID NO: 560700 - DNA, 144 bp, Homo sapiens
agcgggctaagggacaaagccccaggcgatgaggaggtggcttggacagctggtgctcacacacacacacacacacagcctgtctcccagagcctggcgcccaatctccactcggtcaaccccatccctccagctccgcgagcg

SEQ ID NO: 560701 - DNA, 354 bp, Homo sapiens
gctcgagcggtgtagcatacagccctgctacatggaatacagtgcgtacacttcgggatgcattaaccagtgctgcagtgaatccactgcattcagtgatgctgcatggaatgcactaccttcaatcgagatgctttgggccatgctgcataaaatccactgcatttaatcgggatgcattgggccacgctccatggaatcaactgcattcaatcaagctgcatggaatccactgcattcaatcgggatgcattttaccacgctgtatggggtatactgtattcaatcacgctgcatggaattcactgcattcaattcggatccattgtgccaaaatgcatggaatccactgag

SEQ ID NO: 560702 - DNA, 160 bp, Homo sapiens
cttaatagctagaagaacctccataatacctggatgttcttcatactattaggactcatcgcttcgaatgtaacggcgtgtcagagtcatgaaaatatattaatattactgctgtaagagaaatgaatgagcctagcagatgataggatgtttcatgtgg

SEQ ID NO: 560703 - DNA, 348 bp, Homo sapiens
atttttaaaagacagggtctcactctcttacccaggctagagtgcagtggtgtgatcatagttcatcataactttgaatctctgggcttaagcaatcctcccatgttagcttcccaagtagctaggactacagggttgtgctaccacgcctgtaatcccagcactttgggaggccgaggcgagcggatcacgaggtcaggagatcgagaccgcggtgaaaccccgtctctactaaaaatacgaaaaaaaaattagccgggcgcagtgcaggcgcctgtagtcccagctacttgggaggctgcggcaggagaatggtgtgaacctgggaggcggagcttgcagtgagcc

SEQ ID NO: 560704 - DNA, 589 bp, Homo sapiens
  misc_feature (20)..(21): n is a, c, g, or t
  misc_feature (32)..(32): n is a, c, g, or t
  misc_feature (39)..(39): n is a, c, g, or t
  misc_feature (41)..(41): n is a, c, g, or t
  misc_feature (44)..(44): n is a, c, g, or t
  misc_feature (54)..(54): n is a, c, g, or t
  misc_feature (354)..(354): n is a, c, g, or t
  misc_feature (383)..(383): n is a, c, g, or t
  misc_feature (500)..(500): n is a, c, g, or t
  misc_feature (583)..(584): n is a, c, g, or t
  misc_feature (587)..(587): n is a, c, g, or t
actagtccacggttggcttnnaatatgccttncaatgtnanctnccaattccantccagcgtagactagtagccaaccgtggactagtagccaaccgtggactagtagccaaccgtggactagtagccaaccgtggactactagtccacggttggctactagtccacggttggctactagtccacggttggctactagtccacggttggctactagtccacggttggctactagtccacggttggctactagtcactagtccacggttggctactagtccacggttggctactagtccacggttggctactagtctacgctggaatggaattgagccgaccgtggagccaaccntggactagtagccaaccctggactagtanagccaaccgtggactagtagccaaccgtggactagtagccaaccgtggactagtagccaaccgtggactagtagccaaccgtggactagtagccaaccgtggactagtagccaaccntggactagtagccaaccgtggactagtagccaaccgtggactagtagccaaccgtggactagtaccaaccgtggactagtggnnagncc

SEQ ID NO: 560705 - DNA, 654 bp, Homo sapiens
  misc_feature (20)..(21): n is a, c, g, or t
  misc_feature (32)..(32): n is a, c, g, or t
  misc_feature (39)..(39): n is a, c, g, or t
  misc_feature (41)..(41): n is a, c, g, or t
  misc_feature (44)..(44): n is a, c, g, or t
  misc_feature (54)..(54): n is a, c, g, or t
  misc_feature (419)..(419): n is a, c, g, or t
  misc_feature (448)..(448): n is a, c, g, or t
  misc_feature (565)..(565): n is a, c, g, or t
  misc_feature (648)..(649): n is a, c, g, or t
  misc_feature (652)..(652): n is a, c, g, or t
actagtccacggttggcttnnaatatgccttncaatgtnanctnccaattccantccagcgtagactagtagccaaccgtggactagtagccaaccgtggactagtagccaaccgtggactagtagccaaccgtggactactagtccacggttggctactagtccacggttggctactagtccacggttggctactagtccacggttggctactagtccacggttggctactagtccacggttggctactagtccacggttggctactagtccacggttggctactagtccacggttggctactagtccacggttggctactagtccacggttggctactagtccacggttggctactagtccacggttggctactagtctacgctggaatggaattgagccgaccgtggagccaaccntggactagtagccaaccctggactagtanagccaaccgtggactagtagccaaccgtggactagtagccaaccgtggactagtagccaaccgtggactagtagccaaccgtggactagtagccaaccgtggactagtagccaaccntggactagtagccaaccgtggactagtagccaaccgtggactagtagccaaccgtggactagtaccaaccgtggactagtggnnagncc

SEQ ID NO: 560706 - DNA, 1762 bp, Homo sapiens
  misc_feature (921)..(921): n is a, c, g, or t
  misc_feature (977)..(977): n is a, c, g, or t
  misc_feature (1280)..(1280): n is a, c, g, or t
  misc_feature (1497)..(1497): n is a, c, g, or t
ttgtgtgtttatggtcgtgtgttacttgtagtgtatagtgttgtttcgtagttttgggcttttcgtattgtggtagtgattagtttagttttgtcgtgatagtttgttgttattagtacttcttagttgtgtgtttcgtctgtgtgtgtgtgttctcttgtgtttctgtgctgtgtttgctcgttacatcttgtgatagtacctcacattatcaccccttggggtgtcacccacccccgtgggtgggcactcccttttgacctctgggagggcccccccagaggtgtgccccaagaaacaccgcggtgttttgttttaacacgcccgcctccgttctttttacccggtgctctttataggtgtaccgcagcccctctggggtgggcgaaattattcctgggcctaccagagaggccctgtgtttcatcctcgccgcccctaattggctcccctccggcgatgtagcccctcctctcaaaggagtactcctgcgtctccgtggtgcttacatgagagacccccccggggtgtttggtcgccggccctacgaccccccccaacggctgttggagacaacacacggtggtttttccggtcgacaccacgagaaatatctgtggcccaacgtgtgtgggtggggaatttgctcggtgtttctcccggggacctcttgtggtaggaaccaacgcgggtgttttctccaccgccccacggggctcttcttcatcccatctctcatacatatggcccccacaacattggtggtgcgcgcgcaacatccacgaccgctcggtgtatattattcgccgcttgtgtaatggataccctccctcttctcctcgcttttatatgcgctctcatatccacgcatgtttttcgcggcgattgtaataagagatagagcgcccgccgcatgagagnctttatagtgtccgcacacgacactggcgggtgttcttatcgcgcccacgcgtgtnttcacacgccggagatgttattatactagagagatgtcacctgtatatctcgcgcgatatatctttatagagaaatatatatcctctctcttggtgtgctctgctcgcccgacagaccccacgagagtgttgtacacacacagagagcgccccctgcgtgtctacagagattatccttatcacatatagtgtttttttgggggagagacccaccacagagatctcgagagagagatgtttatatctccccgcgcaccgcgcccatcacgatacgcaccgcgctgccctgagagagaaatactntcacacacagtgttcacacagagggtgagaaagactctgtggtctctcacacacacacactctcacacagagaatacacacacaccacagagactcccacacacgcgcgacaccacagagaggagagagagtggagaagagaggagaagagaggtgtcgagtgtgagaacacacagcgtggtgatagagaagtgtaaagagagcacatatgagaatntgtggtcacatggtcacacacacagcacaacatgtggtcgaggagcgccacaaggcacactctcgaggcccctgtgaaggaccaccaccgtataatgagagatattggtaaatgcgagatttatgggaattacccacaggaaccacttatgggaagccacacatttttttggggtttccaagagggttaacccccccctgggttgtgaaattggaccggttttatccataaaaaaaattatggctttttgttggggaggaaaaat

SEQ ID NO: 560707 - DNA, 776 bp, Homo sapiens
  misc_feature (20)..(21): n is a, c, g, or t
  misc_feature (32)..(32): n is a, c, g, or t
  misc_feature (39)..(39): n is a, c, g, or t
  misc_feature (41)..(41): n is a, c, g, or t
  misc_feature (44)..(44): n is a, c, g, or t
  misc_feature (54)..(54): n is a, c, g, or t
  misc_feature (307)..(307): n is a, c, g, or t
  misc_feature (342)..(342): n is a, c, g, or t
  misc_feature (358)..(358): n is a, c, g, or t
actagtccacggttggcttnnaatatgccttncaatgtnanctnccaattccantccagcgtagactagtagccaaccgtggactagtagccaaccgtggactagtagccaaccgtggactagtagccaaccgtggactactagtccacggttggctactagtccacggttggctactagtccacggttggctactagtccacggttggctactagtccacggttggctactagtccacggttggctactagtccacggttggctactagtccacggttggctactagtccacggttggctaggctntggtctcgaactcctgacctcaggtgatctgcccncctcggcctcctaaantgctgggattacaggcatgagccaccgtgcacggttggctactagtccacggttggctactagtccacggttggctactagtccacggttggctactagtccacggttggctactagtctacgctggaatggaattgtccacggttggctactagtccacggttggctactagtccacggttggctactagtccacggttggctactagtccacggttggctactagtccacggttggctactagtccacggttggctactagtccacggttggctactagtccacggttggctactagtccacggttggctagtcaagtcgcaagcagtgggagtggagaaggaacaaagcaatctgtacctggttcgcgatcattagttgtaacaccactgcactcggaccagccacccgtggact

SEQ ID NO: 560708 - DNA, 670 bp, Homo sapiens
  misc_feature (270)..(270): n is a, c, g, or t
ggccggtaccttcaacatctcattccgtcagagaaatgcaatcaaaaccacaatgagataccatctcaccccagttagaatggcaatcattaaaaagtcaggaaacaacaggtgctggagaggatgtggagaaataggaacacttttacactgtgggtgggactgtaaactagttcaaccattgtggaagtcagtgtggcaattcctcagggatctagaactagaaataccatttgacccagccatcccattactgggtatctacccaanggtctataaatcatgctgctataaagacacatgcacacgtatgtttattgaggcactattcacaatagcaaagacttggaatcaacccaaatgtccaacaatgatagactggattaagaaaatgtggcacatatacaccatggaatagtatgcagccataaaaacatgaaaaaatgctcaccatcactggccatcagagaaatgcaaatcaaaaccacaatgagataccatctcacctacagaatggcactctcccaccagagccttatgagatgctccatgctaaatgcatggcatagagtaagcatgccagcagtccagaccgttattcccagcatgcgtgctcacagtagatgctctccatcctcaggaggagatacaaagatggccatgagatggg

SEQ ID NO: 560709 - DNA, 769 bp, Homo sapiens
  misc_feature (20)..(21): n is a, c, g, or t
  misc_feature (32)..(32): n is a, c, g, or t
  misc_feature (39)..(39): n is a, c, g, or t
  misc_feature (41)..(41): n is a, c, g, or t
  misc_feature (44)..(44): n is a, c, g, or t
  misc_feature (54)..(54): n is a, c, g, or t
actagtccacggttggcttnnaatatgccttncaatgtnanctnccaattccantccagcgtagactagtagccaaccgtggactagtagccaaccgtggactagtagccaaccgtggactagtagccaaccgtggactactagtccacggttggctactagtccacggttggctactagtccacggttggctactagtccacggttggctactagtccacggttggctactagtccacggttggctactagtccacggttggctactagtccacggttggctactagtccacggttggctcatgcctgtaatcccagcacactgggaggcttagatgggaggattgtttgagcccatgagtttgagaccagcctgggcaacatggccaaatcctatccttaccaaaaaaaaatttattttaattagctgggtatgttggtatgcatctgtggtcccagctactcaggaggctgaggcaagagggtcagttgagcctgagtggtgatgctgcaggcagccatgctcatgccactgcactccaggcaataagacaagaaaaggaaataaaagatataaagattgggaaggaataaataaaagcttctttgttaaccaatggcatggttgtctatgtagaaaatccacaagaattgacccaaaagaactcttggaactaataagtggttagagagagaatgcaggaaattttaaaagtcaattgttttcttacatatcatcactgcatagtagagccaaccgtggactagt

SEQ ID NO: 560710 - DNA, 165 bp, Homo sapiens
caatttaaatttagaattaaaagtaaatggtataagaaaaatattttttcagtcccagtagccccatttcagggcttgctagttacatgggtttgtgtttaatggccagtactccagtgactatcatataattggggcccaataaataaaacttaatgaatccga

SEQ ID NO: 560711 - DNA, 263 bp, Homo sapiens
tgcctcaaaaaaaaaaaaaaaaagataattgatcgcaatcttaattgtgggcttcattcctgctctgctctttgtccaaacagatttttctgaatgtcaggggtgaagttcaagttctagcacccagtgagcattctgccttcccctgctgcagggcttgatgtatcggctcatcttcccctagtgatgccagccataccctgttccccttacccttcctaccagtgtttctcttggtgcgaggtagctcctgaatggatgca

SEQ ID NO: 560712 - DNA, 823 bp, Homo sapiens
  misc_feature (630)..(630): n is a, c, g, or t
  misc_feature (782)..(782): n is a, c, g, or t
  misc_feature (819)..(819): n is a, c, g, or t
attgctggttcaaatggtagttctgttttaacttctttgagaaatctccaaactgctttcacagtggctgaactaatttgcatttccatcagtgtaggcgcattctacactgcactggcttctacagtgttgaagcattccgtttttcccacagcctcaccagcatctgttatttttttgactttttgataatagccattctgactggtgtgagattgtaactcattgtggttttgatttgcatttatctgattagtaatgttgagcattttttcatgtttgttaaccgcttgtatgttgtcttttgagaagtgtctgttcaagtcttttggcatttttttaatgggtttttgtttgtgtgtgtgtatttttgtttttgtttttgttttgagatggagtttcactgttgtcacccaggctagagtgcaatggcaccatctcagctcactgcaacctccacctcccgggttcaagcgattctcctgccccagcctcctgagttgctgggattacaggtgcctgccaccaagcgtggctaattttggtacttttagtagagacagggtttcaccatgttggccagcctggtctcgaattcctgacctcaggtgatccacccatctcagcctnccaaagtgctgggattacaggagtgagccaccacacctggcccgagttacttggttttcgtttctgaattggtttaattccttatagattttggacattagacctttttcagatgcccagtttgggaatatctctccatctgtaggtgctgntactggattgaagtccttttgcgggcaaaactcttanttga

SEQ ID NO: 560713 - DNA, 209 bp, Homo sapiens
ccccctgctgaaggcttttacgtgttatgcctaatctcagctgggctctatattgtccaactacactcgctcaggaagccctctgttttgaaaactggtgtgtgcgttttttatgacagacttgctacccctaccccatgggagaggaaagagggctcatgacccgaagggctagccaaatattgtgggtgcataaaggtggtctgcca

SEQ ID NO: 560714 - DNA, 842 bp, Homo sapiens
  misc_feature (369)..(369): n is a, c, g, or t
  misc_feature (393)..(394): n is a, c, g, or t
  misc_feature (412)..(412): n is a, c, g, or t
  misc_feature (416)..(417): n is a, c, g, or t
  misc_feature (426)..(426): n is a, c, g, or t
  misc_feature (429)..(430): n is a, c, g, or t
  misc_feature (448)..(448): n is a, c, g, or t
  misc_feature (468)..(468): n is a, c, g, or t
  misc_feature (470)..(472): n is a, c, g, or t
  misc_feature (482)..(482): n is a, c, g, or t
  misc_feature (508)..(508): n is a, c, g, or t
  misc_feature (510)..(510): n is a, c, g, or t
  misc_feature (531)..(531): n is a, c, g, or t
  misc_feature (534)..(535): n is a, c, g, or t
  misc_feature (558)..(558): n is a, c, g, or t
  misc_feature (563)..(563): n is a, c, g, or t
  misc_feature (570)..(570): n is a, c, g, or t
  misc_feature (585)..(585): n is a, c, g, or t
  misc_feature (589)..(589): n is a, c, g, or t
ggatctgtggctggaagcgaggaggctccacacgggcgttgcagctaccgcagccaggatctgggcatcaggcacggcatgacccctccgaggctcttctgggtgtggctgctggttgcaggaacccaaggcgtgaaccgatgggttaacattgcgggtggcggttgggggcgggccaaccaaacccaagggcccggggttggggttctttcttactggagggccaggtggggcacctgttggtgttgacaatgctggttgggaccctggaccttgattgcccagggtccggtcttgccggtgcccctgggggcctttcgaggaaacgcccacccagggccttctggggcgggaggcttgccctttcgnggccaggatcaggccccatcatgnntggacgaggtccagtgcncggnnaaccgaggnctnnactggccgactgcaagtncctgggctggctgaagagcnannntgcaggcacngagagagacgctggtgtggtctgcangnaatgataacaggagcaccaanccnntggacctctccagggagctctcngaggnccttggncagatctttgacagncagnggggcttggactgtccatcagcgtgaatgtgcagggcgaggacgccctgggcttctgtggggcacacggtcatcctgactgcaacctggaggcccaggccctgttgggaaggagccgggcagcagtgtcccactgagtgtggatgctgagtgtgtgcccatgggtcggggccttctcaggtaccttctactccccggagggatttgcttctccctgtttgtcgtcattgttccccaagctggctctggccatt

SEQ ID NO: 560715 - DNA, 194 bp, Homo sapiens
cgacgtgttccccccagcgcagccagcaggactggggggatactggcagttgaccttgacctgggtttcactttttcttttgtaatatgatcgtggttgccgtggagttttaatggcttctgataattctgtgcattattttcgggacgtgtccaaaagaaggctggtgtgggtggtttcagagaccatagcca

SEQ ID NO: 560716 - DNA, 809 bp, Homo sapiens
  misc_feature (336)..(336): n is a, c, g, or t
  misc_feature (360)..(361): n is a, c, g, or t
  misc_feature (379)..(379): n is a, c, g, or t
  misc_feature (383)..(384): n is a, c, g, or t
  misc_feature (393)..(393): n is a, c, g, or t
  misc_feature (396)..(397): n is a, c, g, or t
  misc_feature (415)..(415): n is a, c, g, or t
  misc_feature (435)..(435): n is a, c, g, or t
  misc_feature (437)..(439): n is a, c, g, or t
  misc_feature (449)..(449): n is a, c, g, or t
  misc_feature (475)..(475): n is a, c, g, or t
  misc_feature (477)..(477): n is a, c, g, or t
  misc_feature (498)..(498): n is a, c, g, or t
  misc_feature (501)..(502): n is a, c, g, or t
  misc_feature (525)..(525): n is a, c, g, or t
  misc_feature (530)..(530): n is a, c, g, or t
  misc_feature (537)..(537): n is a, c, g, or t
  misc_feature (552)..(552): n is a, c, g, or t
  misc_feature (556)..(556): n is a, c, g, or t
ggatctgtggctggaagcgaggaggctccacacgggcgttgcagctaccgcagccaggatctgggcatcaggcacggcatgacccctccgaggctcttctgggtgtggctgctggttgcaggaacccaaggcgtgaagatgtatggtgacatggcggctggtcgcatgggggcgccaactagaccagggatcgcgtggtagatcttctacgagaaggccagtggggcactgtgtgtgataacctgtggtgacctgactgatgccagggtcgctctgcacgggccctgggcttcgagaagtgctcgaccagggtctgggcaatgagcatgccttcgnggccaggatcaggccccatcatgnntggacgaggtccagtgcncggnnaaccgaggnctnnactggccgactgcaagtncctgggctggctgaagagcnannntgcaggcacngagagagacgctggtgtggtctgcangnaatgataacaggagcaccaanccnntggacctctccagggagctctcngaggnccttggncagatctttgacagncagnggggcttggactgtccatcagcgtgaatgtgcagggcgaggacgccctgggcttctgtggggcacacggtcatcctgactgcaacctggaggcccaggccctgttgggaaggagccgggcagcagtgtcccactgagtgtggatgctgagtgtgtgcccatgggtcggggccttctcaggtaccttctactccccggagggatttgcttctccctgtttgtcgtcattgttccccaagctggctctggccatt

SEQ ID NO: 560717 - DNA, 162 bp, Homo sapiens
  misc_feature (151)..(151): n is a, c, g, or t
ccctctttgctgatcttctgccccatcctgttggtttctatgttgggccctgtgttctggctccccacagtaggggggcatgcttctgtttgcccatctgtgagctgggggcatggtccctggctcctcggctagcctgcacacctggggncactgcaggtt

SEQ ID NO: 560718 - DNA, 264 bp, Homo sapiens
ctctagaggacccccgatttattcaacgtggtaaacggggaaagccacgtgtcaggaaccaccacgctcacggactgcctgcgacgattcaccagaccagagcacttggcagcagcgccaagtatcaagctgcagcggcttgccatatgctaccagtgagtccactacagcagctcactatgaagagaactgcccactcgtagcctgattttcatctcgctacgaatttgaacatctctgccatagcttgcgcgcggaaggatc

SEQ ID NO: 560719 - DNA, 242 bp, Homo sapiens
caacgatggtcctcagtacttgtgaggctgaggcaagagaatcacttgaaccctggaggcggaggttgcagtagccaaggccacgacattgcactccagccagggcaacaagagcaaaactcagtatcaaaaaacaacaacaagaacaaaaacatattgcaaactcagctcccttctgttgtaattccacccccatcatgttgacacagttatccacagaagggagctgaggaccatcgttg

SEQ ID NO: 560720 - DNA, 263 bp, Homo sapiens
  misc_feature (33)..(33): n is a, c, g, or t
cccttccctcggctcccagccctacagacttgntgtgtgacctcaggccagtgtgccgacctctttgggcctcagtttttccagctatgaaaacagctatctcccaaagttgtgtgaagcagaaaagaaaagctggaggaaggccgtgggccaatgggaaagctcttgtttttattaatattgttgccgctgttggggtgttgttattaattaatattcatattattttttttatacttacataaaaattttgttccagtgga

SEQ ID NO: 560721 - DNA, 159 bp, Homo sapiens
tcttcctatgaaatctgggaggaagctaccctcatcttttgcattctgcatctctgaaaaacctatcgttgtgtggatgattgctgccagcttgaggagtagctgtgtatccatagatcatggcttcagggaactctgagagcgttgaagaatcactgg

SEQ ID NO: 560722 - DNA, 216 bp, Homo sapiens
cactgttgttatctcagataatcatttcttatccgaagtagtttttccacactatcttacaacattaaggacaaagaaaaaatattgctgagaatatatagactttttaaagttcagtgtttaaactccttatggaaaagaacatgagatattacttttccactttctatttcctgttcgggacttggaaaacccctggcgcctggggtatcgagc

SEQ ID NO: 560723 - DNA, 429 bp, Homo sapiens
ctccccagtcatatcaaaagtactcttcaatatttatacgatccatgtttatagcaacacttttctcaaatagctaagatgtagaacagacccatgtccatcagcggatgaatgaataggccaaatgtggtatatccatacaagagattaccattcagccttgaaaagaaggaaattctacaatatgctacaacattgaagaacccacgcacattgtactagatgaaactaagccagtcacgaaaaggcaaacactatgattccttttatatgaggtacttggtcaaagtcatagagacaaaaagtagaatggtggttaccaggggctgcggagggaggaatgcggaattattgtttaatgggtatacaatttcagttttacaagatgaaaagagttatgaggatggataatagtaatggttggacaac

SEQ ID NO: 560724 - DNA, 589 bp, Homo sapiens
ataccagagtggtacgttgtcacacatgatgaacctctatgacacattatcatccaaagtccatagtttagattggagttcactgcttggtgttgtacattctatgggtatgtgatacaaatgtgataatgacatctatctatgttatagtgtcacgacagaacatagtttgcactgccctaaaaatcgtctgttctctgcctattcatctctttcacttccccgactccaacccctaataaccactgatctttgtactatctccacagtttagcctttcctagaatgccacatagttggaatcatacagattggcttctttcagttagtaatatgcatttaaggttcttccatgttttttcatggcttgatagctcatttctttttagtgctgaataattttccattgtctgaatgtaccacagtttatttatccattcatctactgaagaacatcttgttgcttctgagttctgggcaattatgaataaagctgctataataaatatcagtgtgcaggttttgtgtggacatgagttctcccttcatttgggtaaataccaaagaatgtgatcggattgtacggtaa

SEQ ID NO: 560725 - DNA, 316 bp, Homo sapiens
gctaagcgtgactgactctcttatttaccaccgctacagactccaactccttcagttttggaactcggatgggctttctttgctccacaacctgtagatggcctattgcggaaccttgttattgtgatgaggtctggtttagcagagatacggttcctataaagtagagtgaaaaagaagaaaggatttggaagctgaaagacaacaagttaaaaattgatggagtttgtacatcttgctgcttttttattggtttactttttttacaaagtcgataaagacaacataataaaataaacaagacaataaacaacga

SEQ ID NO: 560726 - DNA, 95 bp, Homo sapiens
tactcaacttcttttttttattataaaaggtacacttcgtgttttatattttaaacaacaaagaaaaaagcattcttacacactttaaaaaaaaa

SEQ ID NO: 560727 - DNA, 200 bp, Homo sapiens
ggtcgcccagcttccggcgctgacgggtgtggaccgcggacgtcgctgggacaaccccttcccgctgctcggcggcggcaacttggccgggccgttcttcggttgtggtttggcctccgcctcttggacttgggcttggggttataatgagcgcatacttcatatccagtgtcccggcgagagagcgcgttgggttatat

SEQ ID NO: 560728 - DNA, 735 bp, Homo sapiens
  misc_feature (20)..(21): n is a, c, g, or t
  misc_feature (32)..(32): n is a, c, g, or t
  misc_feature (39)..(39): n is a, c, g, or t
  misc_feature (41)..(41): n is a, c, g, or t
  misc_feature (44)..(44): n is a, c, g, or t
  misc_feature (54)..(54): n is a, c, g, or t
  misc_feature (307)..(307): n is a, c, g, or t
  misc_feature (342)..(342): n is a, c, g, or t
  misc_feature (358)..(358): n is a, c, g, or t
  misc_feature (494)..(494): n is a, c, g, or t
  misc_feature (526)..(526): n is a, c, g, or t
  misc_feature (611)..(611): n is a, c, g, or t
  misc_feature (620)..(620): n is a, c, g, or t
  misc_feature (631)..(631): n is a, c, g, or t
  misc_feature (634)..(636): n is a, c, g, or t
  misc_feature (638)..(639): n is a, c, g, or t
  misc_feature (644)..(644): n is a, c, g, or t
actagtccacggttggcttnnaatatgccttncaatgtnanctnccaattccantccagcgtagactagtagccaaccgtggactagtagccaaccgtggactagtagccaaccgtggactagtagccaaccgtggactactagtccacggttggctactagtccacggttggctactagtccacggttggctactagtccacggttggctactagtccacggttggctactagtccacggttggctactagtccacggttggctactagtccacggttggctactagtccacggttggctaggctntggtctcgaactcctgacctcaggtgatctgcccncctcggcctcctaaantgctgggattacaggcatgagccaccgtgcccagccttattttttttttcttttttcttgagacagggtctcactttgtcacccaggctgcagtgcagtggagtggtcgtggctgcactgcagcctccacctcccnggctcaagcgattctcctgcctcagcctcccnagtagctggaattacaggcacatgccaccacgcctggctaatttttgtatttttagtggagacggggtttcaccatgttggccangctggtctngaactcctganctnnngnnatccncatgcctaagcttcccaaaatgctgggattacaggcatgagccactgtgcccagtcagtctgtagtgtttttacatctgatcttcacacag

SEQ ID NO: 560729 - DNA, 543 bp, Homo sapiens
  misc_feature (20)..(21): n is a, c, g, or t
  misc_feature (32)..(32): n is a, c, g, or t
  misc_feature (39)..(39): n is a, c, g, or t
  misc_feature (41)..(41): n is a, c, g, or t
  misc_feature (44)..(44): n is a, c, g, or t
  misc_feature (54)..(54): n is a, c, g, or t
  misc_feature (454)..(454): n is a, c, g, or t
  misc_feature (537)..(538): n is a, c, g, or t
  misc_feature (541)..(541): n is a, c, g, or t
actagtccacggttggcttnnaatatgccttncaatgtnanctnccaattccantccagcgtagactagtagccaaccgtggactagtagccaaccgtggactagtagccaaccgtggactagtagccaaccgtggactactagtccacggttggctactagtccacggttggctactagtccacggttggctactagtccacggttggctactagtccacggttggctactagtccacggttggctactagtccacggttggctactagtccacggttggctactagtccacggttggctactagtccacggttggctactagtccacggttggctagccaaccgtggactagtagccaaccgtggactagtagccaaccgtggactagtagccaaccgtggactagtagccaaccgtggactagtagccaaccgtggactagtagccaaccntggactagtagccaaccgtggactagtagccaaccgtggactagtagccaaccgtggactagtaccaaccgtggactagtggnnagncc

SEQ ID NO: 560730 - DNA, 553 bp, Homo sapiens
  misc_feature (20)..(21): n is a, c, g, or t
  misc_feature (32)..(32): n is a, c, g, or t
  misc_feature (39)..(39): n is a, c, g, or t
  misc_feature (41)..(41): n is a, c, g, or t
  misc_feature (44)..(44): n is a, c, g, or t
  misc_feature (54)..(54): n is a, c, g, or t
  misc_feature (464)..(464): n is a, c, g, or t
  misc_feature (547)..(548): n is a, c, g, or t
  misc_feature (551)..(551): n is a, c, g, or t
actagtccacggttggcttnnaatatgccttncaatgtnanctnccaattccantccagcgtagactagtagccaaccgtggactagtagccaaccgtggactagtagccaaccgtggactagtagccaaccgtggactactagtccacggttggctactagtccacggttggctactagtccacggttggctactagtccacggttggctactagtccacggttggctactagtccacggttggctactagtccacggttggctactagtccacggttggctactagtccacggttggctgggggtcctttcccacttactactctatgacttcagacaaactacacatctctctgtttcagcctagcaaccgtggactagtagccaaccgtggactagtagccaaccgtggactagtagccaaccgtggactagtagccaaccgtggactagtagccaaccntggactagtagccaaccgtggactagtagccaaccgtggactagtagccaaccgtggactagtaccaaccgtggactagtggnnagncc

SEQ ID NO: 560731 - DNA, 474 bp, Homo sapiens
  misc_feature (20)..(21): n is a, c, g, or t
  misc_feature (32)..(32): n is a, c, g, or t
  misc_feature (39)..(39): n is a, c, g, or t
  misc_feature (41)..(41): n is a, c, g, or t
  misc_feature (44)..(44): n is a, c, g, or t
  misc_feature (54)..(54): n is a, c, g, or t
actagtccacggttggcttnnaatatgccttncaatgtnanctnccaattccantccagcgtagactagtagccaaccgtggactagtagccaaccgtggactagtagccaaccgtggactagtagccaaccgtggactactagtccacggttggctactagtccacggttggctactagtccacggttggctactagtccacggttggctactagtccacggttggctactagtccacggttggctactagtcactagtccacggttggctactagtccacggttggctactagtccacggttggctactagtctacgctggaatggaattgcaacggttgtgatactagctgcacagttccaatactagacgacggcaggtagattgtacacgattgccaactacttcacggttcacgattagttcatcggttagctactaggacacgtttgacaatctagtacacagcttg

SEQ ID NO: 560732 - DNA, 583 bp, Homo sapiens
  misc_feature (20)..(21): n is a, c, g, or t
  misc_feature (32)..(32): n is a, c, g, or t
  misc_feature (39)..(39): n is a, c, g, or t
  misc_feature (41)..(41): n is a, c, g, or t
  misc_feature (44)..(44): n is a, c, g, or t
  misc_feature (54)..(54): n is a, c, g, or t
  misc_feature (464)..(464): n is a, c, g, or t
  misc_feature (466)..(466): n is a, c, g, or t
  misc_feature (472)..(473): n is a, c, g, or t
  misc_feature (480)..(481): n is a, c, g, or t
  misc_feature (483)..(483): n is a, c, g, or t
  misc_feature (487)..(487): n is a, c, g, or t
actagtccacggttggcttnnaatatgccttncaatgtnanctnccaattccantccagcgtagactagtagccaaccgtggactagtagccaaccgtggactagtagccaaccgtggactagtagccaaccgtggactactagtccacggttggctactagtccacggttggctactagtccacggttggctactagtccacggttggctactagtccacggttggctactagtccacggttggctactagtctccacggttggctactagtccacggttggctactagtccacggttggctactagtccacggttggctactagtccacggttggctactagtccacggttggctactagtccacggttggctactagtccacggttggctactagtccacggttggctactagtccacggttggctccacggttggctactagtccacggttggctgtgcntnccgctnncagtggnngnccanttgatggcttcagaaagctttgagtggacagaggcctggtcgctttctacgcacatcctgcatattttggagaagcctaccaaccgtgatggtgtg

SEQ ID NO: 560733 - DNA, 533 bp, Homo sapiens
  misc_feature (110)..(110): n is a, c, g, or t
  misc_feature (114)..(116): n is a, c, g, or t
  misc_feature (118)..(118): n is a, c, g, or t
  misc_feature (122)..(122): n is a, c, g, or t
  misc_feature (130)..(130): n is a, c, g, or t
  misc_feature (135)..(137): n is a, c, g, or t
  misc_feature (141)..(142): n is a, c, g, or t
  misc_feature (145)..(145): n is a, c, g, or t
  misc_feature (147)..(147): n is a, c, g, or t
  misc_feature (150)..(150): n is a, c, g, or t
  misc_feature (414)..(414): n is a, c, g, or t
  misc_feature (416)..(416): n is a, c, g, or t
  misc_feature (422)..(423): n is a, c, g, or t
  misc_feature (430)..(431): n is a, c, g, or t
  misc_feature (433)..(433): n is a, c, g, or t
  misc_feature (437)..(437): n is a, c, g, or t
ctgttccttgtgtgtcccccggttggctactagtcacggttggctctagtccacggttgtctactattccacggttggctactagtccacggttggctactagttccacngttnnntnctgncacggttngctcnnntccnnggntngcnactagtccacggttgtcgtccacggttggctactagtccacggttggctactagtccacggttggctactagtccacggttggctactagtccacggttggctactagtccacggttggctactagtccacggttggctactagtccacggttggctactagtccacggttggctactagtccacggttggctactagtccacggttggctactagtccacggttggctccacggttggctactagtccacggttggctgtgcntnccgctnncagtggnngnccanttgatggcttcagaaagctttgagtggacagaggcctggtcgctttctacgcacatcctgcatattttggagaagcctaccaaccgtgatggtgtg

SEQ ID NO: 560734 - DNA, 413 bp, Homo sapiens
  misc_feature (20)..(21): n is a, c, g, or t
  misc_feature (32)..(32): n is a, c, g, or t
  misc_feature (39)..(39): n is a, c, g, or t
  misc_feature (41)..(41): n is a, c, g, or t
  misc_feature (44)..(44): n is a, c, g, or t
  misc_feature (54)..(54): n is a, c, g, or t
actagtccacggttggcttnnaatatgccttncaatgtnanctnccaattccantccagcgtagactagtagccaaccgtggactagtagccaaccgtggactagtagccaaccgtggactagtagccaaccgtggactactagtccacggttggctactagtccacggttggctactagtccacggttggctactagtccacggttggctactagtccacggttggctactagtccacggttggctactagtcactagtccacggttggctactagtccacggttggctactagtccacggttggctactagtctacgctggaatggaattgcacggcttggctatttctccagcattcatctcccatcatgctcccatgtgcttcttgtgctccggctaataaaaactgct

SEQ ID NO: 560735 - DNA, 411 bp, Homo sapiens
  misc_feature (20)..(21): n is a, c, g, or t
  misc_feature (32)..(32): n is a, c, g, or t
  misc_feature (39)..(39): n is a, c, g, or t
  misc_feature (41)..(41): n is a, c, g, or t
  misc_feature (44)..(44): n is a, c, g, or t
  misc_feature (54)..(54): n is a, c, g, or t
actagtccacggttggcttnnaatatgccttncaatgtnanctnccaattccantccagcgtagactagtagccaaccgtggactagtagccaaccgtggactagtagccaaccgtggactagtagccaaccgtggactactagtccacggttggctactagtccacggttggctactagtccacggttggctactagtccacggttggctactagtccacggttggctactagtccacggttggctactagtcactagtccacggttggctactagtccacggttggctactagtccacggttggctactagtctacgctggaatggaattggttggctgatgacacaggagctctggctgtgcggccatgaaaccctgtctttggaccaacagccaaccgtggactagt

SEQ ID NO: 560736 - DNA, 477 bp, Homo sapiens
  misc_feature (14)..(14): n is a, c, g, or t
  misc_feature (42)..(42): n is a, c, g, or t
  misc_feature (158)..(158): n is a, c, g, or t
  misc_feature (433)..(433): n is a, c, g, or t
  misc_feature (458)..(458): n is a, c, g, or t
tacgctgcaaggantagagtttggctcaggctgggggcagcngggagggcaaccgcttccattaccggccgggagccttgggaagtaggacctggaactgagtgtctgtcaatcatggatcaggacgacccagccgaagcgttgactgagctacgcangaagcgctgggcttgctggagatagtgcaagcggcggcaggctcgggattggccgtctatactatatgggcgctgctgctgcaccgggcttccgccgggtgcctctgaggctgcaggtgccctacgttggcgcgagtgcccggcaggttgagaacgtgctgtcactgttgcgaggccgccctggaaaaatggtggatctaggctctggtgatggcaggatcgtgctggcggcccaccaatgtggtctccgtccagctatgggatatgagctgaanccgtgcttgttggacttgcacgctncatgctggagagccggttg

SEQ ID NO: 560737 - DNA, 366 bp, Homo sapiens
  misc_feature (163)..(163): n is a, c, g, or t
  misc_feature (269)..(269): n is a, c, g, or t
  misc_feature (292)..(292): n is a, c, g, or t
  misc_feature (311)..(311): n is a, c, g, or t
gataggtcgggtcggcggtgtcaccgctttcgcttctgcttgagggcataaggaaatggtggcaggcacttcctcctaacaagaagaaaaaaaaaaaaaaaaaaaaaaaaaagcggccgctcgaattgtcgaccggccgcgaattcgcgccgcgttcgactanggctgcgagaagacgacagaaggggctttttccaagcggctgccgaaatggcggaggtgcaagtcctggtgcttgatggtcgaggccattcctgggccgcctgggngccattcgtggctaaacagtatnctggggcccgaaagtggtngtctacgctgtgaaggcatcaacattctggcaattctacagcaattggtcctggg

SEQ ID NO: 560738 - DNA, 518 bp, Homo sapiens
  misc_feature (399)..(399): n is a, c, g, or t
  misc_feature (401)..(401): n is a, c, g, or t
  misc_feature (407)..(408): n is a, c, g, or t
  misc_feature (415)..(416): n is a, c, g, or t
  misc_feature (418)..(418): n is a, c, g, or t
  misc_feature (422)..(422): n is a, c, g, or t
agatcgagctgttacgtccacggttggctactagtccacggttggctcccagtgaggtaagagtgtatatggtatgggaaggcaaactcagtgtttgaagacctttcagtcaccttgcgccagccaaccgactagtccacggttggctactagtccacggttggctactagtccacggttggctactagtccacggttggctactagtccacggttggctactagtccacggttggctactagtccacggttggctactagtccacggttggctactagtccacggttggctactagtccacggttggctactagtccacggttggctactagtccacggttggctactagtccacggttggctccacggttggctactagtccacggttggctgtgcntnccgctnncagtggnngnccanttgatggcttcagaaagctttgagtggacagaggcctggtcgctttctacgcacatcctgcatattttggagaagcctaccaaccgtgatggtgtg

SEQ ID NO: 560739 - DNA, 93 bp, Homo sapiens
agttccgggatccccacttagaggtggaaggggaaggatcgcttcagccggggaattcaaccagccgggggaacatcatagagactccccctc

SEQ ID NO: 560740 - DNA, 160 bp, Homo sapiens
  misc_feature (89)..(89): n is a, c, g, or t
  misc_feature (121)..(121): n is a, c, g, or t
  misc_feature (148)..(148): n is a, c, g, or t
caggctggatgagggccctgaagctgtcctttgggcaggggtgcaggcaggggaccaacagagcgccaagtataaagctggttggggtngggcttaaggatgggaggagtggacttaggangtagaagagtgctttgggtgtaggccnagggaaggttcc

SEQ ID NO: 560741 - DNA, 352 bp, Homo sapiens
  misc_feature (20)..(21): n is a, c, g, or t
  misc_feature (32)..(32): n is a, c, g, or t
  misc_feature (39)..(39): n is a, c, g, or t
  misc_feature (41)..(41): n is a, c, g, or t
  misc_feature (44)..(44): n is a, c, g, or t
  misc_feature (54)..(54): n is a, c, g, or t
  misc_feature (302)..(302): n is a, c, g, or t
  misc_feature (341)..(341): n is a, c, g, or t
actagtccacggttggcttnnaatatgccttncaatgtnanctnccaattccantccagcgtagactagtagccaaccgtggactagtagccaaccgtggactagtagccaaccgtggactagtagccaaccgtggactactagtccacggttggctactagtccacggttggctactagtccacggttggctactagtccacggttggctactagtccacggttggctactagtccacggttggctactagtccacggttggctactagtccacggttggctactagtccacggttggctngactacgaccagtacgcgctgctgtacagccaactgganctagtagccaa

SEQ ID NO: 560742 - DNA, 107 bp, Homo sapiens
ccgaattctttacaatactctggggcttctgtggcaagccccaccctttctggtcatggtacccgttacagcgttgatggccgcacaggggacacgaaagccgggga

SEQ ID NO: 560743 - DNA, 158 bp, Homo sapiens
cagcatgctctattaaatcttttgcagaagactgcatgattagccaaaagtgactttttttttatttttggaatagggtgtctccctgtgtggccagggtggggtttatagggggggattcttctaaagagtggccgtgcggtattgaaggttggaaa

SEQ ID NO: 560744 - DNA, 173 bp, Homo sapiens
  misc_feature (15)..(15): n is a, c, g, or t
  misc_feature (68)..(68): n is a, c, g, or t
  misc_feature (143)..(143): n is a, c, g, or t
gctgttttatcagcnacgcaccaggagaacaacatgcgcatctcatgaacgtcgaatccgcacgagcncttcaacacctacgtcgcgatggctccatcgccgagttgatcccgcgtgtgatggcggcgatcaaacccgaagcngcttacttcacggaacaagctggtacacgc

SEQ ID NO: 560745 - DNA, 710 bp, Homo sapiens
agcggttaccggtggggccgggccgggcgggagtgccaggtgacgtgatgggcgcaagggccgggacatggggcccgccagacccgctgctcgcaggtctaagtcagccgcaccgggccagccgccgctgccgctgctgctgctcacatatttgactgcttgacttctgcagcgtctgctagcccgcgcgatcggcgagccgtgagccgtgttgggagcacacctggtcagctgtgccgagggcctccgtgtggtcaggaccactagtggtgtgacttggtacttatttcgcgggcggcgctaacgcgctttcatcccggcgactcttgctgcactcggtgcctgtcgttggggaatccacgagcgcccacagtctgcatctcgaacgactagttctccacagagtgatccctgacagcctgcagttgtcttggaagatagcttgcaatgagtcagaattgttagcccctggaatgctagcacagaatttgccatcggttgttgagatgccatggactaaacgtcacgagccaattctcgccaatgggagccgactggattgcggggggttacccgagagcgggcaggcatgtcggcacacagccctcaaccatgcaggttgtgcccttccgtctgtgctgtcctgtgtgaatttcgctgagtgaggcctctgtctggtgcctgaaggctgccgtgttcttggcatccag

SEQ ID NO: 560746 - DNA, 252 bp, Homo sapiens
tgtccatcccccttcactctcattaccacacaaccttgccacatatcctacctgctcatcttctgaattcaaattcctgcccacatcctgctcctccataaataccccccacactatattcctacattcctttttattccttctttttcatccttcttctgatccagcctcactcttgcacccctgctctcccactctatgactatctctactcacttctccctctctctcctggtctcaaacaattctcat

SEQ ID NO: 560747 - DNA, 349 bp, Homo sapiens
gtttgagatatggactgttctgtcgctgaggcttatacccctctttgtgtgtacatgtggagttacccagaaataagaacatatgggttcttaaaaagtagcattccaacacaccaactttgatgcccacttccttcttcgatgctcaactttggcctcagctataggagaaccgagaacagtgactattccaagactacctgacttccttcttggtacattctaattcttctcaacagcaccactgagtaacaaggacgctgtctaaggtaagtaagggtcctcaatttcccccaaggttactagcacatgcattattattaacaccatgaatgggaggatgaccggt

SEQ ID NO: 560748 - DNA, 583 bp, Homo sapiens
taggaagactcggctctaccttgttctcaactgcaaagaggcgtccctatcctctatactaatcctcctcagcacagaccctttacgagtgtcgggctgagtgccatatctcaggctatcacatggggagaaaccttggacaatacctggctttcctaggcagaggaccctgcggccttccgcagtgtatgtgtcccatgggtacttgagattagggagtggtgatgactcttaacgagcctgctgccttcaagcatctgtttaacaaagcacatcttgcacctgcccttaatccatttaaccctgagtggacacagcacatgtttcagagagcgcagggttgggggtacggtcatagatcaacagcatcccaaggcagacgaatttttcttagtaacagaacaaaatggagtctcctatgtctacttctttccacacagacacatgttaacaatctgatctctctttcttttccccacgattccgcccttttctatactacaaatccaccattgtcatcatggcccgtactcagtgagctgttgggtacactcacagacggggtggcggacgggagaggggc

SEQ ID NO: 560749 - DNA, 1053 bp, Homo sapiens
ttgggtaacccctgtgatacaaaccttgttgttgaagtctttcttgaatgcgccaagtgctgggccccacaggaggagaaaaagttgtatttgggtcccaccgggcgacacgggcgtttctttgtaaacaccaccgggattgggtactatttttttctgcccacacctaggtgtgttcaaaaaacatttggagggggtcctccatgtgtgttgtgtgagtgccccctgtctgtgtttaaaatttttacccctttgctggttggaaggacccccaaacggggggagactctccttgcgtaaaaagagcggtttgggggggccccccccccgccccctctctttagggcgaaaatctcgtttttacgggagactttcccccacactctctcttttgagacttcgcagatatataaagggcgccctctttgggggttctccacactaaactttgagcccacatgttttcccacaccccctcctgtgaggaaaacgctttcccccacacaccttgtgtgcaagcacatagaataccactgtttatgcacgcgcactcacggtattcacacacacccaatatcacctctggtgccacatatagcaacacgagatacaggctttttctttgttgtattgtttgttggggctcggggttgcactcgtgagggaaacaccacgtataccacaaaggggcacaaccctctccacactcttctgggaaatacaattgcggtagcaccccccttttcttctggggctctgaacacacctcggttctctgatataagaagtgggaattagagctggccatgtaatagtgcccttcttcttagggtctattgggacccacgattggtgttctccgcgccccaaacttccgtcttataagatgtgaagaggaaaatagtttcatagttgccataatagtcactctgtgtttcctgtacgagattacctctttgtgggttttggtaaactcttatttttttttttttccaccaaagggaacactgaaggctccaataaattattagagatttttttcttccacaaata

SEQ ID NO: 560750 - DNA, 104 bp, Homo sapiens
tgtgcatttggcgaggcagtctcggcgcttggtcactggcctgaaggtcaggatcatggggcccaactataaccctggggaatatggaggacctcttaccttga

SEQ ID NO: 560751 - DNA, 717 bp, Homo sapiens
  misc_feature (32)..(32): n is a, c, g, or t
  misc_feature (140)..(140): n is a, c, g, or t
  misc_feature (152)..(152): n is a, c, g, or t
  misc_feature (171)..(171): n is a, c, g, or t
  misc_feature (176)..(177): n is a, c, g, or t
  misc_feature (194)..(194): n is a, c, g, or t
  misc_feature (207)..(207): n is a, c, g, or t
  misc_feature (211)..(211): n is a, c, g, or t
  misc_feature (213)..(213): n is a, c, g, or t
  misc_feature (223)..(223): n is a, c, g, or t
  misc_feature (227)..(227): n is a, c, g, or t
  misc_feature (263)..(263): n is a, c, g, or t
  misc_feature (265)..(265): n is a, c, g, or t
  misc_feature (269)..(269): n is a, c, g, or t
  misc_feature (276)..(276): n is a, c, g, or t
  misc_feature (278)..(278): n is a, c, g, or t
  misc_feature (281)..(281): n is a, c, g, or t
  misc_feature (287)..(287): n is a, c, g, or t
  misc_feature (290)..(290): n is a, c, g, or t
  misc_feature (296)..(296): n is a, c, g, or t
  misc_feature (317)..(317): n is a, c, g, or t
  misc_feature (326)..(326): n is a, c, g, or t
  misc_feature (341)..(341): n is a, c, g, or t
  misc_feature (349)..(350): n is a, c, g, or t
  misc_feature (359)..(359): n is a, c, g, or t
  misc_feature (382)..(382): n is a, c, g, or t
  misc_feature (386)..(387): n is a, c, g, or t
  misc_feature (389)..(389): n is a, c, g, or t
  misc_feature (398)..(398): n is a, c, g, or t
  misc_feature (409)..(410): n is a, c, g, or t
  misc_feature (412)..(412): n is a, c, g, or t
  misc_feature (416)..(416): n is a, c, g, or t
  misc_feature (432)..(432): n is a, c, g, or t
  misc_feature (508)..(508): n is a, c, g, or t
  misc_feature (511)..(511): n is a, c, g, or t
  misc_feature (514)..(514): n is a, c, g, or t
  misc_feature (525)..(525): n is a, c, g, or t
  misc_feature (547)..(547): n is a, c, g, or t
  misc_feature (550)..(551): n is a, c, g, or t
  misc_feature (565)..(565): n is a, c, g, or t
  misc_feature (568)..(568): n is a, c, g, or t
  misc_feature (580)..(580): n is a, c, g, or t
  misc_feature (604)..(604): n is a, c, g, or t
  misc_feature (612)..(612): n is a, c, g, or t
  misc_feature (640)..(640): n is a, c, g, or t
  misc_feature (687)..(687): n is a, c, g, or t
gcctcctcaccgaaatcctcctcctcttctgnggtggcatcctggtactgctgatactcagagacgaggtcagttcatgttgctctcagcctcaggtgaactcacatactcgtccatgccctcgcctgtagtaccagttntggaaggccttncggcggaaaatgagcagtnaaatnntccgaaatgacgacttnaagagctcctggntggntnttctatttcnaatnaaggtgactgccatcttgaggccacgaggtgggatntnacanacggctntnttnacattnttngggatncattccacaaagtagctgctnttctttttnttcacgttaagcatnttctcatnnacctccttnatggacatccgaccacggaaganagcnncnacggtgagntatcggccgtnntngggnattaaaagcagccatnatattctttgcatcgaagacctgctgggttatttccggcacttttagatctcgatactgctggcttccacggctgnggngangggcaaaccangcataaaaaaatggagacgttntanngggacatgttgacngcnacttgcggaggncagcattgagctggccagggaaanggaggcangtggtaacacactcatggtggctgaganaagtggttcagatcccgtagttggtgtggtcacttcaagtgcggaanagatatcatagagggctcgttgtcatgcat

SEQ ID NO: 560752 - DNA, 93 bp, Homo sapiens
tggcagttcggctagatttttgttttgtttgtttttttgttttgtttaatgtatatttttattataattattaaatatgaattccattaaaca

SEQ ID NO: 560753 - DNA, 1248 bp, Homo sapiens
  misc_feature (355)..(355): n is a, c, g, or t
  misc_feature (827)..(827): n is a, c, g, or t
agcggagtctcactctgtcctgccgcaaggcccggcaccgaagctcagatcgcggcgcacggcgttgccctagaggctctctgtgcgtgtgctagctggtgtccgctggttgggtggtccggtccttgcgtatctgggctatggttgcgagccggcgcgccgcgctgtggcatgcgatcttacggaccgtaccttgcccgatgtttccgtggcggcgtccgggcccgcgcggacggctgaccctgggccatggaaatcacagtgtggcatgttctgcacgtcgggtgtcgacgggcgctcttacggacgaatcaaatgacacaatcaggatgttcggcacggaccgtaattaggnttgttgttggaccagatcaggccgcgtcatccgtgcagcggacatagtcctgcgccaaagtcgcctttgggccctgtgggccctggaacggtctggctgcgggtgggcttggtcgccattttgctcccgggcgtatgggccacgtttgaggggaacttcgggagcacggcagagaccgtttacggctggaaggcacactccgggggtctcgcagggggtagtctgcacattcttcctcgggggaagaaagcaagcgaatcgttaacgccgggtctccggccctcgtagcggccacttgggctggcaatttctctggctcaagcccccccgggtttggcgctcaccggacaaaagcgcatatgcacacaacgtccgcgaaaccgagagaaacaaaattgtggctccattaaatggttgaattccggttacatttcccaattccactttcgacgcgaacgggatttggtgcacncgagggaattgccaattgcgacattccgaattccgaaggcctaaaggttctcgccgttttttaattggccttgaagcacttgtttctgtgagcccccctttgggtaacgggggactttagcggaacggtgttgaattccgcaaaacgaccgcaacacgttaacagcagcagcaggaacagtaaggcgcattttacatttttccagggttggtgccccttgtggccttggtggaacaagttctggaccattcgcattggcgcgcacttaatgacaataggcggtctcccaacttgcagagggagtatacgccgaacctagagggtttggaacttttgactccccctgttggcacaaggggcgttactttttctgggagctttaggcgattccaaaactccaaaacgagttaaaaccctttgg

SEQ ID NO: 560754 - DNA, 380 bp, Homo sapiens
tcacatctgtaatcccaatgctttgagaggccaaggtgggaggatcacttgaggccgggagtttgagaccggcctgggcaatgttgcaatacttcatctctacaaaaattaaaaatcggctggctgtggtggcatgcatttgtagtctcagctactccggaggctgaggctggaggattactcgtgctcaggagttcaaggatgcaacgagcagtgattacactgtcacacttcatgcttggtgacagagcaagaccctgtgtcaaacacagaacattcaaatatgtatcgcttgagtttactactcaataatgataattatatctgatagtaaactgcctatataaacctgttgggtatgaaccccctttattatcatt

SEQ ID NO: 560755 - DNA, 847 bp, Homo sapiens
  misc_feature (203)..(203): n is a, c, g, or t
  misc_feature (245)..(245): n is a, c, g, or t
  misc_feature (296)..(296): n is a, c, g, or t
  misc_feature (299)..(299): n is a, c, g, or t
  misc_feature (303)..(303): n is a, c, g, or t
  misc_feature (325)..(325): n is a, c, g, or t
  misc_feature (371)..(371): n is a, c, g, or t
  misc_feature (392)..(392): n is a, c, g, or t
  misc_feature (412)..(412): n is a, c, g, or t
  misc_feature (414)..(414): n is a, c, g, or t
  misc_feature (439)..(439): n is a, c, g, or t
  misc_feature (443)..(443): n is a, c, g, or t
ggtcccactcgtatatggtggtgagaccaaaatggtggaaacagccttaaccccagatgcctgctatcctgactaatttaagtcattgctgactgcatagctctttttcttgagaggctctccattttgattcagaaagttagcatatttattaccaatgaatttgaaaccaggctttttttttttttgggggtgatgtaaanccaattccctgccaccaaattatttaaaatagtcccttggtnatcttaataaggataactcacttcttaattatttgtccatactctaagttntcnaaantcttccaatttatcagtgctcncctgaaagaggtatgcctcttagagaatacagtttctagctttaancaattaaccagggggagaaantaaacctcagggagtgaaanantcaggaggtgtaataaattgttccntcgntttcccccccgttttttttttttttttgggatttgcccttggaaaaacccaaagttcccgatttttctaaacattctccttttaaacaacacgtgttccccttggcgtgacagacgcctttttgtgtcttaccacttggggcaatttttgtttgctcccttaagaaaaattatttcgtgggagacctggtttcccaaccctttcttccacaatactctcgcgggggaagctccatatttttaaaggttgacaaaatatgggcttatcaacatttgcggcctatcccgttggcgccgtaatacacactttttatcaaaaccgcgtgggacaactgcttgaccacaccttgccgcctagatttgttacggcgttccgacacggcaaattgccaaaaaaaaatggcc

SEQ ID NO: 560756 - DNA, 685 bp, Homo sapiens
atttcctttcattattttgccacacacactttgtcattttcatcacgcgtgcaagcattacagtaccttgctactcgttgatacttccctaactggctgctcgtcccgcgatcctcggctccaccccgctcacccccgccctcctctcctccctctcccctaccactcccctctcccctccctacctcccctctcccctcccccccctcctccaccccactcccgtcccccatcccccccctccccccctctcccccccccgcccttccccccccccacctccccctcctcgcccctcctcctgcctccccccacctctcctcacccctctcctccctctccaccttcctcctcctctcccctatcctaccccctcccctctccctcccccctccccccccccctcctcccaccctctctaccacttccactcctctcccacccccttcccacccctccctccctacccacccctccaccccctcccactcccgtcccctctcccctctcccatccccatctccgctctccaccctccccattcacctcccccacactccccccccaccgtcccgccctcaccttccactcgcccctcctctctcctcctctcactcctctccttccaccctgccctacctccccccaccactctactaccatcaccatcaccctcccccactcc

SEQ ID NO: 560757 - DNA, 241 bp, Homo sapiens
gcaagttcacaaggccagagcccccactagaattgctgatgaagtaacatgtcccactgtgcatgcattgtcattaataaacatcttaacaggaaacagggttcaaaagcagagaaccggtctgactagaattcaccaggctggaatttcctaatcctagcaagcctggggattctgcaggagaccagggcatgtttcatccctatctacaactgcataaggcagacactcccagagcggc

SEQ ID NO: 560758 - DNA, 103 bp, Homo sapiens
ctagatacagtcggtaccctgtcatgtcatgttacagaaggcttggctgggaactgctctgccccggccggacgtggtgttccaccgtgggccactggtaaat

SEQ ID NO: 560759 - DNA, 102 bp, Homo sapiens
  misc_feature (1)..(1): n is a, c, g, or t
nttctgcggtgactctagtaggatccctccctatttgccctgggtccccacggaggtatgttattaagcttcaggtatctgtcgctgttcttcttgaggcca

SEQ ID NO: 560760 - DNA, 397 bp, Homo sapiens
ggtcaggtgctgcagctcacgcctgtaatcccagctctttgggaggcctaggcaggagaatcacttgagaccaggagttgaggagcagcctggacaacatagcaagaccccatctctacaaaaaaaaaaagattttaaattagccaggtgtggtggtatgtgcctgtagcccaagctacttaggaggctgaggcaggaagatcacttgaacccagaaatttgaggctgcaggtgagctatgatcacaccatagcactccagcctggataacagggtaaaaccctgtctcttaaaacaaacaaacaaacaaaaaacacaccaaaatcctttatgtatctgggtactataagttgtctttctcattttacatttgacactgagagacagagaggttgag

SEQ ID NO: 560761 - DNA, 610 bp, Homo sapiens
gtgggaggtcgtctagaggatcccgtagctcgatcaacctctattgcatttttttttccaacacagagtcttgtcctgtcacccagtctggagtgcagtggtgctgatcttggttcactgcaacctccgcctcctgagttcaagtgattctcctgctttagccacccaagtagctgagattacaggtgtccaccaccacgcccagctaattttggtagttttagttgagacagggtttcgccgtggtggccaggccgatcttgaactcctgacctcaggtgatctgcccaccttggtcttccaaagtggtgggatttacaggcaggagccactgcgcccagcccgtctatagcatagatgtatatttttcgagacggagcttcactcttgttgcccaggctgtagtgcaagggcatgatctaggctcaccacaacctccgcctccccaggttcaagtgattctcctacctcagcctccccagtagctgggattacaggcatgtgccactacacctggctaattttgtatattaagtagagatggggtttctccatgttggtcaggctggtcttgaactcccggtctcaggcgactctgccgcctcagcct

SEQ ID NO: 560762 - DNA, 1020 bp, Homo sapiens
tggtcgctactaggtggagcacatcgctgggtgcaatctcagtttggttcgtctggccctgtgcgttgctctcgggtgttgccgcgtctgtttttctccgctggagtgtctagtttctaactcggatgtcctcttgtgagttggtttgctttcacctcctcgctgcgtttgggtgagtctactccctaagaggtagcctccttgtggctaagtaatcacctagtcgcgtctttcttcctttctgcggtcaacatggtatctttctttatcgtgggcggttgttttttttcttgggaagctcttgtcctttgttcttcacacggttgggaaatggttgttctctctactaagtgacaccgcacatggtcttgtttgtgtcgccgcagagactgttcctgtggctatgcggcgtttctgctactccacaagggagggaccccacgtggtgacacccgcccctcaatctcctcctgtgtagcgcggggaaatattctagggcgtgggttttgtacacaccaaacccgcaattgcgccgacatgctctcagcagagatatatacacagggggttataccacgcgccctcttactctagacccccgaggagtgttctcggggcgcctctgttactgattttatcaccaggcgcctcgataatcccccgcgatggagactcgggacactcggttcacgccgcggggagaaacaatacctcgtgagggttggatcctcgggaagagggaagagaataggcttgcgtgtgactgttggagaggaacacggctatacgtggcgtctcgtgcactggtgtcctacactggagaaactttgtaggaagggcacaggagcccattctggacacatgccactgcccaatggaacccaaccaatggcgaccccagccactgtctcccaaccacttgatagggccccagtaaccacagcgtgttcccccgccccgagagggaagcctgttgtttccccgggaataaaagagtgcacttttgttttcccctggtga

SEQ ID NO: 560763 - DNA, 453 bp, Homo sapiens
  misc_feature (20)..(21): n is a, c, g, or t
  misc_feature (32)..(32): n is a, c, g, or t
  misc_feature (39)..(39): n is a, c, g, or t
  misc_feature (41)..(41): n is a, c, g, or t
  misc_feature (44)..(44): n is a, c, g, or t
  misc_feature (54)..(54): n is a, c, g, or t
actagtccacggttggcttnnaatatgccttncaatgtnanctnccaattccantccagcgtagactagtagccaaccgtggactagtagccaaccgtggactagtagccaaccgtggactagtagccaaccgtggactactagtccacggttggctactagtccacggttggctactagtccacggttggctactagtccacggttggctactagtccacggttggctactagtccacggttggctactagtccacggttggctactagtccacggttggctactagtccacggttggctggctcctagtccacggttggctaccgtttgagagtcatcaggagtcttgctctgtcacccaggctggagtgcagtggcatgatctcggcttacagcacccatcacagtcctggttcaagcagttcttctgcctcagccaaccgtggactagt

SEQ ID NO: 560764 - DNA, 354 bp, Homo sapiens
ggcatgaacctgcagcctgagcctcttggaccagtatctgatggaattcaatgcctgccgatgtagggccttggcattgcatcagaatgggagtgacccactcgctgcggagggcatcgcatgcctgacatggatgcacagatgcgcgcctgggatagcatggggtgctggctgatgaggcgaaaccgaacgaaagacagaatggagacgcaagatgacacgatgaggaagcgtgggaaggtggcctcggagccatccgtggtcatgttatcgccatgacgcatggcaatccaaggcatatagggaggataagatgcacgtgtagacaaactcccaggcacctccacgacatgg

SEQ ID NO: 560765 - DNA, 399 bp, Homo sapiens
  misc_feature (20)..(21): n is a, c, g, or t
  misc_feature (32)..(32): n is a, c, g, or t
  misc_feature (39)..(39): n is a, c, g, or t
  misc_feature (41)..(41): n is a, c, g, or t
  misc_feature (44)..(44): n is a, c, g, or t
  misc_feature (54)..(54): n is a, c, g, or t
  misc_feature (362)..(362): n is a, c, g, or t
actagtccacggttggcttnnaatatgccttncaatgtnanctnccaattccantccagcgtagactagtagccaaccgtggactagtagccaaccgtggactagtagccaaccgtggactagtagccaaccgtggactactagtccacggttggctactagtccacggttggctactagtccacggttggctactagtccacggttggctactagtccacggttggctactagtccacggttggctactagtccacggttggctactagtccacggttggctactagtccacggttggctaaggaggggtgaaccggcccaggtcaggaaacggagcaggtcaaaactcccggcatacagnagttaacgacgcgccaggaaagccaaccgttaccggg

SEQ ID NO: 560766 - DNA, 317 bp, Homo sapiens
  misc_feature (20)..(21): n is a, c, g, or t
  misc_feature (32)..(32): n is a, c, g, or t
  misc_feature (39)..(39): n is a, c, g, or t
  misc_feature (41)..(41): n is a, c, g, or t
  misc_feature (44)..(44): n is a, c, g, or t
  misc_feature (54)..(54): n is a, c, g, or t
actagtccacggttggcttnnaatatgccttncaatgtnanctnccaattccantccagcgtagactagtagccaaccgtggactagtagccaaccgtggactagtagccaaccgtggactagtagccaaccgtggactactagtccacggttggctactagtccacggttggctactagtccacggttggctactagtccacggttggctactagtccacggttggctactagtccacggttggctactagtctacgctggaatggaatgatgaatggaatggaatgaatgaatgaatgaatgagtgggtacgagc

SEQ ID NO: 560767 - DNA, 324 bp, Homo sapiens
  misc_feature (20)..(21): n is a, c, g, or t
  misc_feature (32)..(32): n is a, c, g, or t
  misc_feature (39)..(39): n is a, c, g, or t
  misc_feature (41)..(41): n is a, c, g, or t
  misc_feature (44)..(44): n is a, c, g, or t
  misc_feature (54)..(54): n is a, c, g, or t
  misc_feature (235)..(235): n is a, c, g, or t
  misc_feature (318)..(319): n is a, c, g, or t
  misc_feature (322)..(322): n is a, c, g, or t
actagtccacggttggcttnnaatatgccttncaatgtnanctnccaattccantccagcgtagactagtagccaaccgtggactagtagccaaccgtggactagtagccaaccgtggactagtagccaaccgtggactcaaccgtggactagtagccaaccgtggactagtagccaaccgtggactagtagccaaccgtggactagtagccaaccgtggactagtagccaaccntggactagtagccaaccgtggactagtagccaaccgtggactagtagccaaccgtggactagtaccaaccgtggactagtggnnagncc

SEQ ID NO: 560768 - DNA, 458 bp, Homo sapiens
  misc_feature (20)..(21): n is a, c, g, or t
  misc_feature (32)..(32): n is a, c, g, or t
  misc_feature (39)..(39): n is a, c, g, or t
  misc_feature (41)..(41): n is a, c, g, or t
  misc_feature (44)..(44): n is a, c, g, or t
  misc_feature (54)..(54): n is a, c, g, or t
  misc_feature (369)..(369): n is a, c, g, or t
  misc_feature (452)..(453): n is a, c, g, or t
  misc_feature (456)..(456): n is a, c, g, or t
actagtccacggttggcttnnaatatgccttncaatgtnanctnccaattccantccagcgtagactagtagccaaccgtggactagtagccaaccgtggactagtagccaaccgtggactagtagccaaccgtggactactagtccacggttggctactagtccacggttggctactagtccacggttggctactagcacggttggctactagtccacggttggctactagtccacggttggctcccaaattagatcaaacacaactgaactcaaccgtggactagtagccaaccgtggactagtagccaaccgtggactagtagccaaccgtggactagtagccaaccgtggactagtagccaaccntggactagtagccaaccgtggactagtagccaaccgtggactagtagccaaccgtggactagtaccaaccgtggactagtggnnagncc

SEQ ID NO: 560769 - DNA, 323 bp, Homo sapiens
  misc_feature (20)..(21): n is a, c, g, or t
  misc_feature (32)..(32): n is a, c, g, or t
  misc_feature (39)..(39): n is a, c, g, or t
  misc_feature (41)..(41): n is a, c, g, or t
  misc_feature (44)..(44): n is a, c, g, or t
  misc_feature (54)..(54): n is a, c, g, or t
actagtccacggttggcttnnaatatgccttncaatgtnanctnccaattccantccagcgtagactagtagccaaccgtggactagtagccaaccgtggactagtagccaaccgtggactagtagccaaccgtggactactagtccacggttggctactagtccacggttggctactagtccacggttggctactagtccacggttggctactagtccacggttggctactagtccacggttggctactagtccacggactagtcctgggaaaaaaagatgtctctaattactggcttcaataaacacgaatccagactgct

SEQ ID NO: 560770 - DNA, 552 bp, Homo sapiens
  misc_feature (20)..(21): n is a, c, g, or t
  misc_feature (32)..(32): n is a, c, g, or t
  misc_feature (39)..(39): n is a, c, g, or t
  misc_feature (41)..(41): n is a, c, g, or t
  misc_feature (44)..(44): n is a, c, g, or t
  misc_feature (54)..(54): n is a, c, g, or t
  misc_feature (311)..(311): n is a, c, g, or t
  misc_feature (343)..(343): n is a, c, g, or t
  misc_feature (428)..(428): n is a, c, g, or t
  misc_feature (437)..(437): n is a, c, g, or t
  misc_feature (448)..(448): n is a, c, g, or t
  misc_feature (451)..(453): n is a, c, g, or t
  misc_feature (455)..(456): n is a, c, g, or t
  misc_feature (461)..(461): n is a, c, g, or t
actagtccacggttggcttnnaatatgccttncaatgtnanctnccaattccantccagcgtagactagtagccaaccgtggactagtagccaaccgtggactagtagccaaccgtggactagtagccaaccgtggactactagtccacggttggctactagtccacggttggctactagtccacggttggctactagtccacggttggctactagtccacggttggctactagtccacggttggctactagtccacggttggctactagtccacggttggctactagtccactgcagcctccacctcccnggctcaagcgattctcctgcctcagcctcccnagtagctggaattacaggcacatgccaccacgcctggctaatttttgtatttttagtggagacggggtttcaccatgttggccangctggtctngaactcctganctnnngnnatccncatgcctaagcttcccaaaatgctgggattacaggcatgagccactgtgcccagtcagtctgtagtgtttttacatctgatcttcacacag

SEQ ID NO: 560771 - DNA, 507 bp, Homo sapiens
  misc_feature (20)..(21): n is a, c, g, or t
  misc_feature (32)..(32): n is a, c, g, or t
  misc_feature (39)..(39): n is a, c, g, or t
  misc_feature (41)..(41): n is a, c, g, or t
  misc_feature (44)..(44): n is a, c, g, or t
  misc_feature (54)..(54): n is a, c, g, or t
  misc_feature (266)..(266): n is a, c, g, or t
  misc_feature (298)..(298): n is a, c, g, or t
  misc_feature (383)..(383): n is a, c, g, or t
  misc_feature (392)..(392): n is a, c, g, or t
  misc_feature (403)..(403): n is a, c, g, or t
  misc_feature (406)..(408): n is a, c, g, or t
  misc_feature (410)..(411): n is a, c, g, or t
  misc_feature (416)..(416): n is a, c, g, or t
actagtccacggttggcttnnaatatgccttncaatgtnanctnccaattccantccagcgtagactagtagccaaccgtggactagtagccaaccgtggactagtagccaaccgtggactagtagccaaccgtggactactagtccacggttggctactagtccacggttggctactagtccacggttggctactagcacggttggctactagtccacggttggctactagtccacggttggctcactgcagcctccacctcccnggctcaagcgattctcctgcctcagcctcccnagtagctggaattacaggcacatgccaccacgcctggctaatttttgtatttttagtggagacggggtttcaccatgttggccangctggtctngaactcctganctnnngnnatccncatgcctaagcttcccaaaatgctgggattacaggcatgagccactgtgcccagtcagtctgtagtgtttttacatctgatcttcacacag

SEQ ID NO: 560772 - DNA, 405 bp, Homo sapiens
  misc_feature (20)..(21): n is a, c, g, or t
  misc_feature (32)..(32): n is a, c, g, or t
  misc_feature (39)..(39): n is a, c, g, or t
  misc_feature (41)..(41): n is a, c, g, or t
  misc_feature (44)..(44): n is a, c, g, or t
  misc_feature (54)..(54): n is a, c, g, or t
actagtccacggttggcttnnaatatgccttncaatgtnanctnccaattccantccagcgtagactagtagccaaccgtggactagtagccaaccgtggactagtagccaaccgtggactagtagccaaccgtggactactagtccacggttggctactagtccacggttggctactagtccacggttggctactagtccacggttggctactagtccacggttggctactagtccacggttggctactagtccacggttggctactagtccacggttggctactagtccacggttggctactagtccacggttggctactagtccacggttggctctttctgtgttattctgttctgctcctcaattccattccagctgaactagcctaccgtggactagtgt

SEQ ID NO: 560773 - DNA, 1541 bp, Homo sapiens
  misc_feature (972)..(972): n is a, c, g, or t
cctccaggcgccttgtaggtgaccttagaatcagacctcccaacctgctgctggatgttctttgagcgcacgtagtatgactggaaggactgtgcgtggaacgtgagtgagtgccattcgtacagcttggaggacgtagatatcaaggaccccgctgagcatcagggcaagggtgtggcccttaagttctgtcacagccttcttcaacgttggctccgtgaaagactagtagcgaggagtcatgaacacacatacttgagaggcatggctggtggctcgggggactctggcagtccccaatggacaacgacagtgatgagaccacggacttagtccgttcctggactgcaagggagtggcttggccagactggcagtgcggatttggcttagtgcggtcgctcttcgtagagatagtgcattgtggtcttcgaacgtaaataaatagctggcgtcgatagcatgtgctagttgattgggcattggagggctctgccctgggtgccgcgccgctcctgaggcatcgccagcccgaggcttgttcctcgttcgtccgttccgctcctgtggggggcacctaggaagacttcctattttgcatagtagtcacatcggttcctttggacagcgtttaagcggttggtcgatcctatgggaggtttggcggggaggggcgtgtcttcgcgaaagcggactccttgatccgcgtggggcgttcccatttggtcgcttctgaatttttgtacctttgaccttagttcgacctcccttcctgtgggaacctatgcaccggtgcccctgctggctttggcttcgcggggtgccattttgtgccccctcaaggtcccgcttggtgacccagcccccctttggactttggttcgtcctcggggggccaggtggcgcggacagtggcggggcggccaccagttgtgggccctggttcctttttggtttacaaaccattgcagcntttttcccatttacggatacagccctgacaacacaggcccgagcggggccgttccactaagaaagaatttcccctgtgccagggggacctgcaacgatcatatagtcgattatcgcacactttctatggtttcccaccgtgtcggcccccttaatattggaccatcccatttccatgagaccaagaccagttggccccttggttatatccacacgcgttgtaacgtgcggaccaacccgtgcctcccttgcccaacatcatttgtcacaggcagacccctaaacttctcgggggctgaccccacactattggtagcacactctctcacacgagatctctacaagcgccataagtgggatcctaatacatctcagcgcgatatttggtggagcccaccacggcatcaatagatgcgaccaactaagctttcgtctgtcactttattacatagcgtgcacgccaagaaaataacacacggggtgtagcaagaccataccagcctgttatcgtcacatatgcgactcaatcgatcacattactgacgagcaaactccaatcagtaatcagtc

SEQ ID NO: 560774 - DNA, 807 bp, Homo sapiens
tcaatgatcatcatgcaatgcctacctgcaccaccaactgctatagcacccctgtgccacaggtcataccatagacaacttatgtgtatctgtggaacggactcactgaccacatgtccaatgccattcacttgccacaccatgaatgacttgtgtgattgtgccccataccgtggaacacttgtagtgctgtgaattgtgcctgctgtgtgtgctactccacagcacacattcatacaccattgacccatctaacttgtgactgacttgcacaaagtgccttgttgtgtgcctaatgggtaccatacaccctagccagcccttgaaactgtgtgcacatgcatacaacatatgttcaaattgtgaccgatatcacatgtaagttctcacacaaaacttttggccacacaacgtgataggatcccaaagtagtagcttgtgaacacaatttgcaccccatatgccaccttgactcgctcacaggcacaccacagaaccctttaggcgcagaaaatgacttacattggcaatttggcaccctattcgcaaaatgccaccatgtgctagcggttaggcaacaatgccgcaagtggcccggttctagtcggaaggtaggtgccccccagcaaccctttcctcaccctggcggcatgcccaaaagtaacccgaattggatggtagccgatttaatacacaacaccgatttgggaatcggtccgcaacccccaacatggctggcattggcggggattccgatgtatccccattattacccggttgggtgcaacaacattattcgcaaaaagt

SEQ ID NO: 560775 - DNA, 317 bp, Homo sapiens
  misc_feature (20)..(21): n is a, c, g, or t
  misc_feature (32)..(32): n is a, c, g, or t
  misc_feature (39)..(39): n is a, c, g, or t
  misc_feature (41)..(41): n is a, c, g, or t
  misc_feature (44)..(44): n is a, c, g, or t
  misc_feature (54)..(54): n is a, c, g, or t
actagtccacggttggcttnnaatatgccttncaatgtnanctnccaattccantccagcgtagactagtagccaaccgtggactagtagccaaccgtggactagtagccaaccgtggactagtagccaaccgtggactactagtccacggttggctactagtccacggttggctactagtccacggttggctactagcacggttggctactagtccacggttggctactagtccacggttggctggctgggagtgggagtccataaggttcaggccactctcaggctgtgtgacctggagccaaccgtggactagt

SEQ ID NO: 560776 - DNA, 355 bp, Homo sapiens
actctagaggatacacagagtcttgcactgtcacctaggctgagtacagtggtgcaatctcagctcactgcaacctccacctcccaggttcaagcaattctcctgcctcagcctcctgagtagctgggatgacaggtgtgtgccaccatgcccggctaatttttttgtatttttggtagagacgggatttcactacgttggccaggctggtctcaaactcctgacctcatgatctgcctaccttggcctctcaaagtgctgggaatacaggtgtgagccaccacacccagccagcaagttctttacttagattctggataatgtagatgtcaggatttaccacggtgctataacg

SEQ ID NO: 560777 - DNA, 1230 bp, Homo sapiens
tggcttcagttgtggtttattggacatacaggtaggtctctatagcaaaaggcctggaggtgcgtgcagatagtgtgggggaaaatgtggaagggtggaggggtggagtgtggttgtgcgtgcaggaacagccgtgagtgtggagggtgtggggacaggtgtgcaaagcgtggaagaggcctataaagaagcttaaatgaaacgcagagttagagtggccgagggccccagagagtctcggcttctcaaagtggaacaacacacagaggcccagagtgtgcgccttagaggcgccccttaacactctctgtgtgcttgtgggtgtgtgttctctgtgtgtagccccacaaggccacacagggtgtgtggaagagagtctcctctctgttgggacatctcacaacttttattctctataagagagagacaagctgtggacacacagacagtataaacaacacacagcagagacaagcgagacacgctgtgtgtcaccctctctctttgtggcacactctgctgggctctcccagcggtgggccctctcacaggtctcacagagacatgtctcctctctcctttcatttcgcccttgtgcaagtgtggggcgttgggcgacgccccaccacatgtgtcatgtgcgcgccagagacccagaggagctcctctgtgagagccttgttgtgtcccccacactcttaagacaagccgagagtctgtgcccacacaaccccacagacgacccacagtgtgttcccacaagtgtggagagaggccagtcgtgcgacactccttttctattatcccgctgttgggggtgtgtccccaaaaacacttataacacagaattgtggccccacaggggtttaatcaccagaggccccccagagaaaagcggtggagaaggagtctctataaccaaacaaacggcccggtgctagacgccgtggtagccgcccccccatcaccaagtggcgacacgttcgggcggccccgtcagcgggcagccgccgcaaccaacggcggccggcaggggcagccggcggaagcacacacaagcccgggggcgccggccttttggcagcacctcgccgcaccggcggaggggggccacctacccacggtgaggaggggggggccctccccccaaacgattaccacaaacgggggggggcacgacaccaccaatggggaggaacacaccccaacaacaccacacacgcagcggag

SEQ ID NO: 560778 - DNA, 231 bp, Homo sapiens
ggtcgaccacatggtggttcaaacacaggctggctaacaagctgtgacgtgacttaccaacccaccccaacaacaaaaacccttgaacttctgctttcaacttccacctcatgctagactacccggtccaatcctcctggtctaacacctggctacatataacaaccaccatctgctcgaatgtgttcgaaaggtgatgattaatctgccaggctgatatattaaataaaa

SEQ ID NO: 560779 - DNA, 583 bp, Homo sapiens
ccctcacggattacctcaacaataagaaaacaaagaacctgactttaggaacaggacaatgaccttaacggacacctcactaaagaagatataaagatggcgagtatgcatatgaaaaaaagtcacataatcaggaaaatgcaaattaaaacaataccactacacacctattagaatggccaaaacccattaacagtgacaatatcaaatgctggtgagaatgtgaacagaaactcccattcattactggtgggaatataaaatggtaccatcactttgaaagacagtttagaggtttcttgcaaaactaaaggtattcttaccatatgatccagcaactgtgttccttgctatttacccaaacgaactgaaaacttatgtccacacaaaagacacgcacacagatgtttgatgtttatagcagctttattcacgattgccaaaactagggagcaaccaagatgtccttcagtaagtaaatggacaaataaacccgggtatatccagataatagaatagtcaagtgcaaaagaaaaaaaaagctgtcaaaccgtgaaaagccattcgagtaataccgtatggg

SEQ ID NO: 560780 - DNA, 290 bp, Homo sapiens
cttaaattttttttgccccccttttgtcccctttggggggcccttaaaaggggaaaacccgttggggtttccgggaacccgggccccccgtttttttttttggggaaacccccgggggggggggaaattttccttttgttcccggggttggttaaaacccccggggggggggttggggggggccttttggggggtggggggaattttggggggttttttttttctcccttttgggtcccccctgggccccgtttttttccaggggggcccctttagggggttccccctta

SEQ ID NO: 560781 - DNA, 141 bp, Homo sapiens
  misc_feature (63)..(63): n is a, c, g, or t
taagctctgtctgctcgcacacgggccgctcccacttgcgctgggtatctgagccgcggtgtncgccgcggtccaggagctcagtgctcgttcagggcgatgtaatccttgccgtcgtagctaactggttatacccgcgga

SEQ ID NO: 560782 - DNA, 870 bp, Homo sapiens
tcgcttcccaacagagctgctggccaacaatttttttggtttatcaaacagtgctgaaacaaacaggatcagcatttacttaagatgtacgactgaggacttttaatcagccgaaccaagatatggttacctgtatgcattcccaaagtctagatgctcagtatgtcagtcatatctttcagaatcagtgaaccgattttttttggggtatcatctacatctggccaacctagttcacctgggttggtggtctgctgtagaagggacccataactggttaacccggaggcttcactcatggtatcacatgctgtgaccattgtatttgtgcaacgttcaaaggtatccaatgtggtaaggctaatacattacactttataccacttcactcacttgggtcacaggtgccaagcaagacaccttcaaattccagatttaatatgtgcagttcatgggagggcaaaacgcaatatatttgtaccagactgtctacacatatttgggatacacaccaggctcatatctcatacaaacacttgactttataccttaacagtttgtacctcaaaaaagtctcaaaccataccttggttgcaccttttttatacacttcttcaacaagatccggctagtggttatcatacctcctttagggggttgctttttaccaaaccaattacgttttccacttggcgtggaagtacagaagcgagaggcgggctggcatcaatctttgccccaaaacaatgcgatatgggtgcctcacagttacaacactacactcttagcctcgtgtgacgctgtgagggcatttataccccagcatttccacggtttataccaatcttggcacatatacacagggcacta

SEQ ID NO: 560783 - DNA, 184 bp, Homo sapiens
cacactatagcattttttttttattatgagaccagacattcttttgaacccctcaatatgttaggcactgactggagtggttaacaatcctagctacttagtgcgaagactgccttttctttcttctttttctttttctttttttttaaattaagatggagtttagctcttattgcccaggctg

SEQ ID NO: 560784 - DNA, 211 bp, Homo sapiens
cctcctcctctagaaatctgggatcccaagagaagctgaggcaacagtcatttcctccggatgaaacgttaattttccccatctgcaaaaaaaaaaggtggaggttacccttcctggttgtttctcgtccttctttgcccctggttcacaagtctaaatattccccacctgagactggaagctatctcatcttgtctgaaggacctgttgt

SEQ ID NO: 560785 - DNA, 737 bp, Homo sapiens
agctccattttacctctctttctcttcccctttccttcgcgcccaagagcgcctcccaggctcgtatggtggtcacggagcccctgtgcctattccttgcttcgggtcctgcgtcgacgcctgccccgccatgaatgagagagtacagactgtgatcgtgctagggcaccggcctgacggaatgtatccttgtcaggtatcagtgtcagtgacatggcgaagaaacgttcttcatatgggatcgacacacccgttactacggaggacgagagtgcatctataacaccattggaagatttatacgacagatttcaaataccaggatcaccacccgagtcaatggggagaggaagagactggaatgtcgacttgtattccccaatggttccttatggctaatggtcgagcgtgcttaagatgctgcgtttatacagacggtaactcgctatctggattttagagtgactgaagggagctggtgtctatacagggtggacacaaatctacaaggttccttccactgaagcagaagccctgggatctagcctaatgggacttgtcctgaaagcacgtcgcttcaggagattcctagtgtatgttgccaacttcgatgaaaaagatcaagcacttttgaccggcgttgatcctaaagtaagacctacgtttgcgacgatgtgtgtaagaaatgtgatttgggtcaagacgttatagattgtactgggtcatgctcttgcctt

SEQ ID NO: 560786 - DNA, 1340 bp, Homo sapiens
  misc_feature (1340)..(1340): n is a, c, g, or t
gagtctgctgggggaacggttaggtcatgcagtgactggtcaatactgagtggcacggaactgatcgagcaggcgggctgcagtacaccaacgcggtgcgcgactgggagctggacctccgggggtataaaattcgccgtcattgagaatctaggtgcgtaacgttagaccgagtttgatgctattagataatatctgacgaatgagatcaggaaactgtgatggtttcctttgttgagaagactgaaaacattgttagtagaacaacaacagaatatgccgtataggtgagggacttgatcaggctctgccctgtctgacaagaaactcatatctcaccaataatagtactcgtggaactgggtgatctggaccctactggacatctctcaaatcgctgactatacctaagtatcctaaagaaaatccggtaaaacaataaagaagcataaacaagatagtcatagtagatataatcacacgttcccgcaaggtacacgagctactggcattatccagacaagctgcacactacacacattataaatccagagtgctagcgtatgccaactgacaacacagcaccacgtgggaccatctccagggcgatgtaaaaagcaaactcaaagaatgccataagcaaacaatagcatcaaaactactggactagaaagctggaacacagcctgcacaacggggatggtaggcaacgactgggagccaagaatacccagaggccacgagaacccgaccagatcacagggacccacctgaactgcataggatgaacgacacaacttggaacgaagaaacaagcacacgcaaaaggggacccagacacaccatagaagcagcaaatgataaacaagtagcgccaccacagagacaaacaaggcaatgcaacacgacgaacacagagaaaaaacaagaccacgacaacgacgcaacgaccagccgatagaaaacaaacaagacactggagaaacaagacacagcacacagacagagaacaaaaggacagaacaaaaagaccaaagacaacaagggcgggggtagaaacacaccagaagcaccaccgcaccacccagcaacacagccaagaaaaaagaagcggggcgaggagccacgacaaccccagaggccgccgcgacggcaccagcacgtcgaccgacacgaaacaagcgtgcgacacacaaacgagccccacgagaacggcgaagagcaacgccagcacgaccaccgaccggacgagaagaacagacaacggagacgacagctaccacgcacgcggaccagaagaagctaaaaagacgagagacggggagcaaagaacgatacan

SEQ ID NO: 560787 - DNA, 116 bp, Homo sapiens
ttctatgaggatcccactggctatcgaggccaaccgaggcttgcgacgccggtgaccgttgtattcgctcttcgcggtggcgttatcactggagctaaggaacattaattgggtat

SEQ ID NO: 560788 - DNA, 294 bp, Homo sapiens
gaagatggcggacattcagactgagcgtgcctaccaaaagcagccgaccatctttcaaacaggaggagggtcctgctgggagaacttggcaaggagaagctcccgcggtactacaagacatcggtctgggctcaagacacccaaggaggctattgaaggcacctacattgacaagaaatgcccttcactggtaatgtgtcattcgaggcggatctctctgcgtgtgaccagatgagatgcagagacattgtatcgcgagactatttcactacatcgcagtacaccgctcgagag

SEQ ID NO: 560789 - DNA, 82 bp, Homo sapiens
gaatttggaatgaaaagcacttcgtcagaaccttctgtgggagccattgagagaaaagcatggtccagtgccttctgagaaa

SEQ ID NO: 560790 - DNA, 180 bp, Homo sapiens
  misc_feature (24)..(25): n is a, c, g, or t
atgtgtctgcgtcctgttagcatnngtgaggaggtggagagacagcccacccccgtgtcaccgtgacccctgttcccatgctgacttgtgtttcctccccagtcatctttcctgttccagagaggtggggctggatgtctccatctcgtctcttctcttgtacatctctctcttctatgt

SEQ ID NO: 560791 - DNA, 222 bp, Homo sapiens
attacttatacttctcaacgctcatacttctcaacgcttatactctctcaacgctttatacttctcaacgcttcatacttctcaacgctttatacttctcaacgctttatacttctcaacgctttatacttctcaacgctttatactgctcaacgctttatacttcataccgggaaattaactgagaagtataaagcgttgagaaagtatacagcgttgacg

SEQ ID NO: 560792 - DNA, 115 bp, Homo sapiens
  misc_feature (101)..(101): n is a, c, g, or t
agtagcatacttttggaatcgataattcccttactaaagaactctgattcattgttaacatggattctatttctgactgtgatctctagagcacccggggnaaacatatgctaaa

SEQ ID NO: 560793 - DNA, 248 bp, Homo sapiens
gcggtccatggtgctgcgtgccagtgataggtgcgtttctctgttgcgggccgttttgccgtttaagacggacgcaacgacggcagcgcatgcccctgtaccgcatgcttgcgtcacccctgagccgcgctcccatacgcgaaaatgaagttcccgatcattgacgacttcgacaaattcgacattgactccttccggaaaacgagcatctttttccactactggccctaacgacgttaccggcgcct

SEQ ID NO: 560794 - DNA, 97 bp, Homo sapiens
cctcaacaccgcatcttatcaaagaaatgctagattcagaaaaccatcattttaggctgggtgcagtgcgctcagttaaaaatacattttttatttt

SEQ ID NO: 560795 - DNA, 167 bp, Homo sapiens
  misc_feature (158)..(158): n is a, c, g, or t
cccggtcgacgggggattgagaataaaaatcggataatagttggttaaaagacaaaaagaataagcgggaaaaatcctagggattactgtgacctagacaatcaaaagcagataggtgacctttgattaaatccatttactgtgtggcgtgagctaanaaggaggct

SEQ ID NO: 560796 - DNA, 642 bp, Homo sapiens
tcaaaaagcaaatcccatttatgggaattcactgacaacaaatggaaaggaaggtttccccctcccctgaaacatgccatcctctttgccctcagggctcacacagggataaaaaccccattccgattgtccccagagggcagcactccaggggggtgggggggaggggagggtgtgctgctacgccaggctgggggagctggggacaggagggaagactgtgcaccctcaccttctgggtctcaatccctctcccgcgggaccgggtgctggcccccaggtcccgggggtgggctgacaaacagggctcatgcaacaatgagtagacaggaggtggcacggaaacggtggccttggtgccccttggcgggggcgggaggacataagggggccatgctggtggccacagggggctccaaagggaagtactctgcagtgtacactacaggagggttggagagaggctatcttttcccctaggctgtgcctgggggacaagagagaggggaagtcacagtgggcactgccgtgccagggcaggtccaggccagcgtgccacctgagggggcacaggagctggagctcggtactcctggggcggcatgatggtgaggatgtaccggaaaaatgtgatgatgtctg

SEQ ID NO: 560797 - DNA, 701 bp, Homo sapiens
tataactttttaactttaataacataaatattaattttaaaaaataaggctggccaggcatggtggctcacgcctgtaatcccagcacttggggaggctgaggcgggcggatcacgaagtcaggagatcgagaccatcctgggctaacacggtgaaaccccgtctctactaaaaatacaaaaaattaaccgggcatggtggcgggcaccgtgtagtcccagctactcgggaggctgaggcaggaaaatggcgggaacccgggaggtggagccttgcagcgaaccaggattgtgccactgcactccagcctggacaacagagcgagagtctgtctgaaaacaaaaaaatacaggctgggagctgcaggggcctcaggctgttggtcctggcgcttggggaggcgaggcatacacgttcgaggccaacctgggtcaacatttgaccaaaaaacaaaaaaaattccacctgggtaaaccagggtagaaacccggattccatcaaactttccaaaaattgtgttagggcatggtggtgggccctggtattccccaagaatactccggaaggctacgaggttggacacacgatggcgttaacccccagtaggcacaaggttcgcgcacattggcccacaattcggccacatgacctatcacaaccacggcgctaaaccaaaccttggtctcaaaacaaccaaaaaa

SEQ ID NO: 560798 - DNA, 930 bp, Homo sapiens
ggtttggcgacattatgtacaggctgtgatgcatactgtcgaagatttgatgttcagatggttcttcttacatatactatgttcgtctacagttgcctatgctattggatgatacttacattgtgttgttctggtgttgatgaaaaaggggcaactgtctcctctatttagtaccttgcacacttattactgcctcagtgtgtcgcctgagacgtaaggaaatgccacaacgttctggacaaggtaacagtatcagctgatggaccatttggattgtgaacaaatgaagaaaacctgtgatatctggtgaacagatggtcccagcaaatactatattgtggacctgcctataccatgtgtcctcgatttctctcacccaaatagacttcgcattcttaacctggacctttcttgactgggacacctcttgacaggagctcttcaatgatctgctggccaacccctatattgttatcgagcctgcgtacctgacagttcactctcataacctaacttcacagcttgttctctaatgtcacagttgtgccctcacccttcacttaacccactatgggcctgtgtactcccccgcgcacgtactatctaccggacatcttctcacccacacaatggcttgcaccccacgcgccgggccaattcccactcttcatccggtcacatgagacggtccgcccccgtcaaccactcgggtcctcacacctgatagcaggttttcaccctcatgggacattatgccgtggcgccacctctctcggcactcccgggcattccttccactcttatccaaacaatcgcatgcacggtcccaggccggtctcatccgacagtgctagtgacaatcttcctggccctcaaaagcgtcacggccgtgcgcttgccctacacggtcactccaatcacctcacctaa

SEQ ID NO: 560799 - DNA, 242 bp, Homo sapiens
gagatcacgagataataagccactaaccagcagcttcaggacagacaacctctatgcccctgtggcgatcagtgaggatgatcagaatggtcccgggggatatgctggctcgcagttatctcacgtgctgactgaagggttaataagccgatggcatcaacagcttacgaggcacatcatacagataagataatatctaggcatttagcgaagattaaccacccgggtaccgccgatatctt

SEQ ID NO: 560800 - DNA, 353 bp, Homo sapiens
  misc_feature (74)..(74): n is a, c, g, or t
  misc_feature (85)..(85): n is a, c, g, or t
  misc_feature (206)..(206): n is a, c, g, or t
  misc_feature (328)..(328): n is a, c, g, or t
gtgtgctttaggaaaaatgtattacctgaagactaattggaatgagaggatattagtaaatcttcccagacctnagtttctttancctgatggtaaagtagttgaagtggaggctgggtgcagtggctcacatgtgtcatcccagcattttgggaggctgaagcaggcagatcacttgagcccaggagtctgagatcaacctgggnaacatggtgagaccccatctctgccaaaaattagctagacgtggtggtgcgtgccagtagtcccagctacccgggaggtcaaggctgcagtgaaccatgattgcgccactacactccagccngggtaacagagtgaaaccctgtctc

SEQ ID NO: 560801 - DNA, 133 bp, Homo sapiens
gtacctattgaaatataggagtttttatacaagtgtgagatagtaaccctcatcagaagtacgatttgcacaaatattctctcatttcataggtatgtctatttctactctgtatgatatgggttgacgtcag

SEQ ID NO: 560802 - DNA, 310 bp, Homo sapiens
ggcaggggtgacctacgatatcggtcacagctctatttagctcctctaacagagtcttgtacctaatttgccctggcaagccatctgaaaacggtacacacaacatcaggagttgtgaaaaaggttatttggctgggctctgtcattgtagcctactttctctcctgtgctctgtttatgaggccctctaccctgtggatagaatgaaatgtgtcaagtgggtagatgtaccctggagcaagattctccccacccccatacaagaaaacggtagtaggtagtttattcagaaatttgaataaactgtgaa

SEQ ID NO: 560803 - DNA, 423 bp, Homo sapiens
tgcattccatagtgctttggagacccgtctccattctctcccatcttgaatctgctggagccagaagaatgcctctcaagagctgaatggggcagggctgagcactgcaacctgtgtgcatgaaaacaactgaaaagcagttctcaggagggcaaaggctcagacactgcacgactattcctcgttcctgagtttctccaaacctgcactagaccatcaaggggcaaataaaaatcaaccacccccagatagcaagtcctcgtataggactagaggtggatattgaaattagtaagcattagagaggaaccggaaatacaccaaagcaaagcagaatataaaatggaaggacaaagatgaaaataacttgaaaagtgtactttacatgagaaaaatacttaataaaagtctgcgtatttaaaa

SEQ ID NO: 560804 - DNA, 178 bp, Homo sapiens
  misc_feature (11)..(11): n is a, c, g, or t
  misc_feature (19)..(19): n is a, c, g, or t
  misc_feature (22)..(22): n is a, c, g, or t
  misc_feature (29)..(29): n is a, c, g, or t
  misc_feature (44)..(44): n is a, c, g, or t
  misc_feature (85)..(85): n is a, c, g, or t
ttagattattnggggaatnaantgagacnatagaaataagtttntttgaaatatttttaaataattttaaattacaaattattgntttttgtttatcaaataagtgaagtatttcttagtgtctgtcagtcattgtacctaggaaggaggtgtaaagtgatgactgtcctcacaaggc

SEQ ID NO: 560805 - DNA, 414 bp, Homo sapiens
cagtccaaatccggggtggggtgcacttactttaagataaacaccaaaagcactcctcggccaatctggagcaatagatagaccgggataatatggcatgggctccaaaagcggggtggtagcttccttctccagatttaagaccggatgtctggaagagggcagcaaatcctaggagtggacacacgggcattccacgggaatcagaacaggaaagggagcgagatcccctagtgcagggggaaatagagtggttcccagcacaaaaccatagcataatgggtactttttttttgttgggagaacgggtctcaggggttgggtcactaaggggggagggcgggggcgcagatctcagcccagggcggcctgcgcctcgggggtcacaaggcgagatctcgggcctcagcctcc

SEQ ID NO: 560806 - DNA, 208 bp, Homo sapiens
atctattcggttcagatactctacgtgtccaagtgacattcagtttcatcaagtcatcgcgcatgtacagctcaaaaaaaaaaagtcatcgcgcagttaaatgtttacggaagcgtgcgaaattgcagatcctgtgaggaggcaagagcttacctgggggcacaggttcaggatcatccagggaatcggtcgaggccaattgttgggg

SEQ ID NO: 560807 - DNA, 180 bp, Homo sapiens
gatggcacggtaaggtctgggctcacctgaaattctggtagagctgaacttagtatagaattcccagagctgtaggcattttatacaattgcttacaatgtagctagaagacacatgacagttccagcaccctgccccaggatacatcctttgagggctgctgcaattgcgccagcgggc

SEQ ID NO: 560808 - DNA, 827 bp, Homo sapiens
ttggcacgtgtaacccaccttcatgtatagcacttgtgttccatgtgccttgaatttggctgacttgggactgctcgccttgtcgagccctgagctttggccacacgtttgtgccccttgtgtggagtccaggggctttgaggtctccacaactaggtaatgcatcgagtgtaatcctccgctcgtctagcgtgctgggccatgggcgcctgctcacagtacagtcatggagccagggatgtggctcgctctgatgcacaatgtctcagcaatgcccttgaaggtggtaggacggtggtgctccgtgggttcctcgatgtctggtgcaggatgctgaatggcgattggagtgctgccaagaatgatgcccgacctccccaggatcaagatcagaacttttggtaacaaatcagtacccaagtcttatttatggtccgtcgcggtttctgcgttgttctttccatgttcgatgactattgtgaacattcccaggtattcggagcactctagtggccttaaatgtggctcagtggagggagacccagcatagccaggccagtatcggatgcacctcacgcacagctctgcagaatgctgcaaggtcggatcgaacatctgaccaaagacgagtagctggtacgaggctcactgaaagagaaagggcctgctggtctcatcctctgtcttcaatcttgcctttaccgtatacctgctctgcacgtgccgcaccccattattgccgtgtagctcacccccaggatgctgtacccggttgtagaaggagctgaaatccaagctgagatgtacaaggacttgcatatctagaa

SEQ ID NO: 560809 - DNA, 257 bp, Homo sapiens
  misc_feature (73)..(73): n is a, c, g, or t
  misc_feature (154)..(154): n is a, c, g, or t
  misc_feature (162)..(162): n is a, c, g, or t
  misc_feature (242)..(242): n is a, c, g, or t
  misc_feature (247)..(247): n is a, c, g, or t
ggtctcctcctgcagtggatggagatggggagaggctgcgtggacttgtcgtattaaatgtgcctcctccctncacaggtgggatcccaccaggacatcaccgaagacagcttttccctcttctggttgctggagccccggataggtactgggnaagggganggagaacagaggtgttctgggccccagaaggcgacccccactgcaggctctcaacagaactgtagactagccacacccanccttncctagagatc

SEQ ID NO: 560810 - DNA, 386 bp, Homo sapiens
tccacttgcacccccgcagtactcagtcttccacatcaagctcggccacgtcctcacgccccacacctgcagggttctgccgaagccccccagtcatgctggctggagggcgtgtcttagaccagcccagcatccaacagatccagaggtaggcaagaagggaaccagggaaggggacctccgttttctctttttcctcctcttcttactgtctgtcccttctttttcccctaggatctctctcaacacactgaccctcaatgtcaagagtgaaaaggtttacactcgccatggggtccccatctcagtcactggcattgcccaggtgaagctttcagagccttttccccacagtccacttccccatcaccctctctcccagacat

SEQ ID NO: 560811 - DNA, 281 bp, Homo sapiens
tgcccctagcctgggccccccccgacagactgcaactgcgttactgtgcttagaggtacccagaaggttcccataaagggcagcatgtccaagcccctgaccccagatgtggcaacaggaccctcgctcacatcccccggagtgtatgtgtggggaggggcttcacctgttcccaaaggtgtccttggactccccttggcacatgttttgtgtttcagtaaaaaaagacctgatcccccatctgtgtgcttccctcctgcattaaaattccctcagtgtga

SEQ ID NO: 560812 - DNA, 134 bp, Homo sapiens
tgtgagaaataaaaccctagaggaggcaattgcactctgatcctcacgacatagtccacattcaagcctgaggtagctctctttccttctataacccttggtctaatccctccctggggctacctctctcacgc

SEQ ID NO: 560813 - DNA, 932 bp, Homo sapiens
tcttgtcgagtttcttccgtgtcagtgtacacgcattgggcctacccctgcgataccttatttttgggaaccctctttgtcgggatccgcttccccggttagctcccctaattggggcaccccggtgtgggctcccaatattccgggggccattccccccctattctccttggaaaagtacacatggttttgttagacccccagtttttccccgcttcgttaagcccctggtaccaccccccgttggagccacgcggaaatgatggtaccccccttaaataatttgcttttcagacgaacatccttttctcgtttgtcatcaagcacaccatcatttgtaatcaactaccctccccactaatgtaatataaatttttcatcacagtccccactgaattattagctgaaccacaaaaaaggtaaagaaacattctgcacccgagtctgaaaatccgctcggggagcacttattttcatgtataacaatattttgtgcccccgccgatatcattggacaaatatacttcttccaaagagtttctaaaccgctcctggaccttacgagcacacccgccctgttatccacggtttattcaccataatcccagagttgttgacaaaaacaattttgaaaatttgataccccccaacaaggtcttcttctaataaatataatgccctgttattcttgtgtccaacccagaatgtgtccccggcttgtttcctttatgtcacaaggagactccctataaaggcccttccgagccaaatcagaattttcttattcccttgccaggggtcctcctatttacaaataatgtgaacccaccagtggaatatctataaaagctctccttcaaaaacgcagtaactttccgaaatacatctggccccccctttaaaaacaccccccattttccccccacataaca

SEQ ID NO: 560814 - DNA, 244 bp, Homo sapiens
ctcgagctcggacccctaagagtgcccccactagggcttcactgaggcttttggggcacacaggggccttcctcttttggctctatgtccccacccaaatctcatcttgtagcacccataattcccaggttttgtgggagggacccggtgggagatgattgaatcatgggggctggtctttcctgtgctggtcttctgatagtaaatgggtctcacaagatctgatggtttttgaaaacaggag

SEQ ID NO: 560815 - DNA, 228 bp, Homo sapiens
  misc_feature (197)..(197): n is a, c, g, or t
  misc_feature (212)..(212): n is a, c, g, or t
  misc_feature (222)..(222): n is a, c, g, or t
gactgagagaccgtgttgcaatgtttgtctgagatgatagcatccaattatgtgggagcattttgggaatgatggcacctgagaagaagccttctctcaagaatgcaggcagcatttttaggttgacaggtgccaagaatccaaggcaattgtgtctgaggtgtccccaactgtttttccaaatgacattgcccatngcaacacggtccatngcaacacggnctctca

SEQ ID NO: 560816 - DNA, 431 bp, Homo sapiens
ctgttacaataataattaaaaggcatataattcaatttttaagaatcaacaagagatctgaattaacagttctccaaagaagatacacaaaaggccaataagcacatgaaaaggttctcaacatcactagccatcagggaaatgcaaatgagatctacaatgagatatcacttaacactcactggaatagatatataatcaaagtgataatatcaagtgttggtgaggatgcagagaaattggaaccctcatgcactgttggtggatacccacgtgatataaaaacaaatgtctacacaaaaacttgtgcacagatgttctttgcagcattatttataatagcccaaaattgaaacagccctaatttctatcaactaacaagtgtataaacccacacgtggcatatccatacaaggaatataattcagcaa

SEQ ID NO: 560817 - DNA, 882 bp, Homo sapiens
agcgggggcggaggcgctgctgcggcgctgcggccgacgccgggtccgcaccaactgtctccccctcccagcttcttacctcggcttcctactccttcccccgcccgcccacgcatccgccagctccgggtagagcttgccgggagttccccgggagcctctagggtgagtgactatcctgttgagaagcaataaggatactttgcaaggtactgaaatagtgcctcccaagatttaagcgccacctcaactgatgatgattgtcatcaggttctgtcgagaagtgcacaaggacgacaagtcttattggaagatgattcagatgactgcaagagcgcactttttctctaagggagaccatctgggaccaacgtattctgggactctagaatatgcctaacagttaagccatgcttcagaatcgaagtggatgaagtgattgatgtctatgccacgaaaatcttaccacaggtacattgcagtagagcggcgagagacgtatcatgaactagcaggacaccatcagaacagctcatcggctaatgcaactagctttcagccaacatgatccagtacaatcttcgaaggccactgtggtggcgtgcgatgcgtaatatccatagccatcatggctttgggtgagcctgctatccttttgcctaggtgattactcattcttatagtccgtgaaataccgtaccttgatcttgatgacaggagatcttcattcaatcaagatctgggaccggtcaatagaagattggtgcattatttggacatgaaaccctatgtgtttatttacttttcccaaccttcgtttttccaagaaactcaggagctcccgatggtcctggcctttgcaccctgaagtttaacccccat

SEQ ID NO: 560818 - DNA, 157 bp, Homo sapiens
cgctatgacgccagttcggttaccaaaattgtacgatgtggtacttaccatcggcatgaacggcaatgtgcccacggtcttctaaaaatcctacatgatctatgctgaaatttgcctccagtgcatgtttgggtcatgttgataaaaggaaaccttt

SEQ ID NO: 560819 - DNA, 526 bp, Homo sapiens
caagacgtatcagaacacagaagagggccaggcggggtggctgcacgcctgtaatcctaggcactttgggaggccgaggcaggtggatcacctgaggtcaggagttcgagaccagcctagccaacatagtgaaaccctgcctctactaaaaatacaaaaattagccgggtatggtggtacacgcctatggtcccagctacccagggggctgaggcaggaaaatcgcttgaactcaggaagtggaggttgcagtgagctgagatcacaccattgcactccagcctgggcaacagagcgagactctgtctccaaaaaaaaaaagtcctcttatgttcacctcccatccatcttttctccaaatcagccccagaatttcggtttggacccttttcttttctaaagtaaattaatctctctttttcttaacctttttttcctaaactcggtgtgcttttacctcaggattcctagatgcagttaatcttatgtcttatatttactctttttttcggctttcatccttgtg

SEQ ID NO: 560820 - DNA, 229 bp, Homo sapiens
  misc_feature (56)..(57): n is a, c, g, or t
  misc_feature (73)..(73): n is a, c, g, or t
  misc_feature (93)..(93): n is a, c, g, or t
  misc_feature (98)..(98): n is a, c, g, or t
  misc_feature (109)..(110): n is a, c, g, or t
  misc_feature (127)..(127): n is a, c, g, or t
  misc_feature (140)..(140): n is a, c, g, or t
  misc_feature (145)..(145): n is a, c, g, or t
  misc_feature (161)..(161): n is a, c, g, or t
  misc_feature (201)..(201): n is a, c, g, or t
gttgatagtctaaagggagacgtgtacagtaaatttgcacgcgcgtgaagatgtcnncttagggttgaggaanaaggaaagtgttgtgggaanatatncttgcgctgcnnggtgaagggagtggccntaaggtatgtgtnaagtngccaatgaagttgtgnagtgaagttgacattcaaagtgtacgttagggcccgcaanaaatgaacgaggaaacatgcggtagcgc

SEQ ID NO: 560821 - DNA, 282 bp, Homo sapiens
  misc_feature (175)..(175): n is a, c, g, or t
ctctagccgatcctactcccacttggttgcggcagcaaccatcataggcactatgatccaaatgtactttataacgttgggggcgaatcataaccaaaaacaagcctgcccacttagagagcgttaggtggggacccagagggagacaccagtagggttgaccagggcatcagcnctgaacactggtgtcagcaggattctgtactacactatgtggtaatccaggcaaagccaatgcaaggtggggggcaactgccggcaagaaccataagactgtgatat

SEQ ID NO: 560822 - DNA, 1266 bp, Homo sapiens
gggaacgaccgcatacgtatcagttgaccgaagagcgattatcgctcctccatgaatgactaggattctagtcgagatggatagagaacttgtgttcatggggatcatgtacgccaaggatgcaacacatgctcctgggcggcttcgtgcaggagagggcgcattgactgtgacgtcgagatagttgcggcaggtcgattcataaatttgcgccaggagaacatggtgctgaacgctgggcaaactcaaatagaacgagcttctagagagggcatcggacctaggcgagtgctggtgggacgaatgaggtgggagcctgaagatcggaggagctttcaatctagagatggtcgcttgcatgactgtctcgccccgcagtcctcatgacgtcagtgggtcgtcgaaggccatggactgtctcatcctcgtacttgcacatgtgaccgtctcgtagccgaggaacgccgcttcatatttgtgattggactgtcaaagagggtcgagataggaatggagccacaggatcttcgtgccatcgcgtgatggggcagcgtgggggcgatgggataggaccgcgtcacggaattcgttacgtgtgatgatccctcgacctgtcccatgatagccatcatccttattaacccgccgtgagcttccctgacatgcaagtggggggacgggggcccatcgaactcttggaccagagacccaacacgtcaaggctctgagccggcagatgtcctgtcatatcgaagtcacggctttctagggggtgctgggtgtatgactggggaatggaattgccataagtacatttagtctatgatgaggcatgggtagaaatgggatgatagaataaggaaatgagagaaggttaataaagaagaaaagaagagaaagaggataacaaagggggagagaaaaggtgggaatccgagggagccaacacagataaccgcaagacaaccccatcggagaccagaccatatcaagagagaagcacacacagaggaaacaacagacagtagcagacacagagacaccaaccacgaccaaagacagacaaactacaaggcagcacatgagggttggcaggaccaacacctaaaaggaacactagacagtatggcaagaataaggtgagggcaaagggaaacagagacacgaagccccggcaaggagaccaacgagcaagacgaaaacgagcaaaacagaaaagcagaagaccagagagacacagaaagaagcaagagactacacacttgc

SEQ ID NO: 560823 - DNA, 250 bp, Homo sapiens
gctactagtaaaagtttttttttttaaacctgcttagctacatttacattatgtaaaaataatggatatcactgagataagcagttgagtatttataccaataatattttatggggcgcttataatgttataatattgtaaccactgtgtactctatccattaatgctaaatgcttgccatcttgggataagggtcattaaaaaatctaggccggcaccatggctcacgctgtatccaggcttaggggca

SEQ ID NO: 560824 - DNA, 221 bp, Homo sapiens
tggaggccaggcgagcgggacagtagttagacgtagacttgcgtgtcgttcaccatctaacagagaaaggggggggagtctaattatcattgagggtgcttgagggaagtgttcctttcaaaagaagatcttaaagcactggctattgaatagggcctaagctatgtacagcatcgctggatttaacttttaagagccttgcaccttgaatctcacttggc

SEQ ID NO: 560825 - DNA, 129 bp, Homo sapiens
  misc_feature (64)..(64): n is a, c, g, or t
aaaaaagaagcggatagtgtttatggagaatgggtcctgtggagaaaaatggtgaagaaacaangatgatgatatgtttcagcagcattggcctcagagctgtggcatctctcagcatgagtgacgggc

SEQ ID NO: 560826 - DNA, 268 bp, Homo sapiens
ctccctgcagcctcaacctcccgggctcaagtgatcctcccacttcagcctcctgagtagtgggactacaggtgtgcaacaccacatctggctaatttttgtatgttttgtagagactggggtcttacgatatagtccaggctggtctcaaactcctaagctcaagtgatcctccccccttggcctccccaagtgctgggattacaggtgtgaatcaccatgcctggccttgatattttaaattaaatgcggcaaagctatgaataaa

SEQ ID NO: 560827 - DNA, 772 bp, Homo sapiens
  misc_feature (31)..(31): n is a, c, g, or t
  misc_feature (62)..(62): n is a, c, g, or t
  misc_feature (70)..(70): n is a, c, g, or t
  misc_feature (74)..(74): n is a, c, g, or t
  misc_feature (77)..(77): n is a, c, g, or t
  misc_feature (80)..(80): n is a, c, g, or t
  misc_feature (96)..(96): n is a, c, g, or t
  misc_feature (105)..(106): n is a, c, g, or t
  misc_feature (108)..(108): n is a, c, g, or t
  misc_feature (113)..(113): n is a, c, g, or t
  misc_feature (117)..(117): n is a, c, g, or t
  misc_feature (119)..(119): n is a, c, g, or t
  misc_feature (132)..(132): n is a, c, g, or t
  misc_feature (143)..(143): n is a, c, g, or t
  misc_feature (154)..(154): n is a, c, g, or t
  misc_feature (156)..(156): n is a, c, g, or t
  misc_feature (160)..(160): n is a, c, g, or t
  misc_feature (180)..(180): n is a, c, g, or t
  misc_feature (189)..(189): n is a, c, g, or t
  misc_feature (191)..(191): n is a, c, g, or t
  misc_feature (228)..(228): n is a, c, g, or t
  misc_feature (248)..(249): n is a, c, g, or t
  misc_feature (253)..(253): n is a, c, g, or t
  misc_feature (279)..(279): n is a, c, g, or t
  misc_feature (282)..(282): n is a, c, g, or t
  misc_feature (287)..(287): n is a, c, g, or t
  misc_feature (295)..(295): n is a, c, g, or t
  misc_feature (303)..(303): n is a, c, g, or t
  misc_feature (307)..(307): n is a, c, g, or t
  misc_feature (313)..(313): n is a, c, g, or t
  misc_feature (316)..(316): n is a, c, g, or t
  misc_feature (319)..(319): n is a, c, g, or t
  misc_feature (357)..(357): n is a, c, g, or t
  misc_feature (363)..(363): n is a, c, g, or t
  misc_feature (370)..(370): n is a, c, g, or t
  misc_feature (372)..(373): n is a, c, g, or t
  misc_feature (399)..(399): n is a, c, g, or t
  misc_feature (404)..(404): n is a, c, g, or t
  misc_feature (413)..(413): n is a, c, g, or t
  misc_feature (432)..(432): n is a, c, g, or t
  misc_feature (438)..(439): n is a, c, g, or t
  misc_feature (463)..(463): n is a, c, g, or t
  misc_feature (465)..(465): n is a, c, g, or t
  misc_feature (486)..(486): n is a, c, g, or t
  misc_feature (507)..(507): n is a, c, g, or t
  misc_feature (519)..(519): n is a, c, g, or t
  misc_feature (550)..(550): n is a, c, g, or t
  misc_feature (564)..(565): n is a, c, g, or t
  misc_feature (585)..(585): n is a, c, g, or t
  misc_feature (588)..(588): n is a, c, g, or t
  misc_feature (603)..(603): n is a, c, g, or t
  misc_feature (621)..(621): n is a, c, g, or t
  misc_feature (626)..(626): n is a, c, g, or t
  misc_feature (655)..(655): n is a, c, g, or t
  misc_feature (693)..(693): n is a, c, g, or t
  misc_feature (695)..(695): n is a, c, g, or t
  misc_feature (728)..(728): n is a, c, g, or t
tcccccaggtgggaggtccccagtgccaganaggtcccaaacccctccctcagcatccttanaattccangaangancancttctctcaggattangtcgcaaannanctcantcanancttcttcaacaanaatcaaaaaantcaaaaaaaantnaaangctctcggaaatccaatganctctcgganangtttcctgtcctccccggttcccaattgctgctcaanaaacctgccctggagttcannaaanaagtgtgcaaagtgctgtccctgganaanaaaancaaaaaanaagtgaanaaantgaaanganaantgcttcgcctggtggatgtcggcgagttctccgaggangcccanttccgananncctgccgctcctaagtgcttcctgangtcanctgccgcanctgtaaattctgccgcganctgganntgtgtaaaaaatcttccttctcanangatggggcggtcctgcctcantggctctgctccaaatgtcangcgccctaagantcctctgccatcgagatgacgctggtggaanttctaaaaaaaaanntgatggccttcaccctgcanganctggtctgcctgaantgccgcggggtgaaaganaaaanaatgcctgtgtaatgcagctgcgcggganaattcgacctaaaatccaaaaacaggtcttcatggaananatcggaatattccggaacattgcccagcactanggcatgtcgtacctcctggagaccctggagtggctgctgcagaa

SEQ ID NO: 560828 - DNA, 1349 bp, Homo sapiens
ttaagaaggaagaaaagagaacaggatgagctgaaacccggagctacaaatcgggctagagtcaccaaatcaggaagcagaggacatggacgcggacggtcgtgactggataacctcgaacaggagagcccgtcacttagcgtgaaaaccacgaagcaggatccaacagagacgaagctccaacgaggtcaggactcgcagacgtcagaacacgcaaacgacacacacgacgacgaccacttctatgatctgttttgactacaacactcaacacgacaccacacactgggacgacgacgacgacgccacgacgtgcagacggggacaaccgggacgaactccgtcgacaacacggacgacgcgcgtgcgtgagaagacgcagacgcaagcagagagagacagggacagacaaacacgcactcagagagcacttaccaatgcagcaggcaaaggcagcaaggccacgggcatcacagcgcgggacacgcactggcaagactacgagttgccaagagaccacgaggactagagagcgtggaagcgcaatgtgagacggggagccgggatgagagacgcaaagcagcattgcgacgtggaagcagtagagcgcaaggaaaggaggcagggaagcgcacatccaaacggagaagacgacagaagtgtagacttgccgaagagcaaaagacaatggaacaccaggcactggcgattcacaggacgccacgagcagacgagagtgaccccgggagcaggagagggacacggacacgaacaccctggacacccagaagctacagccactgcaatagccatacattagacgcccaaaacacgggcaacaacacgtatgatgagcaacaaggtgaagcgcaaccagaacaatcatgcggatgacagagacacgttacaccccacgggacacaggaacacaaaacacggaagttacacacgcaccgttatccgacaaccacatggacacaaccggtagtgtcacagaggtagacagagtgacacacaggacaaaaatgagcaaccaggcgtcggaagaggcacacgaaaagggcacaaaaagtgaaggggaaagagcaaccaagcgaggggaacatgagagacaggaacataatagtggacaagaaatgtgacaaccgtcgacacgtgaacacaacaggagagagtcaaccaccagcaaaggaagaccacagccgagaggaaacaacacacaccggatgacgagaaaatgagcgaagggacaacacagtcaaacagcagaaaaaaacgcggagaaaaacaagatacgaggaagaaatgcaccacaaacatcacgctagggaaatggacaaagaacaaag

SEQ ID NO: 560829 - DNA, 449 bp, Homo sapiens
caccagatgctcccaccagatcatgtcactgcactccagcctgggcgacagagtgagacttcgtctcaaaaaaaagaataggccaggacgggtgcggtggctcacgcctgtaatcccagcactttggaggccgaggcgggcggatcacctgaggtcaggagttccagaccagcttcaacaaggagaaaccccatctctactaaaaatacaaaattggctgggcgtggtggtgtatgactgtggtcccagctactcgggaggctgaggcaggagaattgcttgagcctggtaggcagaggttgcagtgagctgagatcgtgccattgcactccagcctgggcaacaagagtgaaactctgtctcgaacaacaaaaaaaggaatacgccagaataatctatggggatagaggtcagaatggtggtaagtcctggggtgggagcatctggtg

SEQ ID NO: 560830 - DNA, 300 bp, Homo sapiens
  misc_feature (211)..(211): n is a, c, g, or t
tttaaaagaatgacacttctggccaggtgtggtggctcatgcctgtggtcccagcactttgagaggctgaggtgggttaatcacttgaggtcaggagttcgagaccagcctggccaacatggtgaaaccctgtctctaccacaaaatacaaaaattggccaggtgtggtggtgcatgcctgtggttccagctacttgggagcctgaggcgngacatcgtttgaactcgttgaacccgggaggcagaggttgcagtgagccgagaacgcaccactgcattcgagagtgagactctgtcaga

SEQ ID NO: 560831 - DNA, 320 bp, Homo sapiens
  misc_feature (1)..(1): n is a, c, g, or t
nacacaggcctgggggtttgggcccccccctgccccgggggggccgggggggtggttttgggcccaaaggcccacccctcctttttttgtttggagggaaaggggcccaaatcccctatagggttcggggccggtttgaggtttttggggggacttttccagggagaattgctttttccccaaactttggggggggggggggtccccccgggggcagggccgcccccccggggccggcggggggggggtttccccccccttttcgggggccccggttgggggggtaagggttggttgggaaaaaatttgtttttttggga

SEQ ID NO: 560832 - DNA, 956 bp, Homo sapiens
atccccaatttgtgttcggactctccgttaccttcggtaacccctagacgtgtgccataaggcactggggcacccaaaaccatggggtcgcaaagagtgtccggtgccgcgtgacgacccccgtgagtactgaggcccctctggtgtaagcaagtgggccggcaacaattacgggggttttcgagctataccaacggaccatcgtccgctcaaggctatgcccccggggagtgctttcagcactgcaaactttacaagcaggtttcttgtgcgcccccggattagccgtacaagcaccaattttttgcacagggggcggctcttccagagaatttgacaccacagtgtttgagcggctacacgggctcttaatatgccgctttctccggaggaatctaaccagtccaattattaatccgtccccgtggaacacaggaccaccaattacgggcgacaagtggtgaagagaacctagcgcttttcatgcgggtcgtgcgccactataggacacatatacatggtacatcatttggcgtgagccacaactcagcctaaaagcttacatgctggggaccaggaagtctaagaagtaagcacatatcttcttctgccccctgcacaggtatcaaccatggtgttatgcatgccacgtttgcagcacagccccaccaagcaaactttcatattgtgccactgacgatcgcaccccaaccgtggacactttcgggaaaccacacgcctgggcggtgccgcgacactggtgcaagcaccccacctaaagatgcgccaggagaacgccaacagatgggtgcacaacaggggagatccctactctctctttggattgttctgttgacaagaccccggaggatcggtttacaaaggtaacaaaatttgggttcttcgaacaaaacacccccatagaaagcggaaaaccggaaaacaactacataaca

SEQ ID NO: 560833 - DNA, 425 bp, Homo sapiens
tggatacagtgcccaccgccctcctccacttggaaacggtatcctccctgcccatccgtctgtctgtcgcccttctcccggccctcactaagccccggcacttctagtggtctcacctggaggcaagagggaggggacagaggccctgccacgtcctgctgcctcctgctctctggaggtactgagacagggtgctgatgggaaggaggggagcctttggggggccaccctgggcctgtacctatacagggaggccacattccaccccacctatatgatctgggtccctgctcccctttgggggtgtgtgggaatgtctcaatacactttatggaaaaatggacaaaaaaaaaattgagatagaggtttctaactgctataaactgaccccatgtggccccggcctggttaaacctctactagtg

SEQ ID NO: 560834 - DNA, 146 bp, Homo sapiens
ccgtctgctggatgatccgctttaatactgcttgtttggctggatgatccactttagatactccaaggtatgcaaccatgatgtgtgcaggctagctctctccatgccagacaagcagtatttaaagtggatcatccagccagacg

SEQ ID NO: 560835 - DNA, 384 bp, Homo sapiens
actcgttggctaggggaggctgactaaagcacttgctagggcaatttggcaatacacacgcaaagatgtcaaataccgtttgctctaataactgctactgctaggaatctacctttcagatataaacacaagtgtaccgaaatctttcgtattgaaaatgtccacggccgcactgaatataccagcataaaaatctgcacactcaagtgtccatcagcagggactatgcagtgaaatagtggttcaaacctcagcatcaccctgctgatgtaggacaccttcaggtatggcctgtactacatgaagcacctcccagctcaacggttcacacctgctggggtcctcttctgatcacttctcctgtgcaaccagtggaacctggac

SEQ ID NO: 560836 - DNA, 422 bp, Homo sapiens
tggaatcataggttctaagtgagagaattgaaaagatatgttcacacaaaaacttgtacgcaactgttcatagcaccatagttcataatagccaaaaaccagaaataatccaaatgtccaaatgatgtgtgaataaacaaaatggggtctacccatacagtggaatattattcagccagaaaaaggaacgcagtactgttatatgctgcaacatgaatgaaccctgcaaaacccgcataagtgaaatcagacagcacccacacagacaaatactgtatgcattacacttatctgaggcccctagaataggcaaattcacacagacagagcagcacaaaaaagtttaccagtataacaaaggttcaccaaagactagggggcgagacaggtaggaagttcttcctctatggattcatttgggg

SEQ ID NO: 560837 - DNA, 178 bp, Homo sapiens
cttgtgcacgcaatacagcaagggagacacgggaatgataaagaagtataaagcgttgaagctactcaggaggctgagacaggaggatcaactgagcctgggaggtcgaggctgcagtgagcaatgatcaggccactgtactccactatgggtgacgacagagtgagactctgtacca

SEQ ID NO: 560838 - DNA, 317 bp, Homo sapiens
tagaggatcccatggtcgcagtatcgagggcgcataagccatgcgatcagataaaaacactgaactgacaattcacagacccaatatctacaatacaaccaaccaagtcattattaccctcactgtcaacccaacacaggcatgctcatcacggaaaggttacacaacagtaaacaggaactcggacacatctctaccccgacctgtttaccaaacaacatcaacctactcagcatcaccagatattagcaggcaccgacctgcccagatgacacatgtttaaacgagccgaggaaacccatgacccgatgcacaag

SEQ ID NO: 560839 - DNA, 908 bp, Homo sapiens
cgtaagggtgatccaccagcctcagcctcccaaactgctgggattataggcatgagccaccgcgcccggggaaatatagggaacatattctatcatggccacgttctctgtggacagcaatgccctgagcacatagtaagcgcttgcgtcgggaatggagttgcttttgggtcactaaactctgtgcgccccgccccacgctaagctactttccctctcctctcttcagtcggagccttaaatcaactcagtgagacatgacactctatcatcccacttttacaggggaggatactgaggcacacagaggggagtcaccagccagaggatgcatagcctggagcacagaggaagttggcatagaggccggtcccttccttgggccccctctcgtttcccttccccagatatggaggcaaagccagaatccatcatcggccccatttacccaattctgtacaaagacccttgatccgccatgcatactctgtagtatgacatcagtcctttgtctaccagctctggccaggtcggtctatggatgggtgtgaatggggtagtgtcgacgtcagaatcttggtcctcgacttgtcgtatgcatcgtctcacttcattacgtgtttcctgaggtcccctggtaggccccgggtctcggcgcctgtggcgcttgtcatgagcctggctcttgctgtccgagccgttgcctaggtgcgctgtgtcctcgcttggctatcggcccgactagcgaccaaggggaattacagcgactccggggtggcagggaatgcccactagcgcgagctagtggagacgtagaccaacagggcagggccgagggggcacacgcagccaggccagggagagcggagaaggcattacaagaagcaagtggaattagcaaaaggcga

SEQ ID NO: 560840 - DNA, 132 bp, Homo sapiens
tatcagcgctccataaagagcgcccgtaacgagcgctctaacaccctccgataacgagcctctgtaacgagcgcctaacgagccctcctaacagccctccgtaacgagcgtgtggtggaggtccgtagcggt

SEQ ID NO: 560841 - DNA, 387 bp, Homo sapiens
  misc_feature (104)..(104): n is a, c, g, or t
  misc_feature (369)..(369): n is a, c, g, or t
ttactgccaaaacttgatctgcatgaacttgagccacagcgcggaaaccgtcatctggtttggtggcgctgaaagtaatcttgcacggctcgcgaacgctctantggaaagagtaacccacgatttccgctgaaatgctctgaaatgcgattgtgacggaatttttttcaaaaattttttcggcaggtttgacggaaatgatggcgtaaaattacgctccggcgatgaaccggtcatcggctccgagggcgaccatcgcagcccgcgccgattccgccatcaaccgcttcgccttaagcacattccgacctcgaccggtcggctgccagggtccctctcgccgcaccttcggtgccggagccggtgcanccttgatgttgatcggag

SEQ ID NO: 560842 - DNA, 1285 bp, Homo sapiens
gtcgggggtttcctgcttcaacagtgctgtggcacggaagcccggcgctcgttccccaccccaggccaggccgaacacatagccagccctccgatcacctcttcaccgcaccctcggactgccccaaggacccaagagcgccgatccagcagcacagaagaaagaacaccgccggacgaccgacgactcatccattaggtcgccgccatgacgagcgcgtccacctcgcaggtgcgccagaactaccaccaggacatcagacggccgcacatcaaccgccagatcaacctggagctctacgccatcctacgatctacccttgctccactgtctttcacgtactgtagaccgcgatgcatgtgtgctttgaagcaacttgtgccaaatacttagattcaccaatctcatgagcgacgcagggacacactgctgagaaacatgatgacgacctggagaactaccgaggttggacgcagtcttccttcaggatatcacagaaaccagcactgcgcaccacccgggcacagcgggcgcagacatgcacacggagcgtgcatacaccatagtgacacacaaaactgtgcaatacaggcaccaacgggaacggcaaaaacagggcaatgcacaacacaggacccacaattggtgtgacataccggagcaacctaccccgactgaccaggcgcaggcccaaaaaatggcggcctctgacaactgcgcatgagggaccacgaaacggaagggcggaaacttaggagacgagccggagaaagtgatagacagcaagccagcaataccgggagagggagaacatgccagcaaggactgagcgaacaagtgatagtgcaaaccaagatgggcgctacagccgcatacatgtcgctatgcctattgctcgcttctcttgtcctcgctgctactccgcacgacacactacacttaccacacctcagagcggatgacccacacgacacgtacgaaaacaagaaaggagagggaagaagagagcgaaagaaagcaagacgcaagacggagaggatggcacagtaggagcacgaggacgcaaagagaaaatcggggcaacagagagagcagacagaaacaggagagcaaggagaagaaaggaaggtcaagagggaaggcaaagacagggagaagcgagacagacagaacaggaaagccacgaatcggaagaggaagagaagaaagagcaagagagaggaagaagcagaagagaacaagtcgaagaagaggaagaaagaagaagaagcaaacatagaagaga

SEQ ID NO: 560843 - DNA, 313 bp, Homo sapiens
cgtttgcagcaactgataacaagatagagaaaatgttagcatacgcgttctcctaacagtgagatctggggggagtttgttttcctgcttctttatactctacaaaattcccacaacgaacgccataaaaaaatgaaacaagatcataaaaaagagctggcatgtttggttacctgtactttggctctggggagctgacctttgtagggcgggtgctcttatgggggctgtaatgccgtggcgcccacaacctcacagggcactgtcttttaaccctacgtggatttcccaagcacgggccaagtcacctact

SEQ ID NO: 560844 - DNA, 457 bp, Homo sapiens
cacgagggaatccaagacaggaggaaccccttctctggctgagctgggccatgcctaacagtaggacgaactcgaacagcacagagttttttatagatgtatagatgtatcaagccaaatgtggagatgctaactgaacattctggggaactgggcaccaggagtgccttcatacactgtgccccagctctcttccaaaagagaagtgggtggacacactggaactgtttggaggccccaaccacaggatagctgcacattctctggcttatggtgatacttttgccctccttgtgcccctctcagctttccatccccagcgaggaagaaagaatggcactcttgggcttggtccagaattagagttattacagcaagagagagcttaagaagcatgagggcaacaagattgaggccttaatgccaggagggagggttttggttgctggcgcttgtg

SEQ ID NO: 560845 - DNA, 833 bp, Homo sapiens
  misc_feature (27)..(28): n is a, c, g, or t
  misc_feature (30)..(30): n is a, c, g, or t
  misc_feature (37)..(37): n is a, c, g, or t
  misc_feature (41)..(41): n is a, c, g, or t
  misc_feature (54)..(54): n is a, c, g, or t
  misc_feature (57)..(57): n is a, c, g, or t
  misc_feature (88)..(88): n is a, c, g, or t
  misc_feature (96)..(96): n is a, c, g, or t
  misc_feature (98)..(98): n is a, c, g, or t
  misc_feature (115)..(116): n is a, c, g, or t
  misc_feature (119)..(119): n is a, c, g, or t
  misc_feature (130)..(130): n is a, c, g, or t
  misc_feature (145)..(145): n is a, c, g, or t
  misc_feature (150)..(151): n is a, c, g, or t
  misc_feature (160)..(160): n is a, c, g, or t
  misc_feature (162)..(162): n is a, c, g, or t
  misc_feature (169)..(170): n is a, c, g, or t
  misc_feature (172)..(172): n is a, c, g, or t
  misc_feature (180)..(181): n is a, c, g, or t
  misc_feature (187)..(188): n is a, c, g, or t
  misc_feature (191)..(191): n is a, c, g, or t
  misc_feature (196)..(196): n is a, c, g, or t
  misc_feature (199)..(199): n is a, c, g, or t
  misc_feature (227)..(227): n is a, c, g, or t
  misc_feature (284)..(284): n is a, c, g, or t
  misc_feature (309)..(309): n is a, c, g, or t
  misc_feature (339)..(339): n is a, c, g, or t
  misc_feature (341)..(341): n is a, c, g, or t
  misc_feature (368)..(368): n is a, c, g, or t
  misc_feature (406)..(407): n is a, c, g, or t
ggctggatcaggctggtgtaatcgcgnngnagctgcntgcngtccggttatctnctnccggtgagaacgaaccgcagtgtccaccggngaggagcnanccctgtcccggtcagannaangacgacgaggnatacctgggagcggncgggnncgggctggncnggccggnngngggctggnnactctnntcntccgnttnctgctgtctctgggaactgggtgccagngctgaggggcttccagcggacagggacccccttccccggctccctgcccaccctgcnggggagggcggaagatgccggtgangaagaagagaaaatcccctggggtggcagnancagtagcggaagacggaggcctcaaanagtgtaaaatctccagctattgcagatcccaacccctnntagactaataagtggagaggaacatttttcaagcaagaagtgcctggcttggttttatgaatatgcaggtcctgatgaagttgtagggccagaaggaatggaaaaattttgtgaagacattggtgttgaacctgaaaatattattatgtagttttagcgtgaaattggaggctgaaagcatgggattttttaccaaggaagaatggttaaagggaatgacttcattacagtgtgactgccacagaaaagttacaaaacaaatttgactttttggctcacagttgaatgatatttcgtcatttaagaatattacagatatgcctttgatttgcaagggataaagatcaggagaaggctggatattgatactgctaaatctatgttaggtcttctggttgggggggcatgggcactgttttcagcatt

SEQ ID NO: 560846 - DNA, 834 bp, Homo sapiens
ctagtaagcctctacctgcacgacaacacataatgacccagcaatcacatgcctatcatatagtaaaacccagcccatgacccctaagcaggggccctctcagccctcctaatgacctccggcctagccatgtgatgtcagttccactccataacgctcctcatactaggcctagtaaccaggcagcactaaccatataccaatgatggcgcgatgtaacacgagaaagcacataccaaggccaccgaggacactcacctgtccggaaaaggccttcgatacgggataatcctattgtattaccgtcagaagtttttgttcttcgcaggatttttctggagcctggtctaccacacttccaggcactagcacacctagcccgccaagtgtaggagggcacgtggctcgcccaaacagtggcatcaccccggtaaagtccccgtaggaagtcccaactcctagagacatccgtattactcgcatcgggagtatcaatcacctgagctcaccagtagtctaatagaaaaacaaggcgaaagcaatgtaatgcaagcacggctgtattacaagctgtactgggtctcatatgtttagcctcgctagaagcctcgagagtacttcgagatctcccttaacattttccgacgggcatctacggctcactcatgttttgtagccacaggctttcacggccttcagtcattatgggctcagtttcctcactattggttcctcgcaagggaatcacttgaatccacaacgtcacttgcgtcgaaacgccgccgaaatggcgttgaaaatggcggaccatcgggggccacatgggggggcccg

SEQ ID NO: 560847 - DNA, 312 bp, Homo sapiens
ttaatgaggaagagatggacaatagaaaagataatacataagctccaggagaaggaggaactactcagcacttgcaagcccagcttactcggcgcacaggacgaacaactctgcacgtgagttctacaggagtatggaagaatttgtaactgatgatgcacagtctcctggagaaggatgaatccattagcactttacaagccccgctctagccatacacaggcagagcatgctgcacaggtggtccgtgagacacgatgcccgctttgaaacacgagttcgtcttcatgaagatgagctgcttcagttagt

SEQ ID NO: 560848 - DNA, 376 bp, Homo sapiens
tcaacggaactttagggtttcaaataaatttaaatgctttttttttctgattctgtgaagaaatgttattggtagtttgataggaatagcattgaatctataaattgctttgggtagtatggccatttaaacaatattgattcttcctatccataagtatggaatgttttcccatttgtgtcatctctgatttctttcagcagtgttttgtaattttggtcgtagagatctttcatctccctggttagctgtattcctaggtattttattcttttggtggcaattgtgaataggattgcattcttgatttggctctcagcttggatgtcgttggtgtataaaaatgctaccatatttggtatattgattttgtctc

SEQ ID NO: 560849 - DNA, 369 bp, Homo sapiens
cagtacacgagggagaggagttgaacctctggtaatataggttcaagtctcacgcaattgccggtcgctgccacccgtgtacgtgccgcttgctctagtggctggctttattatgcgttatttaggtcgagattatctcattcattatctctgagacgcgtatgtgaggttggtcccattgctctggtcctttcgtactgcgagaaatctcttataaatagaaaccgacctggtatagctccggtctgaactccgatcacgttcgactttaatcgttgaacaaactaacctttaatagcgggtgcaccatttgggtgtcctgatccaacatcgaggtcgtaaaccctattgtcgatcgtctacggttcg

SEQ ID NO: 560850 - DNA, 127 bp, Homo sapiens
accctgtcaaccttgcgggtcctgacttggaaaaccccttgcggatacagagtaaagcagtggcggatgcttatagtgaggtatcctaatcatcactttaaccttgcgttcgctgctcaactgcgcg

SEQ ID NO: 560851 - DNA, 673 bp, Homo sapiens
  misc_feature (47)..(47): n is a, c, g, or t
  misc_feature (93)..(93): n is a, c, g, or t
  misc_feature (104)..(104): n is a, c, g, or t
  misc_feature (121)..(121): n is a, c, g, or t
  misc_feature (131)..(131): n is a, c, g, or t
  misc_feature (135)..(135): n is a, c, g, or t
  misc_feature (155)..(155): n is a, c, g, or t
  misc_feature (159)..(159): n is a, c, g, or t
  misc_feature (177)..(177): n is a, c, g, or t
  misc_feature (182)..(182): n is a, c, g, or t
  misc_feature (234)..(234): n is a, c, g, or t
  misc_feature (285)..(285): n is a, c, g, or t
  misc_feature (302)..(303): n is a, c, g, or t
  misc_feature (305)..(306): n is a, c, g, or t
  misc_feature (334)..(334): n is a, c, g, or t
  misc_feature (338)..(338): n is a, c, g, or t
  misc_feature (353)..(353): n is a, c, g, or t
  misc_feature (360)..(360): n is a, c, g, or t
  misc_feature (365)..(365): n is a, c, g, or t
  misc_feature (396)..(396): n is a, c, g, or t
  misc_feature (416)..(416): n is a, c, g, or t
  misc_feature (445)..(445): n is a, c, g, or t
  misc_feature (569)..(569): n is a, c, g, or t
  misc_feature (607)..(607): n is a, c, g, or t
  misc_feature (613)..(613): n is a, c, g, or t
  misc_feature (654)..(654): n is a, c, g, or t
tccccactccctcccaagtacagacaaccttccgtcctgctccagtngaaggggtgacaacgattcctgaagcattctgtctgaatctaatgntggctctaaanagaaacagggaaatatngctggatggntgtnggatgatccaattccttggnagcnaatgtttgtacccctggnattanctgtttttcccactaaaataagcactgagaggcaagaccatgtccctctganctatttgccgaagacttcaggctggaggaaaaacaacagggcttgatagangtgcaaggtggatccannannaactcttttttttttttttttttttttntgantgaacactgactgcnagtttanatctnaggtgtgtagggagcgtggaggaggcaaatnctgtttggagaaagccagtntccaacacagcacttggtaaacatcaggnaattttatattctgagtgacaggcaccatgggccacgctgagccccactcgctcatctggctggggtcatcagagggaggcccaacccaggatctcctgtccatgggctggggagcagcaacantcaggagcgagggcccagcccacctcccctaggaggtngagggnaagggggctgagtggttgtcaagcgtggttctccccatctncgacgtggcggtacaaaga

SEQ ID NO: 560852 - DNA, 436 bp, Homo sapiens
  misc_feature (62)..(62): n is a, c, g, or t
cgaccagcaccataccccctccccaacatccgggctgatagggatcaaggaggcctgcctcncccagctgggctggggctcctgtcccccactgtggtgtgcctggggcctggccaggactcccagtgatgccagaagccctggggggaagccctgctaccctggaccttacaccgggtgtgggaatcagcctctgccccgccccctccagccccatctctgtctcaaggagagcagggtaggtgaaagtctagagaaagaggctacctgcccagggtcacagcaaggctgggaccatggcaagcttggaaccaggacttctatctcccaaccccagcagccagaatactgtgccctcttgctttgggggtaactcccgaaaaccctgccttacctctcccttccccctaacattaaactatttggcatgaaaaaa

SEQ ID NO: 560853 - DNA, 265 bp, Homo sapiens
ttcgaccggagcaggtaggtggaggtcgcagtgagccaagatcgcgccactgcactcaagcttaggcaatagagcaagactccatctcaaaaaatgaataaataaataaaatctgggtttcaggccaggtgtggtggtgcactcctgcaatcccagcactttgggaggctgagatgggcagacagctcgacctcaggaattccagactagcctgagcaacgtggcgaaaccccatgtcttcaaacattacaaaaaaatagctggg

SEQ ID NO: 560854 - DNA, 277 bp, Homo sapiens
  misc_feature (126)..(126): n is a, c, g, or t
tgctgattaagatcgtgatactagatctatatctctgtcttgctctctctttggttttgttcttctctctagcttgtctcgtctgttgtctattgtttctgtgcttgtacgcccagttcgttgcanatcctagcgtatgctcatcgtggtgatagaagttgcaagatgtgcagacttgactgccagaggtcaggccacgacgcaaagtatcataggcatagatactggatcgggagaatactcggggtgtcatttctggtggatcacgtgcccttga

SEQ ID NO: 560855 - DNA, 631 bp, Homo sapiens
  misc_feature (24)..(24): n is a, c, g, or t
ctcaacgctttatacttccatggngcaagtaagacgggaagtgtttttcatcttcttagagtttgggatatatctcaacgctttatacttcatacatgtttttgcaaggattaggaggaaatagttggttaaacaaatccttacaccatggataaataggggcctcaaaagactgacaaacatgttgaacttggaaaaatcccaagaccatgcatcacaatcttgacactacaagtatctgttccccacccaactgagcagatgttattgctctcaaagctccatttttcagccaatgcctcctgctagatttacccactgaggatttctgattgatagctatagagaggagagccaccttgaagttacaatttttaaaaaatcagccgctagattttgggtttgaacatctcaaaacgataggcccctttctcccaatttgccatggatatgtcccaaacagtctgtgcaagtctgtgcttcagattcacagcccttagaaagaggaaaacataacttgacatctaccttcctcactggcttcatgaagaggattaatgagttcataagcattaagtactttgcaagccacaggtgactgggaaacattattaggaccacatttttctaa

SEQ ID NO: 560856 - DNA, 820 bp, Homo sapiens
  misc_feature (325)..(325): n is a, c, g, or t
  misc_feature (363)..(363): n is a, c, g, or t
  misc_feature (365)..(365): n is a, c, g, or t
  misc_feature (377)..(377): n is a, c, g, or t
  misc_feature (389)..(389): n is a, c, g, or t
  misc_feature (394)..(394): n is a, c, g, or t
  misc_feature (400)..(400): n is a, c, g, or t
  misc_feature (403)..(403): n is a, c, g, or t
  misc_feature (417)..(417): n is a, c, g, or t
  misc_feature (428)..(428): n is a, c, g, or t
  misc_feature (454)..(454): n is a, c, g, or t
  misc_feature (464)..(464): n is a, c, g, or t
  misc_feature (466)..(466): n is a, c, g, or t
  misc_feature (473)..(473): n is a, c, g, or t
  misc_feature (478)..(478): n is a, c, g, or t
  misc_feature (485)..(485): n is a, c, g, or t
  misc_feature (487)..(487): n is a, c, g, or t
  misc_feature (512)..(512): n is a, c, g, or t
  misc_feature (521)..(521): n is a, c, g, or t
  misc_feature (530)..(530): n is a, c, g, or t
  misc_feature (537)..(537): n is a, c, g, or t
  misc_feature (539)..(539): n is a, c, g, or t
  misc_feature (542)..(542): n is a, c, g, or t
  misc_feature (550)..(551): n is a, c, g, or t
  misc_feature (560)..(560): n is a, c, g, or t
  misc_feature (564)..(564): n is a, c, g, or t
  misc_feature (590)..(590): n is a, c, g, or t
  misc_feature (594)..(594): n is a, c, g, or t
  misc_feature (603)..(603): n is a, c, g, or t
  misc_feature (637)..(637): n is a, c, g, or t
  misc_feature (735)..(735): n is a, c, g, or t
  misc_feature (766)..(766): n is a, c, g, or t
aaacaatagtgctaggtacgaggctgggtgttgggcgcaggcccgctgcggcggactgggcggcggaagttcgacggcgccgggcgagtggctgttgagcggcgccgcgggagttccgcaggtttcccgtgttcgcagcggagccggaggcagctgaacccggccgtgggatcccggataggcggtggaggggacccataggacgcgttaacatggacctggaaaacaaagtgaagaagatgggcttaggtcacgagcaaggatttggagccccttgtttaaaatgcaaagaaaaatgtgaaggattcgaactgcacttctgganaaaaatatgtcgtaactgcaagtgtggccaagaaaagnangatgtcctcttnagaaataaaaangatcnaaaagnggnaaaactttttgaanaaacaaaatanaacacactgattgcaaaaaaaaagtnagatggaatncncatgtanaaacnaaatgtnanaaaaaaaacgaatccagttgcagcnaagaagaanatctccatnaataaananacntatgagtnngatccaccngacnagaaacaagaattggccaggaagtanatgnagaaactanccaaagaaaagcaaaagtagcaggctcagaaggngcacagtaccggaagaagcagctggcaaagcagctccctgcacatgaccaggacccttcaaagtgccatgagttgtctcccagagaggtgaaggaganggagcagtttgtgaagaaatataagagcgantctggggagtaggagatgtcaaacttccctgtgagatggatgcccaaggcccca

SEQ ID NO: 560857 - DNA, 590 bp, Homo sapiens
aaacaatagtgctaggtacgaggctgggtgttgggcgcaggcccgctgcggcggactgggcggcggaagttcgacggcgccgggcgagtggctgttgagcggcgccgcgggagttccgcaggtttcccgtgttcgcagcggagccggaggcagctgaacccggccgtgggatcccggataggcggtggaggggacccataggacgcgttaacatggacctggaaaacaaagtgaagaagatgggcttaggtcacgagcaaggatttggagccccttgtttaaaatgcaaagaaaaatgtgaaggattcgaacttgcaactttcctggcagcaaacaatcattgtccgataacttgctaacgtgtcggcccaaagaatgaagcatgcattgtccatccttggatgcaagttgaaacgcatgtgcattcggaaacaagtagaggggaaacacacgtattcttgtggaaatgaaccatcgccaaatgttatttacccaaacataccttggattttggcgaaaaaacctaaacaatgttcacgaattgggaaaattactcccaattggttattaaaaacggccaaatgggttac

SEQ ID NO: 560858 - DNA, 742 bp, Homo sapiens
gccgaaagcgatgaaggagagctcgctgcccctccgtaaagctgaagtcgcaaggggaaggctttaaagacggccatagaatggccgggtggaaaggtgttcacagccacaaaaagaaggaacgatccgcacgtcaccgcaccttccggtcggccgaagatcgctgcgactccggatactgaccaaatatcctcggacgagcgctcccagcgagaaacatagctctgaccagcgtatgctatcatgcagagtttgtccgctgaccagcgtgagctcgtgctcgatgaagaacgcatagaacgacgaaccaacatcgacttgtgttcatggtgggatgttgaaagcgcaaacaagcagccagattaaaccaggcgtgtgctgaagctgtatgacattgatgtggcgcaaggtcaacatcctgattgcggtactgatggagagatagataggtatatgttcgactggtgtcctgatgacgagtgcgtttggatgtagcagagaaaagttgggatcatctaaacgtgagtccgagtgtgcctaatgctgaatatttatagtatatatattctttgcagtataaaagatataactgaaaaacagctgtcattattcctgtagtatcaaccgggaggacatggaagaggaccaggaaaaatgtacgtgacgccgttcgggcgaatggggaaaaaatgagggtgccaggacttagagcgatgaaaagagtgaagcaaggtgccgagga

SEQ ID NO: 560859 - DNA, 1653 bp, Homo sapiens
cctgttgttgtgttggtcggcgttgcgtggtggtatgttgtcgcgtgggttgtttgctgtgtgctgtgtgttcgtgtgctctggttttattattctcgtcagcgtgactccatggttggtgtttgttctcgcgccgccctgcatgcttgcttgtcgctacctgttgtttctgttggtggtccgggcggcggccggtgtgtctagtgtgggtggttggcgcctacagttgctgctggctgtgctctttgttgcaggttaggtagcgcttgtgggtcttccttcctgggcgtggtccgaccttgtggctcggttgggtgtcgcctgtggtcgcttcttatatcgccgccgtgtggtgactgttttggtgtatcggcggcggtcgtgtggtgagaacacactgtttgctgattgtggtgcgatgcttggtccggcgtgtggtgttgtaatgatgtggaggttgtgtttctcttgggtggagcagtcgtagtctgaatgtgtcgtgcctgttggatgactgcctggatgcgtgttgcttgttttgtgttgtgaggggtgttttgtgttctcgaggtgaattgtgagggcctcctggttttgtgagaggagtatggccgtgccagagtggattgatgcgcggggtttggttggcttctgttgtcgtctgtttgggtccgactgtgctggtgttggtgctgttgtggtgttgtttctgttgtggttgtgggggtttcctccctcgtatgcgtgtttttgttgctgcgcccctccgtgttttgtttcgccgcccatcaggggtcgttcgtgggggggtgtgccactggtggaggggtgtcggccacggctttgggggtgtgtgtcgcatgtctttatctcacgtggtcggttctttctcgttgttcaacatgcatctctctgtgggtggtgttgtcgccgcagcggtgggtgtgagttgtatccttgtttgggggtcgctccacgttgagtgtgtttgtgagagggtcttcgcgcgcgtggtgagagtcctcaggagagtttttgtgcgggctcactgtgtgtgcacacttctcgcacgccgtctgggggtcacacaccgcagtgttctataattgtttcgctggtgtgtgcccataataaaaaggagagaagatgttgtgttttgtgtgtgtgtccctgtgtatatatatatataagatatatgcgcctctatagggggttgagataggcacatatatatgggggtcccacacatgagatgtgcgcaagatgtgtgttgtataagagtgtgtataaggcgctcatgccacgagagatatgaggagaactccgccttttaacaaatacataaataagataaaagttccacatgtgtggcccacatggtgacaaagcggttctgattatatggaggagaacgccaaattcctccacggagaaattaagagtataaatataaaaatttaataagacactctgtgcaattaatttgtttaagtaaacgtgcacgggttagcacccgaaaagttctagctgaatttaactgtgtattttggcacctgtgttttataaaaggtttattgtttgatgtttttaaaggtttttgaaatccaggaattaaatcatcccttaataaaatagttccaaattcatatttta

SEQ ID NO: 560860 - DNA, 305 bp, Homo sapiens
tctacttgtcaaacatggacctaggttcagaaagctatttaattttgcttttaaatcaatataatatttaccccctattcacaccaatagtaagatctgaattcttactatcgtgaagcaaagttatcattacacagagaaaaaaaaattctctttttcataccagccccctttcccactggaacatcttagtgggaaaatgactggcattactgtttgttcttacacacttggtccaggctacatgagcagctgatctacctaaatcctaaataccaaatacagagcttcagggttactgaaga

SEQ ID NO: 560861 - DNA, 448 bp, Homo sapiens
  misc_feature (77)..(77): n is a, c, g, or t
  misc_feature (136)..(136): n is a, c, g, or t
  misc_feature (223)..(223): n is a, c, g, or t
  misc_feature (354)..(354): n is a, c, g, or t
  misc_feature (358)..(358): n is a, c, g, or t
  misc_feature (383)..(383): n is a, c, g, or t
  misc_feature (419)..(419): n is a, c, g, or t
  misc_feature (421)..(421): n is a, c, g, or t
tctgcaaaactcttttcccaaccggggtcccccttgttccagttctggttgctgtttagtttcccctggaggtattngcaaaccaccatggctgggtaaccaccgaatcagcacagctggtccccttggtcttccntgtatcccagtcactagtcctccctggtccaccccaccctcatcctcaggagccacagccatttcttagagggtttcaaaaggacanctttggcgccttttccttctaacctttgagtccagccctttccagttttcattcactcgaagtaactgcactcaagctgtgctcaaaatcggcaacgcatttatttacaccaagcccttcccattgggggnggantgctgaagaaaatagcagacgttgnggggtctctctaactctgggtatcccacagatgcanangggagaataaacctgaatattattacc

SEQ ID NO: 560862 - DNA, 123 bp, Homo sapiens
agtctgcacagcgttatatctgtgggaaacttctggtgggaaaagcgtactagatggtacgattagtcgtttcgcgcctactagcctggtcgggctgatcgattagcacgtcaggacctgcta

SEQ ID NO: 560863 - DNA, 101 bp, Homo sapiens
cccagacttcggaatacgaccttttggacgctctggattgagggtagtgacttctttgatagtttgcttcagaagctgcaggttacttacaagttcaaact

SEQ ID NO: 560864 - DNA, 241 bp, Homo sapiens
tactactactaaattcgcggccgcgtcgactttattctttttttttacctgaccgtactcctcaaaatccaaattgttggtgcatacatttaaaaaaaaaaaatttaatggaaatttccacctttgttcgaacacataaagtttgccatgaccaatataacattacaaacgtactgtgacaaaccattaataaagaaggattactagaccaggagcggcggtgcatgcctgtagccaagct

SEQ ID NO: 560865 - DNA, 1138 bp, Homo sapiens
  misc_feature (1019)..(1019): n is a, c, g, or t
  misc_feature (1022)..(1022): n is a, c, g, or t
  misc_feature (1029)..(1029): n is a, c, g, or t
  misc_feature (1035)..(1035): n is a, c, g, or t
  misc_feature (1056)..(1056): n is a, c, g, or t
  misc_feature (1059)..(1059): n is a, c, g, or t
  misc_feature (1065)..(1065): n is a, c, g, or t
  misc_feature (1074)..(1074): n is a, c, g, or t
  misc_feature (1077)..(1077): n is a, c, g, or t
  misc_feature (1123)..(1123): n is a, c, g, or t
ggtggagggtgacgccatgggtggggcggagcgtctgggatgcgctgggagcctaggatccccgacagttttgcagaacactgaaatctatggactctaaaatggacttcatttaaagaaacccacggaccattaatggacaaaaacatgagtcaatatgtattgtggcattcaaatcctagcactctgggagagcatcaagtaccacgtttttgaagaccatggcctatcatcattatgcattcaagatttgagtttgaataacctcatcaagacttagatcttcttcagaagcttcaagtctcatctgcattaaagctctccattgaaccctctcacaaaagtacaagcttaaaggggctaaaatccattaatacattccattttatatcccttcctctgacttctcttcaatttccttggcctctagggtccttcatattgcttacgttcctttagactagagccaaggagacagtgctttccaaaaaaaaaaaaaaaaaaattgtgttctggggccataagttttcattgatagagaagcataaatttggtgaatttagaattaggtcttttatcatatcctataaaaagttgagttaacaggctgggcacggtggctcatgcctgtaatcccagcactttgggaggccaaggcagctggatgccccaaggtcaggcatttgagaccagcctggccaacatggcgaaaccccatctctactaaaaatacaaaaattagccaggcatggtggcaggcgcctgtaatcccagctactcgagagactgaggcaggagaatcacttgaaaccaggaggcgggggctgcagtgagccaagatcacgccactgcattccagcctgggtgacagagcgagactccgtctaaaaaaaaaaaaaatgttgatttaacaatacgggaatgggggtgaagcggtaaaattgttttgggttacattatactctcagaagctatgtggtttagagaaaagggcccccaaccacaaaagttagtggttnttnttctgtntgcttngtactaggtatatggtaactnaanaaagtnacttaaccnctntgaaccttaacttcgtcatctataaagtgaatttaaattttccccnggcctacttaaaggg

SEQ ID NO: 560866 - DNA, 520 bp, Homo sapiens
agtctggtcaaactattcccctgcctcagcctcccaagtggctgggactacagcacgtgccagcatgcctggctaattttttgcatttttagtagagacactgcagcgggataattaaggaatcagagagaccggaggggttgaggtggaattatttaattgtttaggtgcatcaacccagtcagattaacatccaaaggactgagccttgaacaaaaagtcaagctaccttttaagcatttcgtggggtgggggtagatctgtgcagggggaagcgtattacagaagcaagaaacaaagacagttattcagttaagacatgcattacatcatttcttactttttaaggaacaacatgctttacgacttgagattatctgtctagtgaccttgcggctgcacagctagagaaacagggtcttcacaatgcctgggaagtggagagataaggctcactagccacagtgggaaaaacaggcagttaattttaaaggactctcagtcgtgaggactcgtcagt

SEQ ID NO: 560867 - DNA, 413 bp, Homo sapiens
  misc_feature (71)..(71): n is a, c, g, or t
  misc_feature (125)..(125): n is a, c, g, or t
tcggcagctatcggtcatgtgatgtccactaaattggacatctaaatgtctgtgtagtataactttattcntaatgagtggtatctcagggtacttaggtctgtacattgacattctgagttttnagttttgcagaacactgaaatctatggactctaaaatggacttcatttaaagaaacccacggaccattaatggacaaaaacatgagtcaatatgtattgtggcattcaaatcctagcactctgggagagcatcaagtaccacgtttttgaagaccatggcctatcatcattatgcattcaagatttgagtttgaataacctcatcaagacttagatcttcttcagaagcttcaagtctcatctgcattaaagctctccattgaaccgatagctgccaggtcctgtgtt

SEQ ID NO: 560868 - DNA, 751 bp, Homo sapiens
  misc_feature (71)..(71): n is a, c, g, or t
  misc_feature (125)..(125): n is a, c, g, or t
  misc_feature (632)..(632): n is a, c, g, or t
  misc_feature (635)..(635): n is a, c, g, or t
  misc_feature (642)..(642): n is a, c, g, or t
  misc_feature (648)..(648): n is a, c, g, or t
  misc_feature (669)..(669): n is a, c, g, or t
  misc_feature (672)..(672): n is a, c, g, or t
  misc_feature (678)..(678): n is a, c, g, or t
  misc_feature (687)..(687): n is a, c, g, or t
  misc_feature (690)..(690): n is a, c, g, or t
  misc_feature (736)..(736): n is a, c, g, or t
tcggcagctatcggtcatgtgatgtccactaaattggacatctaaatgtctgtgtagtataactttattcntaatgagtggtatctcagggtacttaggtctgtacattgacattctgagttttnagttttgcagaacactgaaatctatggactctaaaatggacttcatttaaagaaacccacggaccattaatggacaaaaacatgagtcaatatgtattgtggcagtggctcatgcctgtaatcccagcactttgggaggccaaggcagctggatgccccaaggtcaggcatttgagaccagcctggccaacatggcgaaaccccatctctactaaaaatacaaaaattagccaggcatggtggcaggcgcctgtaatcccagctactcgagagactgaggcaggagaatcacttgaaaccaggaggcgggggctgcagtgagccaagatcacgccactgcattccagcctgggtgacagagcgagactccgtctaaaaaaaaaaaaaatgttgatttaacaatacgggaatgggggtgaagcggtaaaattgttttgggttacattatactctcagaagctatgtggtttagagaaaagggcccccaaccacaaaagttagtggttnttnttctgtntgcttngtactaggtatatggtaactnaanaaagtnacttaaccnctntgaaccttaacttcgtcatctataaagtgaatttaaattttccccnggcctacttaaaggg

SEQ ID NO: 560869 - DNA, 477 bp, Homo sapiens
ctgtaaaaaatatatgtgcaaaagtgagtgtctaaatgttccctagagagttggcaaggctatacatcagagtcttccttcacaaggtttgcggtgtctttaaaggtgtcttctgtggcagtgtagccatggagtcgaacttctttttgaagctttagcaaggaagagaaggagatggagggggagccacagccacagcttccttttgctcagtgtccatctctgcatagattggattttcgaagttcgttgtctgcttgggttttcgtttgaagatattccattttgtgccctgagtttcatcagctccaggggaggctggctttggctctggaactatctcagaaggatctatggaccttccatagttctggttttccacattttctggtacagtcacctgtgagcttactgacggtccctgcactgccaggcccactttggaagtactgtctttggctgcatacattgggtttt

SEQ ID NO: 560870 - DNA, 431 bp, Homo sapiens
gggaagaataagttgaaggctttaatgaaatacatcctggatttggttgaacttcctagcttttgctggtaacccagctgtgacccttgaaataagttaccttcatcctctgagcctgtttccctcttttagaaacaggagtttaaaatgctgctttgggttgggcacggtgctcatgcctgtaattccagcactttgggaggctgagatgggaggatcactggagcttggagttcgagaccagcctgggcatcatagtgtgagatcctgtctcctcaagaaattaaaaaattagctgggtgatgtgcgtgtgcctgtggtcccatctactctggaggctgaggtgggaggattgcttgagcccaggaggttgaggctacaatgaaatatgattgcacccatcctgggtgacgaagtagaccctgtctcaa

SEQ ID NO: 560871 - DNA, 1517 bp, Homo sapiens
gtgccgcggttggcagcggtggggccttgctgcgcggtagggcggcttgggcttcggcctccctccggttcccttggaagcgggcccgctgaccagcgcgggacgcagtcagcagaggctggagggctccatgggcggttctctctccttccccgcttcagcctgagccggggtaggagaggctcaggtgcgtggcccgggggtgctcatgcgcagtgggatgcggaggagctcccggtgtgcccctgaaagaattggcgaatttccttctttcagttagcaacttattgggacgacttgctcacaattcagccaaggtagccacaaacagctcatattcaactgtggttgcgagacgcctgcgccataaatgtggccatgtgggaaaaaaaacaaaaacccaatttccgtttacaccccagagtttcatcccctatagtgcacacctgaaccacgcttgtgtactcacgcaattacgcatttccttcccataaaacacaagtaaagggacaaacccggttaacagtgggtccgacacagaggcgacgaacatacgggtcagccacttcataagctacatcattaagcaaccgtcttagccccaataaagagtgtcctgcgccaccattatttcggcccagatgagtcccacaaagaaaaatctgctatgcttgagcgcaacgcgcacactccccgtggggccaacaccacagcattattaccccgttattatacaccatatacaatacaacaaccaacgcacacgtactacactcggatcaaaacctaacggcttacggcatagggcctcggagccaacccaagagcttccaccaacagacaaccatctcgaaaccacacggcaccgcagacatctcacccgattggctatcacaccgctgttgatcggaagcgcacaacagagagaccctactctatagttcacacccacacgtgtctaacacgcccgcgccaatttgaacagggggacccccaatataaggccaaacaccaacgcccttaggcaacgactacggccctaggacaacactgtagtgcggcgctatagctttatactacccccacaggcaaagttgcattacacacaagcagggacaagtgtgcccattttcaaactgctgggctctacgcgcacaccacagaaatttctttccccacaagggcatatgtgggacacaggcatttacacacatgacaataagttataaggaggggaaattcacacccaaagtgtgtggggcccattaacttccgcaatgggccaattttgcgcagagatggcaattcactaaacccgttgcgcgccacaacggcggccacatcagtgtcgacccaaagaggtgtcacccttgatcaactcggcgccgtaagcattgcctcccgcgaaactttctaagacgagatatacagcaacatatgcaactctccataaaacgtgacagcccacatttcttgcaacataaaaaatttcggcgtactatatcatagcagcagtg

SEQ ID NO: 560872 - DNA, 913 bp, Homo sapiens
  misc_feature (6)..(6): n is a, c, g, or t
  misc_feature (123)..(123): n is a, c, g, or t
  misc_feature (289)..(289): n is a, c, g, or t
  misc_feature (318)..(318): n is a, c, g, or t
  misc_feature (353)..(353): n is a, c, g, or t
  misc_feature (365)..(365): n is a, c, g, or t
  misc_feature (414)..(414): n is a, c, g, or t
  misc_feature (463)..(463): n is a, c, g, or t
  misc_feature (663)..(663): n is a, c, g, or t
  misc_feature (724)..(724): n is a, c, g, or t
  misc_feature (729)..(729): n is a, c, g, or t
  misc_feature (826)..(826): n is a, c, g, or t
  misc_feature (852)..(852): n is a, c, g, or t
  misc_feature (857)..(857): n is a, c, g, or t
  misc_feature (878)..(878): n is a, c, g, or t
  misc_feature (906)..(906): n is a, c, g, or t
ggagtncaatggcacaatctcggctcattgcaacctccgcctgaagggagattttcaaagcaacattgcctctataataggtagttttcaatgtaatactggcaccaacaagagaaccgagcnaaattaaaactaccctcaaaatgtcatcacagctgaagtccacagcaggaaggacgatgtaacaaaatgcacagatctgttcctattgcacattccacctttcccacgtactgctggaagcccagaataaccaaaatctttttagatgtttgttttaaagagagcnataatatgcaaacatacacacacacacanaaacaaaaaaaaaaacccacaaaaaaaaaaaaacncaaacctggttnataaaagagctttgtggataagagtacaccctcatttggtccaagaatntaattgtaaacattaggcaaatagacccaataaatgtaaacaggaaganaataaactggttggctggaatattgtattttatataatatgcttatttgcaaactaatttccaactgtttgtccagtactaattcaactaattaatcttctaaatgtataggacaaagcctttaaaaagtaaagctcttcagcaacgaaaagttaacaccatctaaaataaatagattttaaaatatatgtgatgaaatnacaggtcactggaaattcaattctacaatgaatataaattaacattaaaatctattaagtnctatncctgggaagattttggttcagaggttttatttttttaagggcttaatatttgggaataaatgggcatagcttagaaacccttacaaagttgtgagtngactagaggtaagaatatttggtganaaganaaaaagatctttttctatgtncaaaataatggcttacctcattttagtnaaaagaa

SEQ ID NO: 560873 - DNA, 292 bp, Homo sapiens
ttttttttttttgggacggaatctcgctctgtcacccaggctggagagcagaaggttgatcacagctcaccatgaacacctcctgggtttaagtgattctcttgcctcagtcttctgagtagctaggactacaggtgtgtgctaccgcaatggtgtgatctcgctcactgggattacagtcatgagccacgacacccggcctaatttttgtatttattgtagaaacagggtttcaccatgatagtcaggttggtccccaactcctgacctcaagttatccacccgcctaggc

SEQ ID NO: 560874 - DNA, 1163 bp, Homo sapiens
ggattcagctgtttctactaaatatacaaaaaaaaaaaaaatagtttggatgtggtttcgtgttgccttggtggtgccagcttactcaggaggctgaggcaggagaattgcttgagcccagaaaggcagaggtttgcagtgagccgagaattgcaccacttgcactctccagcctgtgggttgacagagcaagacttccattcttcaaaaaattaaaacaagttccaggaggggcgtgttactttctttttaagttttatttatatttttgtgtgaggcagggttttggctgctctgtggagccattcattacccagttctggaagttgcaggtgattgcagctcatgtggctcgcctgcgagaccttccacacttcccggggcgtcgaagcgagtcctctcccaccctctagagagtcccctgcatgaaagaaaggtgtgggacaccccagggaggccgtggtggcaataaattcttggaacttttgtggttagaacgaacaagaggtttgtggcccattgttttgccccaagttagaattcttcaaaaggcagagggggggcttggtataccattctgtgatctcaggggccaaaaaggggggcttggtgccctccttggggaccccctttgtgccacaagcccccaaggtgcgggctttcatattcctccctcgtgtctaaggggggtggctataaagggtttcactctgtgcccgtggcaatccccgttgaagtttacccccaaatggtggttaaacctacaaggccaaataaacacggttacggtgcaagccggagaaacggggggtgtcacagaaagacatcaaggggttctccctcgttccccccagttgtgcaagctttcctcttggaaccctgttggggccctttgttgtataccgcaggtcgtttttacccccagccgggtctatatctgtggcctctatttgtgggtggcccctttggagaggggttacacagggggacgggcaggggctcctgggctcgggcttggttaacatcacagcgcaatgtatttattttgggccgccaggctctggcgtgttgccccaccgcgaaaatcttcttcccgctggtccccccaacagggcaaccacttgtctcttctcacaacttcttcgtcttgggggcctcccaag

SEQ ID NO: 560875 - DNA, 230 bp, Homo sapiens
  misc_feature (190)..(190): n is a, c, g, or t
aacctggggggcagtggtgtggagaaccacagcgctgagattcatctgctctcctcctggagcccagaggagggcagcagataggggtggtgtctcgaccccgcagcactgaggaagagcgggcttcttctcattcacccgtcctttcttccttgccccaggacctggctactcttggttgggcaagtgntctaggatggcctacactaggatgtatgactacaaccaaa

SEQ ID NO: 560876 - DNA, 484 bp, Homo sapiens
agacgtgcacagtaaatgttgccacatttccccatgagatcttgtatcctacatccaagagatcgcatgtatctagtccatgtatcacaaatagcacgtatgttatcgaggcttatagctgatcgtgcctgatgattccttgtcgggatcgtctaatggctaacagtaggtatgccgactagggctagtatgtggtgaaacgcaggtctcgatattctaatatctggcgaaaccaaacacacaactctaagacactggagtagttacaagaactatacttaaattttaagaactattgatccctacccaaaataaatccgatcaaaccaatgcagcacccaatctgactgaacctccaccaatagcttccaaaacttcttccttagcaagaaatcagtaataatcataatgataaaaattagtacaaggatgatcagaacaaagtccaggagaacctctactaggcagaaactatgtattttcc

SEQ ID NO: 560877 - DNA, 98 bp, Homo sapiens
  misc_feature (13)..(13): n is a, c, g, or t
aggtcagtatgantcactttctggggactcaagccatgaacacccacagtctagatccctgccctcagaagggttacagtttatgtgaattactattt

SEQ ID NO: 560878 - DNA, 466 bp, Homo sapiens
cagcctcatttgcaggagcagcatgattccatgcacagatttgcagggatgctgattgcccttggccctcgatttatgccaggcaccctttgtgcagagaggaaactcgctggaaggcaaccacgaacttcaaaactcgttcatggccaggggtaatcctctgtgggaggtacagctcaacaaggcacagagcctccagttcctgttgtcagctgagtacggtggtcatcatcctggctgctcagttcaaagtcaaagcacttaaagttctcagcaatgcgttctggtgtcacagcattggggatcaaccacaagttcctctgcatggggacaccggatcaggcactgggctgtagtttaattgtgcttggattgcgactcgcttgatccctgggatcctccaggagagcagggtcctcgggcttggcccagggccaggcaggagagccgagggggcagaaggcgg

SEQ ID NO: 560879 - DNA, 2124 bp, Homo sapiens
cccagttaccagcaagtgtacacagggaccaacggagacggatcgcagcgagctgagggtgccttagcgacctcctggacagacccgcccgcgccatgcgctcgcacactggcctgagggcgcttgtggcgcctggttacccgctcctccttctatgtcttctggcggcgacgcgccctgatccggctgagggcgatcccacagatccaacttttacaagtctacctgttcgagaagaaatgatggcgaaatactcaaacctttccttaaagagctgtaatatctcagtgacggaaaagtccaatgtatcagtagaagagaacgtaattttggaaaagccttctcatgtggaactcaaatgcgtgtacacagcaactaaggatttgaacttgatgaatgtgacttggaagaaagatgatgagccccttgagactacgggtgacttcaatacaactaaaatgggcaacaccttaaccagtcagtacaggttcatcgtttttaatagcaaacaattgggaaaatattcttgtgtctttggagaaaaggaactaagagggacctttaacatccacgtacccaaagctcatgggaaaaaaaagtcgttgatcgcttacgtgggggattctactgtgctgaagtgtgtatgtcaagattgtcttcctttaaattggacttggtacatgggtaatgaaaccgcacaggttcccattgacgctcactcgaatgaaaagtatatcatcaatggttcccatgccaatgaaacaaggctcaagattaagcatcttttggaggaagatggaggatcctactggtgtcgtgccaccttccagttaggggagagtgaggagcagaatgagctggttgtgctgagcttcctggtgcccctcaagccatttctggccatacttgccgaagtcatcctcttggtggccatcattctgctttgtgaagtgtacacacacaagaaaaagaatgacccagatgctgggaaagaatttgaacaaattgaacagctgaaatcagatgatagcaatggcatagaaaacaatgtcccccggtacagaaaaactgactctgcagatcagtgaatacagaaagagcatctcgccctgggaagaagtacagcgttggagtttgtacttcagcttccttattttagatttttaaaagacaaagatgccctcaacgtgcacagaagtagctttatgaacaatatagtccatctcctacctaaagatgtactttcattttgtaattgctttccattaaagcaaggtcaattgtttcagctgtgttctgtgagctgtaacctagataataaactcccctctgtgggtacagggtggacaccagcaaaatcacttaataatccacaaataaatatcgccgaagatctgtttattaccaaagaatttattaaagagaaagcgtttgccagttgtcttaagtgtttgcctccaccagacatcttacctatagaagtatttatcacagttttcatgtgaagtgtatccagtgttgagtgtgatttctctaggaaatggaaagtatgctttcaatatcggtggctacactgcagtctagacactaagataaacttgtgctctataaataatggtgcaaagtaagggagttcaaatgcttgtgccatggccactacattaccagagcttctcatcttcattgcactcatttctgctctttctatcccaagccgaagagcttcccagccttaagtagaacattttccttgttctttgtcattggggtttggacttcaatagtcttcagaggccagatccacgttgtcacagtacaaccccgctcgctacctgcatgcctttgtggctcatggtttctgggtgcctttatgtgccatctctttcctggtaccatacctggctaaaatgcattcttagtgttttccaataataattcctttgtctagtatacaggaggactagtgcactatctttatgttgctgcgaatgccttagacttaacttcaaaattgtatctgagatactttatgaacttagaaccaaatcacgtcagaattttaatggacatggaaacttgtcaatggttttaaatgaaataaaatgtgccttggatggttggatt

SEQ ID NO: 560880 - DNA, 357 bp, Homo sapiens
  misc_feature (11)..(11): n is a, c, g, or t
  misc_feature (16)..(16): n is a, c, g, or t
  misc_feature (153)..(153): n is a, c, g, or t
  misc_feature (159)..(159): n is a, c, g, or t
  misc_feature (162)..(162): n is a, c, g, or t
  misc_feature (164)..(164): n is a, c, g, or t
  misc_feature (176)..(176): n is a, c, g, or t
  misc_feature (178)..(179): n is a, c, g, or t
  misc_feature (197)..(198): n is a, c, g, or t
  misc_feature (220)..(220): n is a, c, g, or t
  misc_feature (248)..(248): n is a, c, g, or t
  misc_feature (257)..(257): n is a, c, g, or t
  misc_feature (268)..(268): n is a, c, g, or t
  misc_feature (288)..(288): n is a, c, g, or t
  misc_feature (303)..(303): n is a, c, g, or t
  misc_feature (317)..(317): n is a, c, g, or t
  misc_feature (335)..(336): n is a, c, g, or t
  misc_feature (341)..(341): n is a, c, g, or t
aatcagccggnccttntatgggccagaaattatttgggctatgtggagcagctgtcttgcataaaaagctatattgggctctagagaaagtgagaatggaaagaatttgagagatacgtgagaccaaaaaaaaaaaaagacacaattaaaatngtggantanantacaatgacaanannccttcccaaaacagtaannccaaaaagccggctaattagcntaaaacaggaaaaagataaggaagcaangggttggcngggaagctttnatcccagagcccccgatttncaagagaggcttcancttccttttaaaanctgttggctttccctatnnatttnctgtgcccatttccag

SEQ ID NO: 560881 - DNA, 423 bp, Homo sapiens
  misc_feature (5)..(5): n is a, c, g, or t
  misc_feature (16)..(16): n is a, c, g, or t
  misc_feature (86)..(86): n is a, c, g, or t
  misc_feature (219)..(219): n is a, c, g, or t
  misc_feature (236)..(236): n is a, c, g, or t
  misc_feature (258)..(258): n is a, c, g, or t
  misc_feature (313)..(313): n is a, c, g, or t
  misc_feature (321)..(321): n is a, c, g, or t
  misc_feature (329)..(329): n is a, c, g, or t
  misc_feature (357)..(357): n is a, c, g, or t
  misc_feature (382)..(382): n is a, c, g, or t
  misc_feature (392)..(392): n is a, c, g, or t
  misc_feature (415)..(415): n is a, c, g, or t
gaatnatgtaactttnatatgcactgagaaaccaaataatttgtgtgatttgctgtattgtgatgttagtccattgaggtggtttnaaaccgaacttgccatatctccaagatacgcttgtattcaagaaccatttgttgaaaagactattctttttctatcgaatcatctttgtacctttttccataacttagtgaccttatctatgtgagtctcttnctggattatgtattctntttttcgatcttggattcaatntgctaatatctcgttgcgcatttttgtgtctgtgctcaggctgttattggtctgnagtttctnagtacggnctttggttctagtatcggggatgctggncctcataggaatggggttggagtgncttcactctncttgcagtgttttcgtaaagganactgttgt

SEQ ID NO: 560882 - DNA, 593 bp, Homo sapiens
agcctttggtttgccttgaatttatgatcctctgtaattgaatgttaactgtgtgccccttggtaatttgtttaatatccctgtacaattatgcttctgaggtgtgcaatcctcttatgtaacgttgtgggctatggtctaccttacgtggactaatggtaagaaacgtgacttgtggaagtatcaagttctgtggctatggtgaagtactgtgtgcgccatgcagcactctgatctgtgcagggtattaacgtgtcagggctgagtgttctgggatttctctagaggctggcaaagaaaccaagattgttattcgtcttagacagggtcatgtcagggttggaaaagtccaagccgtaggacccagtttccatattcttagactgatgtatattggccagaacaccgtgggatgttaaatatgctaatagaagatggaagacggtttagcatataaacgcaatgtaaaagtatatcattcattaaatttatgtaaggtaatatatatagagcggagaatcatcgaattctatcgaaagaagaaagacaactaatgcatggggctctataagtcactatgtgaacagtaggcc

SEQ ID NO: 560883 - DNA, 388 bp, Homo sapiens
ccaaaaaatgtcttggcccacatggtcggtctaggcctatcaatgagtccagatacatgcttgcaatgatccagcgggacttctcggctccatgactcgggcactgaccgtagtcttagccatccccttggtgcacgtgagccgccggttcctctctacagtcggcgcagctgtcaatgtagggtataagcctgcctgaatgtcagtcacgactacatcacgggcccatgctcatgcggtgcactcggcaggtgcacttactgggttagagcatttctggcgcgcttgttgtacagggtttggctgtctctgctcacggtcccagcatgaacagcaacctgttgttcgcgcgctatagagaagctcgtcacgaattcgctacagaccg

SEQ ID NO: 560884 - DNA, 265 bp, Homo sapiens
gctctcgacggctcccctcaccgactggccggttgggcagccgaccgactggacttggcggcggcttcctcaccctggcgacgacgcagttctggccggccgtgtgtgcgccctttgtgggtggaccgccacctgggcgacacgacgtccacgcacttctgccacgtaccgacggcttggtgtgtccaccacccgaccctacgactgctggccaccgggtgtaccactgggcggacgactgtggcctggcgtgaccgacgctacc

SEQ ID NO: 560885 - DNA, 140 bp, Homo sapiens
gttctcatggctcccttctcctgtgaatctgaacccttgatatcccctgtcaccctgtgatcaccattgtgtagtgcactggctgactaccatctgaatatgtatgactatgtggcatgactgttctgaattggtgtctg

SEQ ID NO: 560886 - DNA, 260 bp, Homo sapiens
ccagtaatgaagccctggggacttgtctatgcatagtgttttcccagcaggagaaccaatattggtcagttctcaggtcctcagaggcctttctcactaaatggaacagcattagctatgttctttaagtctaattaacaactaaatcataacttgtagcctttgcccagttagatgaaactttcagcaatatccacgtttaaaaaactccaagtgccttgaattttattagataaaatggaatacaagggcgaaatggt

SEQ ID NO: 560887 - DNA, 871 bp, Homo sapiens
gatgtcgtgcttcactataaaaaaaacggtgctcctcttagttgtcctctgcagcaaagcctcccctctactattctgctccccaactactataaagttctctgtaatatcatcctcatgctccgcctatttcgccccctgcgctgttatatttaataagaagaataatgttactcctccccccccctacattaggatgtatataatccccctcttctttaaaaagatatttttcttccttctcctacccgctctggcgtgtcccatcagcaaaatcttctacttgatcttcatctcgtcagcgtatatatatcatctccccaccgcttcgtgtctaccctccagaacggccccctctagattatttgttatagccgagaagcgacgccaccttctgtttaaatcctaaaccattggcgtgggggactgctactattttatggatgatatatattgtggagaaaaaatacataggatagttccaagagttggagagagtcgagacggatattactacacccgagagatcggttgtctatatcatagtggggagagccccctacacgatgtgtctctatatcttcgtctgtcagagtgttcctcacattaattgtgacgacccccactcctattatgcaaaggtacgcgatttttattcacactcgccaatagacactctaatcatcccgtcatttttcctttttcgaccaccatcacctcgcacgcatcatacctttcatccgcacaaataatttgcccctcagaaaacttggagttccagacaacgcgggggaaaagtttataacatcttttactagtttctatcatacctggggaaaacaaagggttctcaccttcgccccacaagaca

SEQ ID NO: 560888 - DNA, 228 bp, Homo sapiens
ctatcgaggcccctgaggttgaagtcggcctctctgcgctcgagatcttccaggctgctctggcccacgaggaaaaggtgtctgaggctattcgcgagctctaccgtgcctgcacctcagctggtgatatcgacgcgattccgctgttgcagtggttcatcaatgagcagatcgaggaagaggcgactgttgacgaaatcgtcggtcgcattgaactcattggggacg

SEQ ID NO: 560889 - DNA, 288 bp, Homo sapiens
tcaatcatgagcagtccatttcatgacttttttgggatcccaatactggtgaatccagggtgatcctctgtatgtctgatacagttggtcttttaccagctgatagagttagtcagcttctactgtgatagggggcattgattcactgtcacacaggttcatcagtcacaggcaggctcactagggctcagagcggggagatatttaccaagttaccctgcgaaggtctgagatgagtgagaaggtgtgtctgtattcttacatatagggctgacacaactaatggga

SEQ ID NO: 560890 - DNA, 128 bp, Homo sapiens
  misc_feature (3)..(3): n is a, c, g, or t
tcnagcagtattagagtggatcatccagccagataggcagtattaaggtggatcagtccagccagactaagcagtatgtatagtggatcatccatgccaccacaagcagtattgaaagtggatcatcc

SEQ ID NO: 560891 - DNA, 369 bp, Homo sapiens
  misc_feature (37)..(37): n is a, c, g, or t
  misc_feature (137)..(137): n is a, c, g, or t
  misc_feature (152)..(152): n is a, c, g, or t
  misc_feature (162)..(162): n is a, c, g, or t
  misc_feature (179)..(179): n is a, c, g, or t
  misc_feature (193)..(193): n is a, c, g, or t
  misc_feature (216)..(216): n is a, c, g, or t
  misc_feature (228)..(228): n is a, c, g, or t
  misc_feature (238)..(238): n is a, c, g, or t
  misc_feature (241)..(241): n is a, c, g, or t
  misc_feature (243)..(243): n is a, c, g, or t
  misc_feature (246)..(246): n is a, c, g, or t
  misc_feature (279)..(279): n is a, c, g, or t
  misc_feature (285)..(285): n is a, c, g, or t
  misc_feature (332)..(332): n is a, c, g, or t
tagcaacagacagcgtttccaatttctcaaaaggcanataatatgagactagtgggctatgatgatgcctgtgaatagccagctactgtaccccactgtagctggacaagtgttaaacaagtaaatgcctttcaagngggcagagccctgcncccccacccncccccccccaaaaaaangggaaatgcctacntttcttgttctgatagcttcccnccacacaccaanggttcctcanggncngcngccaccagggctgctgcaagaacatgtttttcnctgggngtggcttcacagttagttcctcaagcagaagattaaaattttttttntttttagaagatcttggttgggggggaacataccaat

SEQ ID NO: 560892 - DNA, 161 bp, Homo sapiens
gccgcggtcttccgagcggtcgcgtgaacttcttcctgcaagcttggcattgcgcttcacgttcccaaggctccgggctttgcccaggatgctccaaggaggggagcccaaacactttttttagggttttgaagagggcttttttttaagaaacaaacaaa

SEQ ID NO: 560893 - DNA, 109 bp, Homo sapiens
gctgatctgcttacgcacgggaaacagcagtgattaacctttacaataaacgaaagtttaacttaaagctatactacaccccagtgttggtcaatttcgtgccagccac

SEQ ID NO: 560894 - DNA, 220 bp, Homo sapiens
tgagcatggcgaggccgcggagtaggtctacaagaggctacttccccgtatcatagaagagcttatcacctttcatgagtcacaccctcataatcgttttccttattctgcgtcctgagtcctgtatgcccgttgccctaagcactcgacaacaaaactagactaactactaagcatctcaagacggctcgaggtaacatagcaaatcggtctggcacac

SEQ ID NO: 560895 - DNA, 548 bp, Homo sapiens
cccccgcgtcccgggaggaattaccacgtgactttgatttgaatacttagtagaaactggcccggaaaaaggtacactttttctgaaaaattaatggatcccttgggaattactgacttgactagaagtatccaaggatgtttgcatagtgaatgtgggttatagttctttccccccctgtgagcataattcgatgaaagttgagttaagctgatagcgtaaaaatctgtgtttacaccagccatagtgaaaaagtgtattttatctgtgtaaaagtgccattatcaccagtgtttgaatagttgatagtagtgttcgtttttacaccagttttaggtaataaaggtctgttttccattctggtggcttttattaattttgatagtatgatgttacttactactgaaatagtaagctagagtgtacactagaatagtaagctccatgagagcaggtaccttgtctgttttttctgctgtatttattccccacgcttgatgatggtgcctggcacatagtaggcactccaataaatatttgttgaatga

SEQ ID NO: 560896 - DNA, 200 bp, Homo sapiens
ctcctaaagcagacatcgttgctacaccacaaatattccagaaaacctttacacagtcccacatataaagacaatgtgttcttcataatatcagtaaccgcgaggtcatgctgcttgctggtcttctaccctcacaatacttaattccgcaggattctggtctggtgcacgcactggcccaggcggtataagcttgagtc

SEQ ID NO: 560897 - DNA, 951 bp, Homo sapiens
gagggtcggagtccggcgcacctgcgtggtcggtgcccgggagatccagggggccgtgaagcccatgcagatcgatgtggaccccctagggaagacccgcagatttgcacctgatgtcaactacgtgttgtgagaaaccccagccatggatctggaacaggtattgcggtcagcatacggcggtctgaatgcgcatcgaatcggctgcggttcatttgctgatctactgcccactcgctgccgggtggagggcccgtgtaagatggtcctactcctttgatgcgggagaacctttgacgtgtcacactgttcgagagagatccgtctgaagctcatcagaggccaccaagggacgtctgcgagacccgcggaacttgatgccaatctccctgaaggagcggcggtggaagcccttcaagcactcggggggtagaagtcctgggtggtatggccgatcgcggtaaaagaagggtgctgctggagatctaggaagaatgtctgaacgagcaggaacctgaaggaaacctacatgggccccgtccgttcaataagagagacttcggcgtgcgcctgcggcaagctggggtgagacctcttattctgggctgtggtgtgacgtcttgtaaattgaccccggcaggtggctattgcccggggcccagggagctactgcgccggctgccacactgtgcatcaacattgtgccttcgctggttgtccaacgtgcggcgcttacttgccgagatgggcgtcatgtgctcagctacgttcgcacaggtgagtcaccccggagattggcgggcctcgagggagatggtgacacccgtccgggcgcgcccccaaggtcaagtgtgcgctgcttttggctggccccgggtacccggggcattcccctgatggccttggactgggttctgagcgtgcgcccggcctctggccgccgtcttcgcg

SEQ ID NO: 560898 - DNA, 145 bp, Homo sapiens
tctagagatcctgggacttctgtgaatactgagcctagggctgagggggacaccacgcacagagacacggcaggcccgtgttggccgggggtgggggtgagggcagaaccagccgagggacgctgagtcagaccgcttgcccact

SEQ ID NO: 560899 - DNA, 114 bp, Homo sapiens
tatccgcaactcatcacataagtaaataagagcctctagcttaatgttttttcttctcaggtgtctttctcctacagactctaattccacatatgttcaaccacttaatattaa

SEQ ID NO: 560900 - DNA, 329 bp, Homo sapiens
aggatgtttaccggcacgcgggacgagagatggcctcttcacctgagtgcagtgagatgccccttgatctgtcctccaagtacaacctgcagaagcttccattgcctgaaccagcgcaagacaccccccatgcctgtatagacccccgtgcacaccagcagcaaggccctcctctccacagtcctgtctaggtctcagcgcacaacccaggctgccggtggcaatgtcacctcctgcctgggctccacttcctcgccctttgtcatctttcccgagatcgtgaggaatggggacccgagcacctggctgaagaactcaactgcactgat

SEQ ID NO: 560901 - DNA, 962 bp, Homo sapiens
  misc_feature (21)..(21): n is a, c, g, or t
  misc_feature (432)..(432): n is a, c, g, or t
  misc_feature (434)..(434): n is a, c, g, or t
  misc_feature (656)..(656): n is a, c, g, or t
  misc_feature (698)..(698): n is a, c, g, or t
  misc_feature (763)..(763): n is a, c, g, or t
  misc_feature (910)..(910): n is a, c, g, or t
  misc_feature (960)..(960): n is a, c, g, or t
ctcctgcctcccacctcattntctaccctacccctcccatcgggctgtgctggggcttggggaggggaggggcgccttgtttctccctccagtctgatcataaacaattaccaggaactagcattgtgggacattagggcccccggcctcgggagaggtgccgcccagcttcccatgccagcccggagcccacagtgctgcccagcgtacctccctcaccgtctggggctcttctgggagcacggagcatcccctgttcctgtttcactctcagcttctcccctcgaagggactctctggccacctcctccaccgcagtccagctccctcagtctggcacccactgctacactcagcctcatgagccacttcagaccagccaggtgtcttcccgggccctgccagaccctgctcacattccctctgctggtntntgctaggtctcagaaggccaccgcgcccgcattccactcagccagggtccagctgcagcccccgccacccttccttcccttccctgtcctgggtcatgttgttgccaccctgtgtgacttttgaagctgtaaaatgagcttccagggcttgggtggcgtcggggcagggccgccgaggctgggaggaagcccttctgccttttgctggtgtttctggaattngctttccctcacctctcacttccttctagaaggagcttcctnactggaaccagagaatgcatgtctgtccacttggtggctgctgggtggggccgggaacaagggcncctgaccctgtgtgctggccgggacctgccaccagccccccagcctgcttcttccccttaagctttgtgcccctggatgcgctaacattcactcttgtttgtccctggactggccatgaagtgaggagatggttatttaaagagaantccctatttatttgacaaaaaatccagttaatatattaatgtgaaataancc

SEQ ID NO: 560902 - DNA, 881 bp, Homo sapiens
ggcggcatctgcagtcacgtccggggggcggcggcgagacgccttcccagcgcgcagcccttacacctctccgtgccgcgccccgcggcgaggtcgcgcgggtgctgtcaggatgcggagtctacgaggggaccgagatccacgaggcctcggcgatcctggttgcaccttgagccgtggaggggctgaagtccagatctttgcgtcctgacgtcccgtcagatgcacgtgattgaccacaccgaaggggcagccgtccgaaggcgagagcgaggaatgtgttgaccgagtctgcgaggatcgcccgtggcaaaatcacagagctggccaacctcagtgcagccaaccaatgatgctgccatctttccaggaggcttcggagcggctaaaaacctgagcacgttggccgtggacgggaaagatggcaaggtgaataaagaagtggagcgtgtcctgaaggagtaccagcaggccgggcacggccagtcgggtgtgatgcttccaccgagacctcccggtaacctgatccattggggggtcctaggaagaggggcagctcgtgctggttcacggtcgtcagggtggcgtgtaggggcttggcaagggcgagaagtcgaggactttgcggtggagtagaagatcgagtggacgggggagtcggcaaatggggcgcctcactaccgagttctgtcacggcgaacaaggatgagggatcgatcgggaatcctgtctcgccagcgcagaggcactcacttaaggacctgcgtggtcactgtccaaggaaggccgctacagtggacgctcaggaagaggtgcagggcgcagaagctcctgaaaggaaggtcctggctggagaccgggcacaggcggggttgaagggg

SEQ ID NO: 560903 - DNA, 729 bp, Homo sapiens
tccctttaacttctcagtggactgaattctgtttccaccggatttttggactaaaatagcttatggcaacagaggctactctggggttaaggaaaaatgtagttctcggtttaatgttataatatcgctcaaagaaaaataaaagcatctccctctaacaccaccagacttttcctctcgtgtaccttatcatgtaaatttggctattggatttctcaccggggtggttccctttaatgggtgcaaaaatttagggctatttagctgacaacggcctagggtggtaaaacgggttatcaagaatctgaaagtctaagataggaaaaaaaagtgggggggcattataattctataaaaggtacttctatgggcatgcctaatacgtctttatatgttatgtttgtgtggtgtacccgatgttttagtgctaaaattttgtaaaagagctctactgggtttaaagaaaaataaagtgcttaattcagatactaaaaaagaaaggtagtcaaagtgctttttcaaatttttggtaccttaggtaaaatctttaataaataaaggtacgctttaaaattttgggtaacagtagtattagaaagtgtcttaggaaatgtgcagcatacattttgggttggcttatataattcaaccagttttatacttaatcccttgtcaaataccagaaggtgtgccaattgtggctagggggttttaaatataaacccaggg

SEQ ID NO: 560904 - DNA, 385 bp, Homo sapiens
attaaaagaacccctgcattgctatggctgcaatagcaaaataccacagactgtggggtgtcaccgacggaaaggtattttctagcactgctggaggctgaaggtccacgatgaaggggctagccaagcccgatcctgataggggctcttcgtggcttgctgacgggcgactcctcactgtcttcacatggcagagagagaaagaaaaatctctcttgctgtgcttaggaggccaccaattctactgaattaaggccccacccttatgatgacctcacttaaccttagtaatctcctatctgccctattgcctaatacagtcacacagggattagggcctcaatatataattctgggagcaccaccaatacagggtaccgagctc

SEQ ID NO: 560905 - DNA, 526 bp, Homo sapiens
  misc_feature (267)..(267): n is a, c, g, or t
  misc_feature (285)..(285): n is a, c, g, or t
  misc_feature (289)..(289): n is a, c, g, or t
gaggttgaagctgcagcgagccatgatcatgccactgcactccagtatgggcaacagagtgagaccctgtttccaaaaaaataaaaaataaaataaagttatataacaaagcctgatatttgtagtgttttctaggtaacagagtgcttcatatgagttcattgaatcttaaacaactctgtaaggtggacattttaatgcacctgtcattagggttaaacttcggtgtatggagtgagacttttaatcaataaaaagtttaatctnaaaggaaggggaagggtngtanaggtgcctgggggggcaagaaacaactgtctatagagtgctatcctaaagacacccatgaagccatgttgtcattctgtctagacccgctggactgcaccctaagccatgacatgttgactgtgcaaaaagtcatttagctggggggatgcaaaaggtaaacaaatattgcataaagcaaatggcttttgaagtaataatgataacaataataaatgatctgaatttgaatcctgaa

SEQ ID NO: 560906 - DNA, 836 bp, Homo sapiens
tgggcacccgctcgaaaagggacatttcagagggcccttgcggaagttctcacaggacccctcaactcttcctgtggactggcctacccccacctgtgaactacctgggggtttctcccgggaacctcctaattgatggccccagcgaactcccggtattaaagcccgtcagtgcgacaagcttgcccttaggaaggccagcccgactcgacgggtagggaaaatcgacggatacgactctgaagttcccaagtgagacttgaagggtcctcgagggtaggacccatggagcccagctgttccccgttaagcgtgtctgtacgagatcctccctagaggcacgctgaagacgagaagtcccgcatcagccatcatcccaccatgaagtaacggtgggccatggctctgaaggatggaggcgccagaagctcatgcattgcccgtggtgccatgaactccctgaggtgcccatggagatgcctattggatgctgccgccctagagctacgagctgctctcacgtggaagcagtgcaacagggcagtaggcactggaagctgcaggctaaacagggagcccgacttcagcatgcctgcgtgtcacctctcagccccacgacaggataggctgcccgggtcttctacctgctcactggtgctctcagcgacaacagattgcttcacgctgatagcaagaaaagccatatggtcgcatcatgatccagccggggcccagattccactgaggtatagagtccatttacaaagctgccaggaaaccggccacttctagtaaacacacgtcgtgcctcacgtgggtcctgcctacctagctac

SEQ ID NO: 560907 - DNA, 735 bp, Homo sapiens
agcgggtctccgctctccttcgcgctccgtcatagtccggactgacatctacatccagtcctggggagcctgtcagcctggcgactgcatctctcgaggtgcacggctgtgagtcggaagagcctgactagctatttctgtcaaagcccatgcgcatgatcgcgcatgggggagtccgtgttcgtcgcgtggaatgaacttcgatggtgggatctagcaacacgatccatgaacgactaggcagcacgagcgcggacgacgcggagagatcctggacgataagttatccaagacagataaatggtccttggatgaaacaccacttgagtcctcgaatttctgaataatagtgattcatacattgatcgatggttgctcacaccatgttgtgtgtgcatgttaatcaatagttgtagaccgacttggatcctgtagcatgggtcagtgagtttggggcctatgcgttcggcaggtgcattaacgattctattgactcttggctaatgccaggagattggcacataaatgtatggcatttgagtaactgcaaaaggcgatagtgggaaatggctgggtattggaacttgtattgactaatcctttgcctaattaggggatttccagtactttctaatgtgcctgtatacagaggagtatcagccattggattcaatcaatcagtgtaccctatggtaggctgaatgtgcgtgagaaatgtaagattattgtctagac

SEQ ID NO: 560908 - DNA, 106 bp, Homo sapiens
tagagcttgttcgtgcatcctcacaatcacagatttgtttctccaatcctcacagagacccaattgaccaaaaaaagaaaagaggaaaaaaaaaacgtcgtcgttt

SEQ ID NO: 560909 - DNA, 161 bp, Homo sapiens
gtaattttcatgttggttttttgtggagatgggacgttgccgaggttggtctcgaactcctggcttcatttatcctcctgcctcggcctctcaaggtgctgcggttgtaggtgtaagccaccacacctagtccaggcttttaattttgtatcggcaaaacg

SEQ ID NO: 560910 - DNA, 208 bp, Homo sapiens
agaggatcccggcgcaggtgctatgatgcatgaggactctatcttacattatggctgggaatcttactctttcatgtgcctatgatatatttgaatcaaaatgtggtagttggtatttcagatagctaacttttaacttttttgctctccacattatagatctagagaggcaattatcaatttaggagaagccaacaaacttctaata

SEQ ID NO: 560911 - DNA, 472 bp, Homo sapiens
  misc_feature (13)..(13): n is a, c, g, or t
  misc_feature (75)..(75): n is a, c, g, or t
  misc_feature (77)..(77): n is a, c, g, or t
  misc_feature (111)..(111): n is a, c, g, or t
  misc_feature (170)..(170): n is a, c, g, or t
  misc_feature (270)..(270): n is a, c, g, or t
  misc_feature (359)..(359): n is a, c, g, or t
  misc_feature (370)..(370): n is a, c, g, or t
  misc_feature (399)..(399): n is a, c, g, or t
  misc_feature (445)..(445): n is a, c, g, or t
acaaaggccagtntgggaccgggggaggagggagggaaagcacaaagacatcttctctggactgcttgggacccntncccacttggagcaaactctgttcctcttgccgtnatattctcagccatggggtcggtcctccaagcagcggggccaagtaggagaagaaaaanatagaaatagaacctcctctagtactctgacagaaaaatgtccaattacagatcaaggacatcattgccaccctcacctctccttcctcaaagaaaactntctggcctagagggaaaaagtaaagaactgaaaagccaggggctcaggaggaaaaaaaccctctactatacacacaggcgtaagggganaaaagggtgcnagtaacagccctaacaacttcagaaaggnaacccacattaccactaggttacacagcatccagagccccaagggncctaactctcccagatataaattcctg

SEQ ID NO: 560912 - DNA, 975 bp, Homo sapiens
  misc_feature (198)..(198): n is a, c, g, or t
gaaagagaggatagagagaagcaccggccagaagaggaggggagaagtgccccagaaaaaatcatccagtctctgaagctttgcccaggtgggtcaacaggccagccagactctcctcctggttgcccagtctggctggaggctgtcattgtaatccttccgctccgagcatgcttaggaggtgtcgcagatgtgctngatgccctcttctttgaaaaacctgtttgcagcaaaatgcctcgggggtttttatgcaccttcacacctcacactaggccaaaaaggggcccaatagagaccaagacatgcatgtcgtcgacgacgaacagtagactctttgggtgtcccaattccatgacccgatcgtcctggatcatctcgtgaggggcttcattggaacccccgctggtctggattgctcctgttgggaagtctccaggctgcttcatttgcgtcgcattgaaagactccacgggtcctctcgttgtacccgtgggaaactttccaaaacgtcctccttttgctctgtggaaccttgagtagttctcacgggccttgtgtgctgccatggaaaactcgcggcgtcctgtgtcgcatgcatgtggctaatgccagaatccttgtggttctgttggtcctcaagggtgtggtgtgtctctggtggaactcggggtctgcatgctccatggaaaagcgcctgtgtgtacttgatcgcctagaccattaagtaaatcttatttagttcctggccttactgtacacattgtggaggttgtatggcccacatgtcgttgggtcatgccgggtcttcagcgggcgagcatgggtcgcggggaggcggtgtcccttcgcgatctggttttccactacggggcagggagtctggggggccggggcggtcttgggcggggcgcgcgggcacggccagggcctggggtcccgggggcaggcgggtgtttgtgccacagatggcca

SEQ ID NO: 560913 - DNA, 131 bp, Homo sapiens
  misc_feature (27)..(28): n is a, c, g, or t
  misc_feature (95)..(96): n is a, c, g, or t
tatacattaactgcccatagagttgcnnatgagaggagaccaggtaatttacctaaattgtactaaattgctacatacacaaaacccgtgccgannttgttttaactatgttttgtccccttcttattttt

SEQ ID NO: 560914 - DNA, 533 bp, Homo sapiens
ggttcgacgcaaaaccccaatctgcatcaactgaacggcaatcaaccaatttaattaagctaagcccttaattgaccaatgggacttaaaccccagaaccattagttaaagacttaaggccctaatcaactgtgtttaatctaattctcccgccgccgggaaaaaaggcgggagaaaaccccggcaagtttataaaccgcttctccgcaatttgcgattcacaatgtgaattatcacctcggagctggtaaaaggaggctaaacccctgtctataagattaacagacaagtgcctctctgacattttatcccacccccccaaaaaaaaaaaaaaaaaaaaaaaatttttgcccaccaagggtggggacttaaaaaaattttacgcggcggcgagttttttaggtgtatatagcccaccggagtttttcgggggggattttgagggggaaaagcattttccccaaggagggctcttaaaaaagttggggaaagagggagaaatgttttccggggaaaatttatccccccacaca

SEQ ID NO: 560915 - DNA, 153 bp, Homo sapiens
taccgggtcctggaaaacacgctgacggagagtgaggcctgctacagctccagcttgcccagatgcatgtgcatgatcaccaattgttgatggcccagctggctgagatctgggctgacctggagcggcagaaccaggagtaccagtgtgctt

SEQ ID NO: 560916 - DNA, 376 bp, Homo sapiens
attcttctctatacgaagtatgctctctcttctgggaagagaaatttctgggcaaacaccattttgagaaagaaattcagatatgggaaagctacagatcatggggagcaggaggctttaagaaacctggcttgtgcatgtggtttacacatgttgaaaagtctgacagattactgaagccaagagcatagaagatagaacaatactcagatttgaattacagctgagttacccacttgggacgtcagttttagattggagctggtatgagggaatagggccaaaatactgaaatcttgggtaatcaaaagctaaaataagattcatggatttatgaattgtgttttattttgaataaatgcttatcttaacttcc

SEQ ID NO: 560917 - DNA, 389 bp, Homo sapiens
  misc_feature (13)..(13): n is a, c, g, or t
  misc_feature (57)..(57): n is a, c, g, or t
  misc_feature (111)..(111): n is a, c, g, or t
  misc_feature (123)..(123): n is a, c, g, or t
  misc_feature (184)..(184): n is a, c, g, or t
  misc_feature (293)..(293): n is a, c, g, or t
aaaagtgaacggnagccccgggacttcaatggggcttaaagaagcccttcccgcctnagcctctcccagtagctggggctacagggtacacgtcacccatgcccggctaanattttttttaantttggtttttgtagagatgaggtcttccctatgttgccccacactgttctctaactcaagnagtcctcttgtctcagccttctaaaatgttggcattacaggcgtgagccatcgtgtccagtccctaaaaacacttttggttcctcctagataacatgtttttacaagcnccagggtgattaggttcgtattcatttttatctttatattgaaaggttatttgaacctttaataattccatattaaagaattacttaattctttaa

SEQ ID NO: 560918 - DNA, 451 bp, Homo sapiens
cgctcggcctactttcgttagaagaaactacatcagcttaatggctgcaaacagccagctagcatcataatgacaggatcaaattcacatataacaatattagccttaaatgtaaatgggctaaatgccccagttaaaagacacagactggcaaattggataaagagtcaagacccatcagtgtgctgtacccaggagacccatctcatgtacaaagacacacataggctcaaaataaagggatggaggaagatctaccaagcaaatggaaagtaaaaaaaagcaggggttgcaatcctggtctctgataaaacagactttaaactaacaaagatcaaaagagacaaagaagggcattacataatggtaaagggatcaattcaacaagaagagctaactatgctaaatatatatgcacccaatacaggagcacccagattcgtaaagcaag

SEQ ID NO: 560919 - DNA, 287 bp, Homo sapiens
  misc_feature (181)..(181): n is a, c, g, or t
gaggtgatgggagatcacatatctataaattgagggatggtcagtgttgctggcaaccaccagaagctgggaaggggcaaggaaggatcctctcctagaggctacagagagagcctggccctgccaacaccttgatttcagaattctagcctcagcctgggtgcagtggctcacgcctgtnatcccaccactttgggaggccgaggcaggtggatcacttgaggtcagtagtttgagaccagcctgaccaacatggtgaaacccccatctctactgaaaaaaaaaaa

SEQ ID NO: 560920 - DNA, 800 bp, Homo sapiens
  misc_feature (101)..(101): n is a, c, g, or t
gaaactgatagcaaccgtcctgcgcgcgaccgacgaatgaccgtctaactacatccaatgtctccagtaaacatggcgtgtcactgacagctaggagtgcncatggcctcagtgtgacataatgtgtccgtttattgcagcagcctactgataactataatacctggacgtctactggtatgcgatatagtaataaatccagatgcgaagttctgatagtcgtgttctgaattctgagtcttcatggaggctcatgtgagtcacggcacatcaggatacttcccttgtccgtgcttttgtggaaagggcaagtaccactaatagggtgtatctcagaaactgaattgccaatacacgggacaacataggacttttcttgtcctgagtttttgaacgattgttcttgattcccttgattcccaggagagattctctgacattcacgtgtcagccactttggcacggaagcattacagtgtggggaaccaaaacttcgtgtctcctctttccccgatgccatcagcatagacttgacttcctttaaaccgagagtttgatgtggccttggaaacctaaaatcagctgtgttaggtaacaaaactcaggctatctgttgatgacatcgagatggtgtcacttaaaagagccaagattcctgtttccagtttgtggattcatcctgactggttttactttaagtcctccatgtcaaagtggagactgagaaaaggtcatacattgcctcatgtgaagtgtccaacctctctgaaaatcttccttgttcaaaacagaaacgaata

SEQ ID NO: 560921 - DNA, 265 bp, Homo sapiens
  misc_feature (77)..(77): n is a, c, g, or t
  misc_feature (86)..(86): n is a, c, g, or t
  misc_feature (88)..(91): n is a, c, g, or t
  misc_feature (93)..(95): n is a, c, g, or t
  misc_feature (133)..(133): n is a, c, g, or t
  misc_feature (141)..(141): n is a, c, g, or t
  misc_feature (152)..(152): n is a, c, g, or t
  misc_feature (168)..(168): n is a, c, g, or t
  misc_feature (212)..(213): n is a, c, g, or t
  misc_feature (219)..(220): n is a, c, g, or t
  misc_feature (239)..(240): n is a, c, g, or t
  misc_feature (242)..(242): n is a, c, g, or t
  misc_feature (264)..(264): n is a, c, g, or t
gaaggggctggcctagggccaggttcatcataccgttagccctgcagccccatgcctgtgtgtcctggtttaccagnacaaatagnannnncnnnaggatgtggcgcctgtaggacttgcttctcagcggctncaagcagnatctctgtctnggaaggtgggaggtgnagccagtctagtacctgaagaccctaaaaaaaaggaactaaggnnggcctnnctcagccttagcccttcgnnangcccaagggtgggggaggaaana

SEQ ID NO: 560922 - DNA, 338 bp, Homo sapiens
atttgtggacacatagtatacgtgggagggaaggaggaaggtgagcagaaaacccaaagccagggccggagcgcagtggctcacacctgcaatcccagcactctgggaggccgaggcaggcggatcacttaatgtcaggagttcgagactagcctggccaacatggggaaacccagtctctaatacgaatacaaaaattagctgggcatggcggcaggcacctgtaatcccatctacttgaaggctgaagcatgagaattgcttgaacctgggaggcggaggttccagtgagctgagatcgcaccactgcactccagcctgggctacagagcaagact

SEQ ID NO: 560923 - DNA, 284 bp, Homo sapiens
  misc_feature (38)..(38): n is a, c, g, or t
  misc_feature (238)..(238): n is a, c, g, or t
tccaagcaaaatcccaaggtaaaatatccaacgcacgngcgcagttgtccaatcaaaatgacaagaaactaaactttctattgcatattatgctttgggatttaaaacacaatatctaaaacttaatctccctaactgaacaaaatgtaacacttaattaaattataaacaccacgtttatgtattttcacaagaagcagggcgagggtatggcgtgaagaaagctggagcatgccanacatctcagtgttattcccttttacttaaacatagaagggcattaa

SEQ ID NO: 560924 - DNA, 651 bp, Homo sapiens
agatctctctcttgggcttttcatcatctttttgaatgagcggctctcttaagccaataagatagaaatatataccctgttgaccttgtggcttttcttttctgttaaagaagcattcaggcagataccagatatatgaggcgcgcctttcagatgctcatctttttcactcatcacttttgccctcctaccctcaggagccaggtcattcttcgtaggtgagctgtgtaaaatctattttatagacgtatataaggagaaaataatttatttctgcaggcttcataatgtcatgccagtatgctagctgaaaacataatggcttttttttttttttttgaggagaaactttctggttttttagcaaaagagactgaccatgtgtaaacattctttaaactcgtttctcacttgtggtttactgtgtggagggctaaattttaaaaagtaatataatgttataacacattgcttattaccaagcaagttttaaaattgacacaagtttatgtaatgggtggcttaatgggtttaaccgggaaaacaggtttggagacagtatttacttttgtttgctggaatgggaggaggcctataaaaagaaaacttcgaagcttctttttttaaaaagaaatgagaggtttctgtggt

SEQ ID NO: 560925 - DNA, 248 bp, Homo sapiens
  misc_feature (71)..(71): n is a, c, g, or t
  misc_feature (77)..(77): n is a, c, g, or t
  misc_feature (238)..(238): n is a, c, g, or t
cgaatcgtaaccgttcgccatgcgtaaccgttcgtacgagaatcgctgtcctctccttgcggccgagaggntcatanagcgccattgccgcgcgacgccgggcgtcgtcccgatgtggggccaggaaggcgacttcctggcttccgtggacgggatgcgcgtatgggtggaggtcgaaagcggctacggcggcctaaccacggtgcatttccagttccacgccgtggaccttgatacncctgaaacct

SEQ ID NO: 560926 - DNA, 208 bp, Homo sapiens
ccttttggggttttttaaaaaaaaggggggagattcccttcgggggccctccagaccacggattgttttgtttttccccaccccgggtccccccccttttggggccggggttttttttggggcccccctattttgcgtttttttgaattttttcccccctgggggggggggggggggggccccccccttttttatttttttgggggga

SEQ ID NO: 560927 - DNA, 571 bp, Homo sapiens
cccggcccgccaacgctgcgccgggatgctccagaccttgtatgattacttctggtgggaacgtctgtggctgcctgtgaacttgacctgggccgatctagaagaccgagatggacgtgtctacgccaaagcctcagatcttctataatcactgcttgccccctgtgccttgcttctatccttcatcagtatcgataactatctttagagcttgtactgtggctacaccactggctgccctcttgaacataaaggagaaaactcggctgcgggcacctcccaactgccaccttggaacatttctaccttgaccatgtggcaatgcatgcccaatgcaggtggaagtagagcttttgtcccggcatgagccgggctctctggccgccaaggtagagcgtaggttcctgtctgcctgccgcaaccagtggaccctggcccagtctcctcaagaagttccgatgaatcccagctggatgattcacatttttacctgattgccttcatttgcctggctatgtcctgtccattgtgcattaaaccctggttctatgacattgaagaacagttctgg

SEQ ID NO: 560928 - DNA, 1689 bp, Homo sapiens
  misc_feature (1410)..(1410): n is a, c, g, or t
ggagagaactagtctcgagttttttttattttatttaatttttgggaaacagggtcgtgctctgtcccccaggctgggatgtggcagtgggcacagatcaagggtctcactggcgaacctcagattttcagggtctcaaagggatcctcccaatctcatgctctcccggtgtagctggggaccacatgtgtgcgggccaccacaccatggctaattaggggtatttttgtggcataagcacgcggggtctccactattgtttggtccaggttgggtcctcaaaactcctgggggctcaaaagcagatatctcctggcgctcagagactcccaaagagtggctggggataacaggggttgtacataccacccatgtgttttgtgggccaatatatcccacacagagatttggtagccaaataatgaaccatacttatatataccttccagtctaccacgcccggggctattaaagaaaaattccacctcttaaacagctctgaggaagaactatccaaaaaagctatgagggcaaccttttgccattaaggggataacccaatggtgcccacaacatgtgtgatgggtatgggattcccctataaccaacagtgcgaccaggagtagaagtgggacacccgtggagtaggggccccaaaacagctgtagtgtgtgagccagcgcgggggagcaccacaaaaagcaagagagacactcccacgcggagagtaaccaccgggggaggtgttgcacccagaacaggccatgaggttatcagcttggtcgaaccaccacaaccctcaatagtggcacctgagcagaagcacaagacacttagcgagaagggcgcaggaccgctatgtttgaggccaacaaacttcacatgtgagtgcttatgagccacaagaacaactccacagcaggggggtccccccaacaaagcagaaaaaacacctctgaataaaagagtccaaaaggaggccacgttgtatgggcaaaaaaaacaagaggcccgtagtgaaacagggcaccacaagcgaagttccggaagacaaagaatacgcccggggggactcccaaagggcaccagaggcacacacacccaaattgaccgccactggtgtgccaacacctgcgcgcgttatcagttgcaagccgcacaacagagggtaattattcacgggcgcattaaaacacaacgggagaggacccaacaaacaaacagccggggaggacgagaaggaaaagggcagaggaagatacagaagagatggtgcaaagggagtaacacaaacacagacagcgaccaaacaagcaatagcaagcagaaagagcaaacacacgcacaaccaacaaagcagtaggaaaaaacaacaccaacgagcgaacaatcaaatgaacccacacacanacgatagaggacaggatcacagctcatcgacgatcgcaaagaaaacacacacaggcagaaacagacgatcgagacagaccaggtacgatataatacaaacgagcgtagagaaacaatgagtgaaggaaaacaacgacaacacactgtctgttacatcctatctgctctcttcttctcttcgtccgtctctctcttctttgctcttcttattattagatctacaagacaccccacacaagcacacaagaacagaccagaagcaaagaaagacaccacggg

SEQ ID NO: 560929 - DNA, 305 bp, Homo sapiens
gcagagtccacacaggcctgaagccctatgcctgtacccagtgcaggaagagtttccacaccagggggaattgtattctgcatggcaaaatccacacaggagagacaccctatctgtgcggccagtgtggaaaagcttcacccagagagggagtctggctgtgcaccagcgaacgcttcacagaggctcacctttgaccactttcctgagagagtctcttatgattagagtacacatctctgagatgagcacctatcagtctatggatgatgagatcttcagaagccatattggtaggcaactga

SEQ ID NO: 560930 - DNA, 134 bp, Homo sapiens
tctagaggatcttaccgcgtacagttgcgcaaggcaagatgctcatgactgtgcgcatgtcaagcatgcttcgagatcatacacctgctcacaggcgagaaccctctgcaggttcctgggtgaacgccatcatc

SEQ ID NO: 560931 - DNA, 433 bp, Homo sapiens
cgttgtctcaaaaaaaaaaggtttttctctctgaattactcctgttaactgaaaaaacaagatcacagcctagaaggaaaatatttgcttgtctcacatttatgataacgggagttgtttctatggtatttcagaaacccccaaaattcaacaagagaacaacccagtttttaaagtagacagaagatattaacagacaccaccccagagataatccacagatggcaaggaagcctgtgaagatgctcagtgccattttcatcaggaacctgcaagttgaagccaccgtgaagatgccgtgatacccacccgtgctagaacagccgaaataccagcaccgtgaaaggctggagagggtccagagcagcagagactccccttcactgctagggatgagggagaatgatacagcctaggggggaatctgaggatc

SEQ ID NO: 560932 - DNA, 444 bp, Homo sapiens
acaacaccgcggtgacgggcttcttaattagcacccttctgcctgatacttttttttcgttttgttttgtttttttgagacgcagttttgctcttgtcatccaggctggagagcagtggcacaatcttggctcagtgcagacctccacctcccaggttcaagcgattctcctgcctcagcctcccaagttgctgggattatagatgcccaccaccacgcccagctaatttctgtatttttagtagtgatgaggtttcaccgtgttggccaggttggtcttgaactcctgacctaaggtgatccactgcctcgacctcccaaagtgctgggattacaagcatgagccaccgcacccagcctgctatgtttttatttttaaagaatacaaaaaaattgctgagaagaggaaaacacgtgtgcaaatgtctttaaagtctagcctta

SEQ ID NO: 560933 - DNA, 234 bp, Homo sapiens
ggctcagcctcgcagtagctgggattacaggaacatgccaccagcccagctaatttgggtatcaactgcagacgagggttggccacgtggccaggctgatctcgacctcctgacctcaagtagtctgcctgccttggcctcccacagggctgggattacaggcgtgagctaccatgcctggcctatttttttattttttgtagagatgagggtctcactgtgttgactaactct

SEQ ID NO: 560934 - DNA, 844 bp, Homo sapiens
  misc_feature (844)..(844): n is a, c, g, or t
taaagagcgaaaacccgtgtaaatgatgtcgtggtggttgagggataggatggaaaatgtgtgggataggtgtatgaacatgaggtgtgtgtatctcgtgtgaatgatgtggttaatgtggtaaatgtgtggctgggttgaagtgagccccaataggaggtgtgatgggaaaaatatgtacagaggtgctgatatacggtgcttgtagacctacgtatagtagcagacgtcctgataagatcgtgacagacgctgactacttgtgactcactggacgaacggttggtctactacgcaacacgatgatgttctcccactgtagtgttaactaacgttgggggtgataactgtgctgacggttcactgcccatgggtctatgaccacccaacgctacaattcaacacacactcgctatacaacgtgggtgagaagtccagaccgttcacgaaaccgatctcttgtagcaaagacgagacattcattgactcgacagaacctcgatcgaagttgcggtcacagctaagtcttaggaccttcagggcatacgagaacgaactcagctaactgcgcagcgccttggtacaagatcacccgattgagtgacgacatctcaactcgacacacactagaccaggcgagccaagggcatgacaccgcccaccaacgagggagagtacagacactagaaccaatgaggggacgcgcacaaccaacacaggagcgcacacacagctgagcacagcatccgacacaccccatccgcacgagacagcaacaaaccaaaagagcaccagggccaacggcaccaacccgcacaatcggaccccacccgtaccaacacan

SEQ ID NO: 560935 - DNA, 108 bp, Homo sapiens
agagaggcggaaaaatctctactttgtctcagtttcactttcagtccacaatactttttccatgcggccagaattatttgaaatcaacgcattggcagcctctagaat

SEQ ID NO: 560936 - DNA, 112 bp, Homo sapiens
gttgacaatcgtctttaaaaccttgcgtgggcaaatccttgacggaacgccgtgattgccaagggaagacaagggcgacctctgcagttccactactttcctaagatcatat

SEQ ID NO: 560937 - DNA, 118 bp, Homo sapiens
ctagttttagaagtttcaatagcacggaaactgaattatgagcagcaagatctggaacccgtaagttaaagtgtggagtcaataaagcgactcggcattatcgaactggggcaccact

SEQ ID NO: 560938 - DNA, 178 bp, Homo sapiens
acctcagtgtattccttgctcccttcctgggaggaaatgaccaaaatcagtgttagccttctctgcttggtaaaaggttttttccccaacgacttttccgtggagtgggaaaacaacgggcagccggggaacaaaataaaaccccacgccttccatggtggattccgaggggtccttt

SEQ ID NO: 560939 - DNA, 172 bp, Homo sapiens
gctgtacagttgcggtccatgttaacaccccgttgtgctgcttcttcacgaagggcagggtggcgcaggtggcggcaatccccgccgtctgtggcccgtcagctgtgtggttgcactcgtgggtcacatgtatctcatcccgcaatcttgcttgatgtcacatgttggccat

SEQ ID NO: 560940 - DNA, 121 bp, Homo sapiens
tatagaagtcgagccgtgacctacaacttcttaagtcagtacacacacacaagcataatatttcacacaaagtatttcttgtccatcaaagaataatcgatcgacaaatattcattaaata

SEQ ID NO: 560941 - DNA, 464 bp, Homo sapiens
cgagggcacgatggcgcgccactgctgcctctacttcatccccgcacgaccactccctcaggccctgacatcgagtttatggaacgcctgagccaaggtggtcaacatcgtcccttcatcgccaaggggacacactcaccctggaggagagggtccacttcaaacagcggatcaccgtagacctgctgtccaacgtcatcgacgtgtaccccgcagaagaatttgatgaggactcggaggaaccggctgttgaacgagaagttccgggagatgatcccatttgctgtggtgggcaggtgaccccaagtaccaggtcaacgggcagagggatcccttgggaggaagaccaaagtggggtaccatcgaaaagtttgaaaacaccacacactgtgagtttgcctacctgcgggaccttctcatcaggacgcacatccggaacatcaaggacgcgccatcgtgcggtt

SEQ ID NO: 560942 - DNA, 312 bp, Homo sapiens
ctcccttattgcggtgtcttatcaagaagatacgtgtccaaatagccaaggcacaggaatgggctccagacacccctcccttccagagcaatgttgaaggaaaaaaaaaaaaagagacagattctttaactgtaactctttggcaagtcttcttaagctttattatgtttaacaaatgtctgtattaagccagttctggttttcctttcaatgcagctacaaggacactggctatgcaaggtcataaattatgttatgctatagattacatgacctgtcactgtatgattaactgctttggttgggcatctg

SEQ ID NO: 560943 - DNA, 116 bp, Homo sapiens
gtatgctttaagtatattagtaacaaaatggcattaatttggatgccactgatttgtgaatttggtcatctggaaaaggagtaggctctagtttacttttccattatttgagctaa

SEQ ID NO: 560944 - DNA, 499 bp, Homo sapiens
  misc_feature (79)..(79): n is a, c, g, or t
cagttgaacattgaacagcatgggtttaaactgtgcatattcacttatacatgattttttttcctgcctctgccacccntgagttagcaagaccattccctcctcttcctcttcaacctactcagtgtgaaggctatgaggatgaagacttttatgatgatccacttccacttaatgaacagtcaatatatattttatcttcctcatgattttcttagtaacattttatttcccctagcttactttattataaggatacaatatataatacataaaacatacaaaatgtgtgttaattgactgtttatgttattgctaaggctctgatcaacagtaggctgttagaacttaagttatggaggagttaaaggtatacacagattttctactacacaggaagttggcattcctaatccctgtattgttcaagggttaattgtaatttcagttttgcagagaagctgccaagtaatacagtctataaaggaaagagtgaaag

SEQ ID NO: 560945 - DNA, 700 bp, Homo sapiens
aattctcctgcctcaacctcccgagtagctaggactacaggtgtgcaccactatgcctggcaaatttttgtatttttagtggagacggggtttcacctattggccaggctgggctgaacctcctggcctcaagttatctgcccgtcttggcctcccaaagtgctggtgtgagccacggcgcctcacccctcctaccttgctctacttttcgagctgctttggctattcttggcccttatgcatttccatataacatttcagaggacacgaagtggacaattctgggaagcacattgacaacttttacatcactctctaattcatgaataaggtatatactctctcagctcaatcccacgcgttcacacagtctctcctcaccctgtcttcactcacgttcccctcgctggagcacggtatcaagcactgctcactctctcagctcacacgacgacctactggttacgctcgacctaatcctcctacaacacacctacacgaccgctcacacaattaaacgtcataaccctacacaacagcttaccaacttaatccccactgcaatattcagtcccagtggtcacacaactcttcccagcttattctccatcacaatctacacgcccagctatccacgatcccacaagtagtaccaacccacacggcatcggccgactaggtctcccctcaaactagaatc

SEQ ID NO: 560946 - DNA, 356 bp, Homo sapiens
tgcgatcactgctacacactggtggcactgcgcaaatgaagaccccaccagctgtattctgcacattcacggtgcgatatgaagttcactgtcaaggactgtgatcccaccactggggagactgatgacgaacgctataaggataagtgtgtgctgaaagatctggaagttactgtagctgatcacattcaaaaggtcatgaaactgaacttcgaggcagcctgggcatgaggtaggggatgaatttgacgaaggaggaaacgttcaccttgtctaccatcaagacacttaaagaggctgtgggtaatatcgtgaagttcttgggaatgcacccttgtgagaggtcagacaaagtg

SEQ ID NO: 560947 - DNA, 229 bp, Homo sapiens
cattactcatacggttgtgtatgattggagagcccctctgtgaaaactccggtactttctggtgacctacttagttccgtggctccattgtgaggggattaatttctgccgatcagaacccatccctaaaacgtcagatgatagtggctttgacctagggaagaagaggttgagcgaagaaaccacaccaggtatggtttgagagtctttagtgagggtcaattggacg

SEQ ID NO: 560948 - DNA, 147 bp, Homo sapiens
  misc_feature (123)..(123): n is a, c, g, or t
cgccgaatggatcggataacccgcggagtagaaattgaagttcgcgccgaacacggagtagtcctcaccgaggccgtcggtcagcgcggattcgcgaccgggctcaccccacgtgtcgatgangcccccgggtgcgccgaagatgta

SEQ ID NO: 560949 - DNA, 503 bp, Homo sapiens
taaattcgctttcgcgtcgacagaaaagaaaaagatagtgcaggataatgggaattgagaatgctcggttagggggccaggttttagtctatgctgtttagaagagttcattgagaagatagcatctgaaaaggtgacaaattatcacttgtcctataattatgactaccaattagttgctaagaaaatgtcaggctctgaaaattaagaaaatatggatcagcctgagtgtgatggctcacccctgtaattccaacactttgagaggtaggaggataggttgagcccaggatgtcaagaccagcctgggtaacataccgagaccctgtttctacaaaaaataaaaaaaattagcctggcatggcacttagctgtggtctcagccacttaggaggctgaagcaggagggtcgcttgagcccaggaggtcaaggctgctgcgagccatgttagtatcactgcattccagcctgggcaacagaatcttttttaagactgtcttta

SEQ ID NO: 560950 - DNA, 128 bp, Homo sapiens
atggacacctgggctgattccctcatgcctcccaagattgaatcaggaagaaatcagatccagaacagactcatttcatgacaagttatgaaattgaatcagtaatttacaaaaacctatcaatcaaa

SEQ ID NO: 560951 - DNA, 495 bp, Homo sapiens
caggacggggctgaggccctgcgtggagatgctgcaccagcggaaggctgagacccgggttaccttagttcatctgtcactcgtaataaaaagaattctctcaggtcagaaaaaaaaaaaaaaaaaaaaaaaaaaaaaaaaaaaaaaaaaaaaaaaaaaaaaaagaaaaaaaaaaaaaaaaaaaaaaatgaaaaaggaaaaacaaaaataacgagaaacagcaaggacgcaaacagcagaggagcaacgcgatcgagtatgtacgcagagagagatctactcaagtccaccagacagtatcgcaatagacaaagtagaaaggcaaacatgcagagcatgagcaaataagagtaaataaaaaggagaagaaagcggcgacaatattagtaagaaaagacaaaagagagaaatgatgaatgtgagacaaaacatatagagcaagcaaaacagctaaaagaacaaggataaccacgtcgcgaaaaaaaataaattagt

SEQ ID NO: 560952 - DNA, 507 bp, Homo sapiens
aagatactggggaaggcagatgctggatttgctagacaaagactttgaaacaactgacttaaatatgctcaaaaacttaaataaaaacacaggccgggcaccgtagctcacacctgtaatcccagcacttggggaggccgagatgggcagatcacctgaggtgaggagtttgagaccagcctggccaacacggtgaaaccccatctctactaaaaatacaaaaaaaatgccaggcacggtggttcacacctataatcccagcacttcgggaggctgagacaggcggatcacctgaggttaggagttccagacccgcctgaccaacatggagaaaccccatctccactaaatatacaaaattacctgggcatggtggcgcatgcctgtaatcccagctactcgggaggctgaggcgggagaatcgcttgaacccgggaggcggaggatgcagtgagccgagatcatgccaatgcactccagcctggtcaacaagagggaaacttcatc

SEQ ID NO: 560953 - DNA, 782 bp, Homo sapiens
ctaaaacgctgctaggagctcttcctcctgatgatccataaaccacagaaccatgttattaaagaagtcttggattatgaatcaaatacaatgtatggaccttgtttggattctgttttgaacaagccaattgtaaaaataacaataattcccttgataatagggaaatgtagacatggtatggacttttgataatattaaggaattggtaaattttgatagtgtaatcatggtattgtaattatatttttctttttttaaagaaggccctgtctttttagaaatacatgttgaaattatgggtaaaatgctatattgattgcttgaaaataattggcgctgaaaagtagttgatgatagaggtaaaagagattggccatgtattaacaattgtgaagaaagctagtgattagtacacatggtattcatttatctgtattaaatctttctaccttttctatgtttatggaaaattacctttcaaaatgtaaacatatatgttttggtaaacataatatatataattccaaaatagctttattgaattaaattgtaagtcactcttagtaatttacactgtttttttgtaatataacagttattgaaataatactaatttcaaaacaatgttgtatgcaaggtaaaggcaggacttaaatgttaagtttaattgacttaggtctttccacaaaaaggatttaaaggaattaaagttcaatttcaaagtttgtacaattaaccccgtaaaacttttagggaaagaccttattgtagtttatttt

SEQ ID NO: 560954 - DNA, 332 bp, Homo sapiens
tgtaatccactcttgggcatctatccggtacaaaactctacttaaaagagacacatgcacccgcgtgtacattgccgccctattcacaatagccaggacatggaaacaatccaaatgtccatcgacagatgattggattcggaagaggtggtatatatacacaatggaatactactcagccacaaaaaaggatgacataatgccattagcaagcaacatggatagaactaaagaatctcatcctgagtgcaatgagccagataagaccaagacaaataccatatgatatcacttataactggaatctaatatccagcacaaatgaacatctc

SEQ ID NO: 560955 - DNA, 121 bp, Homo sapiens
  misc_feature (20)..(20): n is a, c, g, or t
  misc_feature (74)..(74): n is a, c, g, or t
gtgtctagaggatcccaggnactgcgagacgagagctagcagacgcacttagttgcttatagtcttcctgctgnaggaggaggtggtggtgtacttgatggtgggaacttgccggcctcca

SEQ ID NO: 560956 - DNA, 691 bp, Homo sapiens
atgatacaaaaagtactggcctgtgcagaaacaataatatacacagatcttaccaaaatagataacttagatcaaatcactataaagttatgaagaacactatgaagagagcgacaaggccatctacagaatgggagagcatatttacaaattatagtgtctgataaggtattaatatccagaatctataaatgactcctaaaattcaacaagaacatcaacatccattcagataaaacctctcaacaaactgatcataaaagagaacatcctaaaaactgataagacacatgtataagtagtatacaactaataacataatacatagtgacagtctgaattacttcctcctaacatcaagacccagactagcgtgtgtggttacaccactaaggtcaacattgtattggaacttgcatcaagtgcaataaagaaaaaaaaggaaagataacgaagaaaagagtataaataaaaagaaataagacatctagcatgaaagagaagtaaaactatatatggataggtagaatgatatattttccttagggtatatacccagcagggggatagctgggtctaacagtagctctgttttaggttcttatagaaaacttcagaatgttactacatggctgaaatatttaatttctaccacagtgtaattgtccattatctgagctcatagtttgta

SEQ ID NO: 560957 - DNA, 302 bp, Homo sapiens
  misc_feature (268)..(269): n is a, c, g, or t
gcttaagcctggaattccaacactttgggaggcccaggcgggcggatcacgagatcaagagatcgagaccaccctggccaacatggggaaaccccgtctctactaaaaagacaaaaattagctgggcgtggtggcgtgcgcctataggagtgccagctactcgggaggcagaggcaggagaaccgcttgaacccgggaggtggaggttgcagtgagccgagatcacgccactgtactccaggctggtgacagcgagagtctgtctccnnaaaaaagtcgtattacttcctggccgtcgtttt

SEQ ID NO: 560958 - DNA, 552 bp, Homo sapiens
  misc_feature (278)..(278): n is a, c, g, or t
gaccacctgtgtgaaaagcatgaggtaagacagcgcctcacctgcatgagaacatacatggagcctcagggacgacttcatttttaccctgagggaactgagggccaggaggattccaagtagaggaaggatatagggtctccctctgtctccccggctggagtgcactgacaggatcacagctcacttcagcctcaaattcccgggttcaagcaatcctcccacctcagcctcccgagtagctgggactacaggtgtcaccatgcccagccaatgtntctattttttgtagagacggggtctatgttgcccaggctggtctccaaactctgggctcaagtgatcctcccgcctggatcccaaagagctgagattgtggggccgagcccactaagtgggccatgcttctcctttatttgcttcctgctgaaaggccagctcctcccagagcagaagtttctggtaactttgctcagggccatggtcccaggcacacaagtaaaagtactcagggaacatttttaatgaacgaacaacaccttaatgtttaag

SEQ ID NO: 560959 - DNA, 197 bp, Homo sapiens
ctgccagtatattgtggtggagaaaaaggacccaaaaaaaacctgttttgtcagtgaaaggataatttaatgtgcttttagtaggcacagggctcccagggcaggcctcattttcctttggcctctaaaagtcaaagattgtggaaccatgcccatcagtaaaaaaattttttagccaaccctttgaaaaaaaaaaa

SEQ ID NO: 560960 - DNA, 1045 bp, Homo sapiens
gacatgctcacagaactcgcaaactttgagcaagaacgtgagccaagctatccacaagtacaatgcttacagcaacaagccagcatctgttatagcaaaatacctacacaaaataaagcagtggcagctgcaagctaaagcaaattggcctggcagtcaggtaaccaaacacattagctgcacacacagcattgcatgcagttatttcagccaactgggccaacattcacgtaaactgggcacacacagccattcgagccaggcatgcaatcacgcaagttcatccaatcacagtttaccatgcactcgagtatacgtggcatttggtccaatctgcatgaaaaggagaagatatatgtagacatagaacggaaatttaaaacacctagacaaggactacaacagattggatttccaatgcccaagtacacacgggtacaccatgaacctgggacactggaggtcaccattttaggaaccttacatactggggactggtttactgaacccaactatctatacagtttaacaacatcactgcacgactactcagaacacacaactgaccgactaccaatttgaaaagcatacaatacgccgacatatggagcctgaaaactactatggggggaccttttggaataaagagaaattacctcgtatgaaaaacagaatggttacaaaatgcaaagaatatgggtacctaaaaattgaagtttaacaaacaggtggatttctagaaatacaattgataacaagataatgtgaggaagatatacaaacggaggttgagagtccaagatgtggtgtgacatggaatgtgtcatccataaagacaaattccgaagatttcaactttcagacattatgacaacaaaggccaaacactgtttacccttcaagaatgatggacgccgattccaaacacggttcaaattgtattaccagaatatccatgtttccaaaggggtaaaacacaagtcaacagagatgttatgcccgaatcccaagaaaaaatgtgtgtatgcaaatatttcacacacaa

SEQ ID NO: 560961 - DNA, 259 bp, Homo sapiens
aatgcaccaatcagtgctctgtaaaaacacaccaatcagtgctctgtagctagctagaggtttgtaaaatggaacgatcagcactctgttaaatggaccaatcagcaggacatgggtggggacaaataagggaataaaagctggccacccccctgcccccccgccccgtagccagcagtggcaacctgctagggttcctttccatgctgtggaagctttgtaattttcctcttcccaataaatcttgaagctactcaaa

SEQ ID NO: 560962 - DNA, 183 bp, Homo sapiens
ctcttggcttacgagaggagtcccgaggcggcgggcgaggggcgaacgaaccggacgccaaagatgggcgaagtaaaagagattgttcgaaagatacttgtgggagggaagcgtgtccatcaaatgaaagaattattaagattctgggaaagaaggaaatacgaccggttttcttaattttga

SEQ ID NO: 560963 - DNA, 163 bp, Homo sapiens
  misc_feature (124)..(124): n is a, c, g, or t
ctggattaaattagaattttctgtgtctgcaacttgtttcatgacaccttggttttcttaatcatcttgtattattatttgagtgaacattattcttaatgcatgggtgactgaaaacctgaancaagattacttgttaataaattgtctagagactatgact

SEQ ID NO: 560964 - DNA, 968 bp, Homo sapiens
cttgaacatgtattaacaaatagttaaaaatgtctgctatgagtaatacggttcatgttatggtttcttgaggttcatttcacttgtcatggagttctacaagcagggtgtaacatcttgggcctgttatctttgcacatttacttgtgcccatttttcatctaaggagaaacttaaggagtagagcaaaggatgtaagtctccttaaggctactcaggaattgataacacagtaagaatatagaagttctatagcaagattcttaaagctgttgaataaaactcttcctttcctataaaaaagactgttctgagtatccagtacagagtatcagtttataaccacaggcagggtatgtaggtgggcttcgattgcaggtgctgtgtttgctgaagtctgtagcagcctctaccatcaaattcataatgatatgaaacatctatggttcttagaaaaagaatggttgagcaatgtgttactaaaagcaattggtctcatcatgttaagtgttgatgccctcttatcccagaacctggctgaagctggagtcaaaatctatattggttaattttaagtggccttgtgaacaagtgcattcaggcaatgaaggaactgaaagctacttagaccaaccaggctctggttgtggactctcggatggggctgggctttgttacggaggtgactacatgcttaagttctgtgaaggacggagtgcaattcaggaccagtcgtgctttatgaatcaggtgcgactggattttacgaggctatagaatagaattaaaagcctattgcaatattgaagggcctaaaggtaaatggtcggactaaaaaaggattacgtaaaacgtcggggtggatccggtccccattgagagggccattgcacaaaagctcagggcctaaaagggggaagcgccactgaatgaaagagtacgactttatacttttatatttcttcgcg

SEQ ID NO: 560965 - DNA, 398 bp, Homo sapiens
  misc_feature (311)..(311): n is a, c, g, or t
  misc_feature (338)..(338): n is a, c, g, or t
tcctgaatctcgatgatttttgttcctatccatattctgaattctacttctgtcatttcagccatttcagcctggttaagaacccttgctggggcactagggtggttgtttggaggaagagactctggcttttcaagtagctatatagcaatgctccactcctcagtaccaattttctgtgggcaggccatccttatattgcaaaaaatacctgaggctgggtaatatataaagaggcttaattgggcttatgggtctataggctgtacaagcagcacagtcccagggcatctgcttcagcttcccgtgangcctcggaaagcttaacaattcatggntggaaggcaaaagggaacccgatggttctcacattagttgagaattcaaggagttaagga

SEQ ID NO: 560966 - DNA, 358 bp, Homo sapiens
caatcagtatgttccctggaaagatgaataagtctcatgactaattttttaccaattgtttaagccaaagaaatccctttcttttttttactcccaaagcacagtatctcaacagcagcagcccccatggggttttagcagcttaactttaccccctaaatacagctttgtataaaccagtggttttcgctggagaaaccgctgtccttcaaagcaaggagtggcagccagacatcaatgcaaaacttggaatgattcgctaatcaacatggcacttaccaaaggtcgcttattcgaatattccacttaagaagaggttacttttttgtccctccttgccccctggaaaaacaaaaaa

SEQ ID NO: 560967 - DNA, 375 bp, Homo sapiens
cagtactaaagcctgttttttggaggaaataaaaaaaatatgtttggaggggcctgaatatgaagaactttgttaaatacttttactccagcaaaaagttggtcagggcgaaggaattcccttcctcagcactccctgttgcctggccataaagaaggcctgcttggcagtagcaataaatgtcctgtaagctgccccctgggaaaaatttttatgcaggtggtaaccaactgtcccagtttgcttggaaataaggggttttttgtgacttgaaactttcaatgccaaaaatggggcagtttcaacctcccccccttttggtcagcctaaaaaccgccattttcagcaaaccctgatgaagggtccaaagtaaga

SEQ ID NO: 560968 - DNA, 158 bp, Homo sapiens
  misc_feature (148)..(148): n is a, c, g, or t
gtaggctgggcctggcctcagaacctggtggctcctgcctgctccttcacttttgtaaaaccatccccttcaccagaatggtattaactcctggtgctttgtactacaggtccacctaacctgggctccttttctatattataaaaancgagtatttt

SEQ ID NO: 560969 - DNA, 283 bp, Homo sapiens
ggtctcacacatggcccaggctagttttggaacttctggggctccagcgatgcttccacctgggcctcccaaagggcggggataaagccggagtcacggggccggtcactacaagtggaattggtagtgaaaacttttactacaaagaaaacggcaggtccagatgacttcgccagtgaatttaactgaacataagggaagacgtattgggatgacatctaagcaccttcccatatggtgctatgaggccagcattacctgataccaaaggttagaccccgtc

SEQ ID NO: 560970 - DNA, 945 bp, Homo sapiens
  misc_feature (489)..(489): n is a, c, g, or t
  misc_feature (691)..(691): n is a, c, g, or t
ccacgcgtcggtagagaaacaagaggaggaggaagaggaggagctgctccctctcctcgtcttcctcttcctcttcgttcgctccatctctgggaggccatatgccagggaggacgcgaagaagaggaagaggaacgaggtagcgagagggagaagcgacaagacggtagacgaaacaaaacggagggaggcacagaggaggacgactgctcccatgagacactgggagtccccaagcacagcaagccaggtgcttcagggtcccggatgaactatctctgcgtcgacccagcatgtgagtgcatgacctctccagggtgaccacacaaaaatagccagggcacttgcacagggaccgtcacgcgagggacactacgggacccctacgatcaaggatggtcggaagggtcggcgagaaggccgacggtcgactcgagggctgccaggcgtttgcgtggctttgcacatgttcacgtacagccctcaacnatcagcgaaggtgaactcacgaagggagcagagccatgtgagccatccgaacgccagctcaggatgaatgggctcatgaggggcccaagcaagttaggcgtgcgccgattgccctgccacgtggtgcttgtgcggagtaacgcacggtctcagacgccgcatcacaatctcacgccgaaggcgagaggcccgagagcgaaangccgcacgatgtgagggaaatccacgcttgggtgttcgtcatagagccaatgacagcgaatggtagcggtgaaccggacttctgtcggttcgaattctcggcgtcaataggacaacaggcatcgtcaatgtgtgagccctgaaggccaccccaaagatagtacattgatccccaacggttgggcttcctaagaaacgcgtgcaggcgcttcttccccacacctgagtcccattggatggaccgctgggaacctg

SEQ ID NO: 560971 - DNA, 955 bp, Homo sapiens
tgttaatacggcacgaggctgtctccgtccttctatcaaggaggtgttccgctttgcctactacaagctgcttaagaaggcagatgagtgggttagacatcgcggggagtgaggacggaagatcacccatctccatccagccagatggactatgtaactggtctctccttcgagtatcatcagtggtgtcttctcatgttatcaatattatctggctgatgcactctgaggccaaggatgtgagatatagagatgattccaatggagaggtgcacccctcttacattaccactgacatatcaggcacatttctgaacaagacaagacagtataatccatgctccaatacccttaaatgagagaagttagtagtatcttatgaatgcactgattgaaacgagatggccaggatacatgagagactatatgaggaccattgagatgagattggggaagatcacactacatgacatcagacgacatgacactatcctttgaaaccacacatggataatgaagaccaagacatgcatgccacatctaatggcagatcaacatgattttccaatgtggagcatcataggagacctatcaatcaacagaatggaagaggtcccctaccagaacagataatacaagaacagccaagcacacatatggaagtaaagtgaacatgacataccccttgggcacattgaatcagcaacagtgaaacaagaaattcctcacaacattgggcgatggttccaaacataggaccgaatagaaacatgacagacccaaagacaccaaagaccccaggggtcccaatttaggcacaaaaaatagaacatgtcatacctaaatcaggtcaagcactaacaaacaaataacataccaaagaaataaagcaaatgacacaataagaaaacccgaaagacatcaacctcgacccaagaagaaccatgagataagc

SEQ ID NO: 560972 - DNA, 460 bp, Homo sapiens
gcctcgtgccgaattcggcacgaggctgaagagtaagctatgaaaagcttcagaaaaagcaaatgagggaattcagacggacaataccacaaaatcacagggaagatcggtctgatattcgagaggttcaactgcatacaactagaggaattccgtcagaaattcgctggactgggagaagcaacgcttgatttatcagcaaacaggtatcttctactggaggtcacaaaggaaggactttggctgaacaatctgagataattcaggctcagcttgtcaatcggagacagaaattagagtctgtggaactttctagcctatcagacattctacacttaagcagtaaactgacgcgggctaatgacactatctgtgcccatgagattggcaaatagagcgccttaccatgaggtcaatattaaccctgaccatatatcttcaacgtcccccctttatcctc

SEQ ID NO: 560973 - DNA, 172 bp, Homo sapiens
ggcggtcatagatgaggcagcagcaatatcagtcgaatgaggtatcaagcctcaggcccatcacatcgctgtggaggagatctgtgagaagcttaagaagaaggacagccagatatgtgagcttaagtatgacaagcagctcgcccctgagttagcagctcgcccctgagtt

SEQ ID NO: 560974 - DNA, 341 bp, Homo sapiens
gcgtcgacccaaattggaatgccagccagatagacaataaactaacaaaagaaaataaagtggccgggcgtggtggctcacgcctgtaatcccagcactttgggaggccgaggtaggcagatcacaaggtcagaagttcgagaccagcctgagcaacatggagaaaccctgtctctactaaaaatacgaaaattagccgggcatggtgacacgtgcctgtaatcccagctactcaggaggctgaggcaggagaatctctcaaacccaggaggcggaggttgcagtaagccgagatcgcgccactgcactccagcctgggtgacagagcaagactccatctc

SEQ ID NO: 560975 - DNA, 235 bp, Homo sapiens
gctgttcttgaggaccccgcgacgtacagttgcgtgctgcttgcgggcgcgcacgcctgactggtttcgtattttttggtggagcaggtttcacctgtgttggcgggcgtggtctccactcctgaccgcgagtgatctgccagcctctggctcccgagttgccgggattgcgggcagagtctcgtccactcagtgctcaatgttgcccaggctgaagtgcagtggtgtgatctca

SEQ ID NO: 560976 - DNA, 166 bp, Homo sapiens
gctcgacctaaaaatatgaaaaataggcaagcatactgatatgtgtctgtagtccctgctacttgggaggctgaggtgggaggatcactgaagcctgggaggggggcttgcggtaaccgagattgtgccactacactccagcctgggcgacacagaccgtgtcttt

SEQ ID NO: 560977 - DNA, 1323 bp, Homo sapiens
aacagaggacctattcacgcttcaactgtatgggacacagccggccaggagaaattcggctggcactgcagagcactggcctattatactccaagcccagtgtgccactcataactgctttgatgtaacatcgagagcttacttacaacgaatgtgcctaactggcatacgacgatctggtacgacgctgtgctgacaaaccattccccattgctgcttgctgctggcaaccaaaaagctggcactactctaacgcgacagcgcacacagctgacagcgcgcaacactccacttgctcttcccaaccggaacagcaagcaactcctctcagcttaacctaacgaaccaactctctcctggccaacacaggctaacctgacacacccttctgacacacaggccccttcgcttctgggctttgcttaagggacaggcctcgactctgggcacgacccctaaaccctatggcacacttttggatctggccgaatggtccttggtcttccctccgagcacccccaaccccaagacaggtttgggtgccactcgcgcacaccccacgaactacttgggcgccacggcccaaccaagcctactcggcacgcccaaccggaaacgttctaacgccacgcggcctttgccctcccaaggccaaccaaaaacccttggacgttcattacgcacgggggccacttggcaacgccgcaccttggacctcgccacccccctggcctgcaccgcacaactcgcaacaccggccgtggagacgacgacccctccaaggcaccggctttcgcaggcaaacaaggcttccctaaagcctctctctcaacttcacggcggcccacgcccctgggatttcaccctagacctggccaactcgcgctccacggcgcggcggcgtggctctcacgcccggcctggttgggctgtccccccaaccccgttaccgacttttgaatcttcaatttccttaaagacctttaaaacggccccgcgccacacacaactgggttggcccttctaccaattcccttaggtcggcgcgcctacttgtgcccttggtcacacacgccggacggcaacttggcaaggctgtgggggtgccccttctcccggacggcaaggattgcgacacacttcggttcggagcgcccaaagctcctcatcacgacgcacacacacacacatctaaaacccgttttccccccttcgcgggctctcccgggaggacacccccttgggccgactctaaattctactcagacgccctaggcgcactcctctcgggggacaacccggcccacacatcctctccgacac

SEQ ID NO: 560978 - DNA, 335 bp, Homo sapiens
tatccgccaccatcttgttgtaggctgcggagcaggctggaagccctgcatgctgcgattcaattcacgcaacgttgactgcatatccgtcggcaactgctgcatcgactggctagcgaggatcttgttcatgctatccagcgtcgtttgcaggtttttcattgtgcgctgactttcagaaagcgtactggttgcctgttcaatcatcggattcaatggcagtttgttgatcttatccaacgcttccatcagtcgttgctggatttgcgccaggccgccgctaacggtcgggataatctgataaccattaaattcacggaataccggttattgca

SEQ ID NO: 560979 - DNA, 480 bp, Homo sapiens
ggacctaatacaatatatttaatttttaattaaactcttaaacttttcttccaaaaaaaaaaaaaaaaaaaaggggaaaaaaaaaaaaaaaaaaaaaaaaaaaaaaaaaaaaaaaaaaaaaaaaaaaaaaaaaaaaagaaaaaacaaaaaaaaaaaaaaaaaaaaaaaaaaaaaaaaaaaaaaaaaaaaaaaaaaccttttgggcccctttgccccaaccaattttaaaaccgaaaaaacttaagcaagggggcccaaaaaaaacccacttggccaaattcccctaaaggggggggtataaaaaaaaaagggcccgggtttaaaaaacccggaaagggaaaaaccccggcgttcccaaaaaaaaaccccttgaaaaaaaacccccttttccaaaggggggtaaaaacaaaaaaggcccaaccaaatccccttacaaaaatttggcccccccgaagggggaaggaaaaatgacgctttttc

SEQ ID NO: 560980 - DNA, 448 bp, Homo sapiens
taaaggtctgtattagtctgttctcatgctgctaataaagacatagacatgactgggtaatttataaagtaaagaggcttaatggactcacagatccacatgactagggaggcctcacgatcatggtagaaggcaaagtagaagcaattttactgtgttacatggcagtaagcaagagggcgtgtgcaggggaactccacctttataaatctgatctcacatcagatcttgtgagacttattcactatcacaagaacagcacaggaaagacctgctcccatgattcaattacctcccactggggtccctcccatgacacgtggaattctgggagctacaattcaagatgagattagggtggggacacagccaaacggtatcaggttccacttgctctgtatcctcaccaacacttatttatcttcctcattatcgccatcctactagt

SEQ ID NO: 560981 - DNA, 159 bp, Homo sapiens
gtcgtatccgtacaggaaagagacggctttggaggctggcagcagcagaggaagaggtcgtggccgtggcgactggagcgtgcgagccccttggtggcgtcccggagataacatacacggtgccagcctgataagtgtgggcctcgtcataggcaaaag

SEQ ID NO: 560982 - DNA, 785 bp, Homo sapiens
gtcctatctccttctgccttctctggcccagtgtgtgtgggaggagggtgatggttatgggtggcaccaggttccccagctacctctctccccatgttttagataaattaacactgcctggagtcacgtgtctctttccctgcagagccccaagaccaggtcaggcatggggaggtactccagggatgccggtgacctctctgggaaggctgtagtctattctctgttagggaataacttagagtacaaacagataagctttcagacaggctttgacaatctttaagcccccatcatttggacatgctaatagcttgatttgtcccccgggcagccaacctgtgctctcagcctcgggaccagactgcccaaaggtactgctgcttggcgctctcagtatggaatggtacttggcagggacacccataggcccggcactgcagctggaacttgcttctgcctcattgcttcatgcccgacctagagcccggggcttgtctcctaccccagccctgcctcctcctccgggcagatgccagattgcttgacagaacggtggagactcggatttgcccaccagtcctgaggcagctcacgggtgccccttcctctcttgtctttgcttttctgaatcccccaccaatgtgcctcagctgctgtgctatgcggaatagcatttcttggtgaaggggctggttcccattgaaagccccctcccccaaagttacattctgcagtgccaaggataggggcatgtgactggaaggtcattcttggaagaccta

SEQ ID NO: 560983 - DNA, 191 bp, Homo sapiens
gtgcatcgagctcggaccgctctcctttctaccttttattgggacgtttctctacagcctgagctctggttctcccctccccttgtgattttctctggaaatcacagaacgttagtacttatagcagtaggaggtgcagagctgaagtttgcccagcgtctggcctgcagagtctcacggagtctcacgga

SEQ ID NO: 560984 - DNA, 229 bp, Homo sapiens
gggcgacagggcgttgtagaggtcgatggcgttcgcccggaacgacaccaggcccgcgcccgactggttcggattgaaagagttgaactggcaggccagacagaactgcttcaccaggctgccggcgtattgctggacatcgcgcggcgacgagataccccagctacccaggtcttgctgggtattggggctggtctgcaccatggtcggcgtgcggtagtcagccccg

SEQ ID NO: 560985 - DNA, 287 bp, Homo sapiens
  misc_feature (30)..(30): n is a, c, g, or t
  misc_feature (69)..(69): n is a, c, g, or t
actctagaggtactgagcacgaatgttcgngaacgaccttgaacatgcttcgccaaattggtgatgtangccgacggaagttaattcagtaccaacgattcgcttgtggtcctatccaccctagccatcttcagcccgctgcagagaacgatcccagataaaagaatctgggagacgcaaaacactcgcactggcatggcctcgactcatcttgcctacagcttcaaccaccaaaatctgatcttcccccggtgccactatcaaacaaggtacattcgggtgctcaa

SEQ ID NO: 560986 - DNA, 115 bp, Homo sapiens
tatcctcaaatcgctctgctcttaatggtcgtttgtacaacgattaatgtcctacgtgatctgagttcagaccggagtaatccaggtcggtatactatctactatcaaattcctc

SEQ ID NO: 560987 - DNA, 853 bp, Homo sapiens
agcccaaaaggcattgtgggagtactggctctttcctttccgtctggcggcagccatcaggtaagccagatggtgtgcatacaatgtacattccaggaggctatggagagaaggagtgctgtctgattgtcatgcgcttgctctcggagggtccagttgcttggaatgtcaaccggcgagtctcatcgtgttctccgaagagtggtttctcccgcccccaagcccgggcctttgataaaggcgcgccgaaatgtggcttacaagaggccaaacggcacaggtaacggttaactatatagggatccggtggtacagccggatggtgggccgaaagaacggcccagttccttaaggggttgccaattttaacgggacaagcctgtcccactcatggttgttaaacccaggctaagaagtttatgctcgaaaggcccttacagctcacggttttggccacaagtgagagccagaacgcttggtcaacgcccaacctggtggagaggggccctccattgaaaggaacggatcccctcatgagaaatccccttatacccgaaggcggttcaggcggtcagcacaaacaattccccacgatttaaccacgactttctctgtcgaggcacgcgctacatacccctcccatttgtggatccctattttccccagtatgaaggcttattccagggaaacggaaagattccggtggacgatgctccagtgtgtgatttcaccccaaaatgacccatgtgtcccaatcaaaatgcgctcatgggggatgaattgccgttggagtcgctggaagatttcttgccgaccggggccggaatagagaaggcccggtgggccatttgga

SEQ ID NO: 560988 - DNA, 162 bp, Homo sapiens
ttatgcatgcctggagtcccagatactctgtgatgctcccatgtcgagactccaccgatatctgggactccaagaatgcagtagacacatgagctgcataatttgtgtatctttggaggatactctatagctcagaattgtgcccatgcaagtttgaaactg

SEQ ID NO: 560989 - DNA, 462 bp, Homo sapiens
  misc_feature (414)..(414): n is a, c, g, or t
catgggcctagctgtgatttaaagttctcatcttctgggccctattctgcctgatgtctgatggcatcgcaaccccagagagcacttcttagctttctgattcttggaaatgaccattctaaaggcgcccacgcttttggaaagtgtggaagacattaaaagcaatctgtgaacttggccactctgcttagcaagtcaacttgaaaaaaaatcacagcaacttaagaaggtgggcctgattctctaagaaaccgcagccatctgaggatataggccactttatgcaatgatactattctgctcttcgtttctcatgaggaggggcccaagaaggatattcccaattggtaagactgatgtgtgcaggaagaaaaaaccaaccactaaatcggggttggaagtgagaagaaaggnactaaaattttatgtctgcttaataaatgcccactatttttaaaaaaa

SEQ ID NO: 560990 - DNA, 221 bp, Homo sapiens
gtccctgcatagaagaggcactgtcacccaggctagagtgcagagcatgatcactgcagccatggacacctgggttcaagcaatcctcccacctcagcctctttagtagctgggacaacaggtgtgcgccaccacacttggctttttttttttttcttttttcttttttggaaatggagtcttgctctgtggcccaggctggagtgcaagggtgagatctc

SEQ ID NO: 560991 - DNA, 299 bp, Homo sapiens
  misc_feature (19)..(19): n is a, c, g, or t
  misc_feature (74)..(74): n is a, c, g, or t
  misc_feature (135)..(135): n is a, c, g, or t
  misc_feature (239)..(239): n is a, c, g, or t
ttacaatagggttatgttncagtagacccattgtaaattgaaaataccgtaagttgaaaatacatttaatacgnctaacctactgaacatcccagcttagcctagcctatcttaaatgtgttctgaacacttaangttggcctttagctgggcaaaatcatctaatacaaaacctattttataatgaagtgtttaatatctcaaataagagtattgtaccacatatcgttatcccgggnagtatcagagtacaaaatttgaagtacagtttttaactgcaatgtgtattgcttttgccc

SEQ ID NO: 560992 - DNA, 168 bp, Homo sapiens
  misc_feature (118)..(118): n is a, c, g, or t
ctcgtcggccagtatctagccacacttacatccatgtgtcatgacatttctggagaaagcagccagtgacactgttgaataaaacacacaatagtctctgtggtcttctgcagcccancccacacagtgacctcaggttgattctctctttttaatttgcctgtaaag

SEQ ID NO: 560993 - DNA, 260 bp, Homo sapiens
catctaagggagaataggtgccagatgtcagaatatctacaatatcatgatattcttcatagtcaaggaaatacctctgaagtaagagacactgccatagaagtgggacacggatgtgatttccatattccaagtcattcaaagacagatgagtcatcaccagtgttatcgccaaggaagccttctcacccagtcatggattttatcagatcacatcttttagctgactcttcctcaccagcaacaaattctagtcatac

SEQ ID NO: 560994 - DNA, 150 bp, Homo sapiens
  misc_feature (126)..(126): n is a, c, g, or t
agaggtggaggaaagatggaggaccatcagcaacgataccgatcgacatccagacccagcaagctcttcgattggactggaggacagaaggaatgcagcctgaaatggcagagttgtatgaagatnccgagaagatcaatgatgacatac

SEQ ID NO: 560995 - DNA, 281 bp, Homo sapiens
  misc_feature (236)..(236): n is a, c, g, or t
tgcctccttagggactggtattatttcttcatcttattggcaggtgagggtgaagggcacagaccctttggaaatgtgatgaaagctctgggtctactcaccagaaaactgcacatacaatgacacaattttgtacggattttcagggggttcctggatttccctgaaaccttttcatgggtctcagagaacctctgccttaggagaaacaatcttaaatcaagagagtgtgacangagggccagacgtgatgctcacacccagcgcatcgtgatactctg

SEQ ID NO: 560996 - DNA, 199 bp, Homo sapiens
aagaccggcatagctacagccagcgagggctggaaatgaggagtgccgcggattacaaaaaccgggatagggggacccggggtaaccaccgcttcggagcttgggcggagcgggctgaccagcggggcggccagggcccggcccgcgtccccagcgccagcccggcttctccccatggcgatgggagcctcggcggccg

SEQ ID NO: 560997 - DNA, 95 bp, Homo sapiens
tggtgtatagccaggtcaaccacgtgtcttcgacatgcgtcgacggcgagcctgggcgcgtctccttgagctgttgcagacaaggtcccaaagac

SEQ ID NO: 560998 - DNA, 827 bp, Homo sapiens
  misc_feature (605)..(605): n is a, c, g, or t
ggaatttcattcagcagattgtagagtgcttagggcaggatgatcatttgcacaatgttgattctatgagcatgggatgtgttgccattggtattgtgtcatctataatattcagcaggtgtttggtggattcttcattgataccacgatctattgcagcctccctgtggttgaagctatattgccataggttctctgtattagcgtcatattgatttctgcatgtcgtgcttgtaagagagggtatgagcagattcattgatcgagttcatcatgcattcgactcgattgtttgtgtgtatcagacatgttgctatgtttctatgagttgtaagacattctgatatattagtatggcgcttgacgagctatgatcttgtatttttgttgtctatggacaatgtctatatgaggtacttcagttggacacgaagtacttttaggtgcattggttctaacgagtaattatggattccagtatgtacactatcttgacaatgattatgagagaatacggtatagaatctttgcgcttctttggttcccatatcccgtgaatgactccatcttatatttagttctacgttctctgactcattgagtangtctcgtagtgcatcaaggagttgtcaggaaaactgtatgagattaggcatggagtgaagatgtgtggcagtcatatgtgctttgcttacctagattctgctagtagtggagagagtagtgtatcaactatttcgcacactatatcagtgatatacgctatggtagtaggcgtgtagtacagtagtatcctacaatattatattgtatggatggaaggccaa

SEQ ID NO: 560999 - DNA, 118 bp, Homo sapiens
gtttgacttcttggactgtgtggccgacctccaaggggaaggaggtgaagcgggcagccctcaaacgagctggtggagtgtgttgggagcaccccgggtgtcctcaatcggagcccgt

SEQ ID NO: 561000 - DNA, 307 bp, Homo sapiens
ggatatctacatcctaatttccatttgtaaagtgtccttttttatataaaatatcttatttaaaaaatagagatggaggttgggcacaatgggtcacgtctgtaatcccagcactttgggaaggccaaggcggacagatcgtttgagcccaggagttcgagaccagcctgggcaacatagtgagattccggctttttttttttttttttttttgaaacagcctggggaacaaaaccaaaatttttcaaaaaaaaaagaattcttaaaagccccggtttatttgggtcccccccccaacccggaaaaa

SEQ ID NO: 561001 - DNA, 221 bp, Homo sapiens
gtctgcgcaccagcagatgtgcactaggggatggaatacgcgggctctgcggtcggggtccaaatcacacccatacctcatcctccaggaacatagcatatttgacgactgacaccctcgggggtttggtgcttgagggccacgccgagagacgttcaaacgcaaattcacaaggacgctgacaacagacaagtgcagactaacagttttcttgctgcatg

SEQ ID NO: 561002 - DNA, 1112 bp, Homo sapiens
gctccatctcaaaaaaaaaaaaaaaagcctgacagctagcaggttccagggatccatctgccaagtttagtgaagggctggagcctcaaatcatacagatgagggtcattttctcctccttaccttctgggagttcacgatttggaagggagtcctgaaaagtactgatagagcaagatgaagctatcagaactgaattgggacttcctcggggaaactacacctagttcatctgaagtgtccacgtaaactgcagaaaaagtttccaatggctgggaaatcttctctacataactaatcggtggccttcctaactcagaagtggcctgtgcccggctcagctggtgactactggacctcaggacctcactgggacagggcatgtgggggacccttgcaaggatgccctgggttaagggggtaacaactggatcgctaatatggttgtctattgaggtgtttacggcaaatggggcagtactacatctctggttctacccaaggtctcaggaaggtggcacgtggggtagcagatcttaccggggtacaacgtgggacacaccgtaccggaactaccacgggagattcgagagcaatgtatcatacactgtgccatacaagcccgtggatacgaagtgagagctagggggatactcaacgggggagacaccactattaaccgatttgtacccgggggacatacagagattagggcctaaatatctaacacagcgatacgacagaacgggggggatatacccggcccacagttggttgtggtgcaaacagggggcgcgagaggaaccataatggaaaaccttatcctgttgtaacccatttacgaaggggagtaggaacctctcatgggggcccacagaacgccttagcggggggcacttattccacaaaagagtgtgtgtggcactgcggggaggatatcaccccaagggggatgcattttagaagccgacaccacagtggtggaaccccaccagagggtcacgttggaataccccttatattagggggtgacgactacatttaatttgacacatgggcgaatgacaacaacccaacgccttttcaggggacacacaaacatggaacaacta

SEQ ID NO: 561003 - DNA, 628 bp, Homo sapiens
gctcggctccctgcaacctctgcctcctgggttcaagcaattatcctgcctcagcctaccagttagctgggattacatgtgtgcgccaccgcgcccggctaatttttttatttttagtagaggcggggtttcaccatgttgaccaggctggtctcaagactactgacctcaagtgatccccccccccccgcctcggcctcccaaagtgctgggattacagacgtgagccaccgtgcccagcggtttggcatttccaattgtggggcacggtgagaaaagacttgaagcaaagcaagggagtgagatccatggcaaatgtcaggggggaaccttgcaggcctatggacccagcccagtgcaaaagggcctggggtgggacgctgactcagggtacgccaggatggcacgcaggcacacgtgccgcagaggaagccaggggccaggtcctgccaggttaccaggccatggcctatccctgaacacatgggcaggcaccgagcagacgaagctgccctgactcacagcccctcaggaccccccgggccgctgccgtggcaggcagaggcgcaggtcgaaacgcagggctcaccactcaggacgcgggggccaacccccgggaccccgacgc

SEQ ID NO: 561004 - DNA, 154 bp, Homo sapiens
cctgaaaaacctgcggtcttcattagctatataacaataatctatgtcttagatcgtgctttgacttcaaattcttagaagtaactaaaggacttaacattctacttctttgattctaggttctcgtataacttttcagatcacgtcatgctta

SEQ ID NO: 561005 - DNA, 1178 bp, Homo sapiens
atttgcgggctgtgtgccaagctggccatcctgtcctgtggtccaccctggccagcccgcacaagcctgcgccgccgccgagcgtttcgtgatgccggctgctccggaggatcagtgaatggggcttcggtggtgcgctggtgctgctgctccgaagccctggcgcaccgtaagagcctggtgatgctgccctggagcctgccctggctgccctggagccccatctgcctagtgaccgggagatgctggaaatgcaacctgcctgttccccgaggatgcctgctgccccctgggaccccctgtgcactgtgcgcaccctggtcagcaagcccccggagaagacggcgcccccagattgcccagagtcctgctgtggcctgttggcatgctgccaactgactggagccctctagtgcagactctgcatgggccacatgcagctcatgcctgccaggtgccccctacggaaaccaatgaccccacaggcgcggggcccatggaagccattggcccatacataaggggttacctaggaggcccaggaagctagaggagcacaacccgtacaagaacacgaacaagaatatggagcgcatacaagagcattagcaaactatacaggccttatcaacagccatcatacagccatcataccattaggcaaatataaacccattagatagatttatccaagaggattaacccaaggtgcattagacaaagccaaatatgagaaccatatggggaattcaaagagcaagactccgacccgtaacctattccggtgggcaggcaggcacccatcagagcttgtacacttcacacgactaaggaaccaccaaagacggctgcatagaatgcatgcgaaccaaagaaaaaacattttctatcccaaggaaaaagggtacgcaaggtgcaacacctatagattgaattcgcccattactcgggtgacaccggaacagtgcccccaataagagggaagacccccaaagcgatgatttataccaaatgctgtcagcacccaggacacagcacaggcaccagaatacaacgcaggcacgacattcgacaacttcaacagagtagatatcaaaaaacacagactatccaaggagttataaacccgaaagactatgagagacaaccacaagggatgggggatagggcccacgaat

SEQ ID NO: 561006 - DNA, 400 bp, Homo sapiens
gaggatccccttcgttggcagggtctggagtctaacctgataacgatcctacattaggcttctaaaatatttgtcaggagggacaataataacatgacactggccggttacagtatattgaatatttaggaaggggatggcgagacagtcagttctcagaacaaattagatcagcttcagtctcgtcagcagggtctttggattctttgttcttccgcacttcttcaatgtgcttatccttctctcgcaaacgttccagtttggcagccatttgtgcctctcggttctctttattagcttccattttgtgggtcagtttctcttctgccattttactgaagttgttgttctcttctattgccttctgaagcacttctttctcgtgctctcgtttctcagc

SEQ ID NO: 561007 - DNA, 522 bp, Homo sapiens
ggaaaaaaattccggatcccaagcttggaacccagggattgcttcaggtggtatgggcggtggtcttggagtcatcacttttataaatagtggttcagggaccacagagagagactgcttcatcgaatgggaagtaccaaggagaaagtacaattcagtattgtctggaggcaagtggacactttgtacctgaggtttagaataggtggcctcttgccattacaatccccagccgtttcctgtgtccggaagtagtaggattgccttaagtctcagaggattactcagcgctcttgaaacgcgtattgcccactgtgacagaggcccttcttgggaaaatggatgtgtcagggatacccaatttcacatggtaattgggaggtttgtaaaaacgcattttttgatagttttgcgttgagaaggtaaaattcagcagtgtggtttgaacccccaaatctttcacatacgtgtggaagcttgggccacagataaaaatatgcagcggaagaggccgtctccttt

SEQ ID NO: 561008 - DNA, 295 bp, Homo sapiens
ttactagagtatgcaagcagcagcagaaggagtaataggacatacagggggacgagactcctcaagatggacaagtggtggtaatttggagtgcaggactggctaataaggcacgcgaggtgcaggcacttacatgagcagtcaccgaataagaaagagcaccacaagggcttttcactcccaagtagcaagcagcttgcaatggcgggctgagaacccagatttgacaatgcttctaagatacagagatgggaagctcttggaaaggagtgtaggcatctgttgtagtgatata

SEQ ID NO: 561009 - DNA, 847 bp, Homo sapiens
  misc_feature (254)..(254): n is a, c, g, or t
agcgatttcaagggcaccaaatggcactcaaccgtgtgaaagcccttttggcccccctagggctcccccttttgtgtggcctttgccttggaatttgcttgaaagctataaattaaaacgatgtatcgatcgtaattggacttttggccacacaaggggctttccctagaagacttcttggggctcgacaccaatgaatgggtgacggcgtaaatttaggaaacctcgcgacgggcccctttcttccaatattntcgacaaattccgttcgtggcttttcttgtcgcgcacattctcactgcgagtgagctagtggaacctagtgggcttgtctaggagtctgaaggatggtactctgctctacgcgttctctaccatgtcgaataaatgcgtcatgtgtctagtacgtgcatagtaaccaatccttgtcatcgcttcctgcaagaaaatcatagatcccatgtgcgagagtccatcagttgcagcacccaggacagggtttactagcagtggagtagcacgcagatcgccaggggactagcttgcagggcctgtatcgtagcataaggcttcctgagccgctggtctactgggatcagaatgttggctgtaccagtgaacgcatagttgtagggctgaacagactacagaccacagaaagagcaaagcttcagtaggttcactgcttgatggagaagtcacatcgggaagcaccatgggccttctatttcctcattgtcctttcagagaagagagcaggagttgggtgagaaaggagattcgcaagtactgaccatctgttatgtgctagacacgtcattttacacgcacgagatatggaagcata

SEQ ID NO: 561010 - DNA, 228 bp, Homo sapiens
gagtttctctagcaaaacatggagacgggtaactgtccaccatgtattttgctaactgggacttctggactggccatctggacttttctgttcttcttcagacatgtccttgctttctgcgtgtaaaccttgtccacattttaatctactggaactgagtttagattgtttgagctggaatccagactggggcccatctggtgcttagctctgtgacaatacttcctt

SEQ ID NO: 561011 - DNA, 462 bp, Homo sapiens
  misc_feature (54)..(54): n is a, c, g, or t
  misc_feature (307)..(307): n is a, c, g, or t
  misc_feature (344)..(344): n is a, c, g, or t
  misc_feature (408)..(408): n is a, c, g, or t
  misc_feature (421)..(421): n is a, c, g, or t
  misc_feature (441)..(441): n is a, c, g, or t
attatgaactccttaaaaacatgtgaaatgtcagccgggcacagtggctaacgnctgtaatcccagcactttgagaggctgaggctggcagaccccttgagtccaggaattcaagaccagcctgggcaacatggcaaaaccctgtctctacaaaaaaataacaaaaattagccgaccatggaggtgcatgcctgtagtcttaactgcttgggatgctgcagttggagcatagtttgagcccgggaggcagtggtgcgatctcagttcattgcagcttctgcttcccaggctcgggtgatcctcccgnctcagcctcccaagtggctgggactacaggcataggncaccatgcctggctgatttttgtgtgttttgtggagatggggtttcatcatgttgcccgggctnggtctttgaactnctgggggtcaagcgatccanatggttttggcctcccaaaag

SEQ ID NO: 561012 - DNA, 799 bp, Homo sapiens
  misc_feature (1)..(1): n is a, c, g, or t
nacataggcaatggacgaggcctagtgattcattaggaagagggctcgggctggtggtgagtaggggcaggcgccgaggggctgcctgctgcatagtaggctactgcacccgcccgagccctgccgccggggccgccaccgtagtagcctactaggcctactaggcaccgcctaggctagggtgctagccccctagcctaccactaccagcccctgctctcccatccatgccctgcttggagcccaccagccacatgaatgccaccatgtggtggtaaacggcatggtggcaggtgcagtgtcggtggtgcacagtgtgtgactgggggcaatgtttgagctgggcagcaggaggactggccacggaaggaggagaccgaagccagggaggaggaggaggcaccaggaggaggagcataggtcccctgcccctcgatgcatagtacactagagctaagcagctagtggcatagtactgccctgcttgggagtactatctagcgtaggctcatactatcatactatctatgtgtcaatggtagtaggtactatacgtacctagctgctataccagcgcacaacaacctcccgacagtgccacttgaccccacctacccacccagcccgcgaactagggtctaggctggtcactagaccatgcaggaactagagcctgccagctggaccgggccagttcccctgggcctgaccattggtgcaggggatctgccccttgttgagaggtggcgcgctgcagtgccagggccatatctctggccctggctcccctaggggggac

SEQ ID NO: 561013 - DNA, 1942 bp, Homo sapiens
  misc_feature (1)..(1): n is a, c, g, or t
  misc_feature (237)..(237): n is a, c, g, or t
ntttggttagctctcttagtatagcatcgtggttgccgcgccattatttcgtttatttgttccctcgtttgttgtatcatctacgacgtgttgtccttcgtcctggttgactctcttgttggttaacctacactactagtttagttgcgtttggttttttccatcgttgctgtggtggttcactccctctctcttctcgctttcgtcgctggtggtctcccgtccttcacttgtatngtagagtgctcacttgtgtgtagtattttggcccacacgagggagatctccctccgttcgttcctccgtctctcgcggtcacgtgtccgatatgtggctccttctacagataacgctcatgactctgttgggagtacctccttggttgcaataaataactctcgtgtgtatcaggaagggagtccacctcaccgggcccccttcctctcctcgaatagagatataatctctgtattaacgtggggacatcaagaacacgtattgttaggcgtgggtgtaaaataagttgaatttctctgcggagaatgtcccgctggtgtcgacaggggaggtccctcctccacgggagtagtagtactctttgagtggatggtctacaggttcctccgtctagtatataggtacaatagaggtcgctcccacctttggtcgaccgattccgtcgtgaagaaggccacaaaaaaatatattgggggcgcacctctcgccccctcggtggtagccctccgccctctggcctaattcttctatacgccttcggtggattttgtcaagaggtaaggagtagatccctctgggttaatcccagcggggcccccccctagaggtgagatccgccacctctcgggggctttatcccgaaagaacacctcctgtcctacataaaaagtccttgtggttaagagatagtagttcccgcctaagaaaaagaggtcgcgctcttcggtaatgtatagtataaggctccgctagtaaagataagagttatattagtgaaagaggctgttctaatatcggggtaatataatcctcgcgcgccccacttagagataaggaactcgcataggagagataaatgattttgggagatactttgtcccacgctgaagaagatatcgcccaccgccgcgttgaataatagaggaaagtggcttccatctaacacaacatcgtttcggccttcgaagagggagttggttccacgcagacccggcccacatcatattattgcgaagaaaagatagaggtggcgccccacacagcgagatgagatcgttggggtgtggatatctctcgcgtgaaagagataagatatatctgttgtgaggacagcgctttcgcggtagtagtgagatgagaggtgctcttgagagtggtggcacgcgagatgagattatcaatagattgggggtcacctctctagagagaggagagtgagactgtgtgacacacatagtggttgacacgcacacacaacaggtgtgaaaaatcctcgtggggagagacccacagagcggggcacccacaggttatgtctcgcaccccctaacgatatagagattgtaagtatattgtcaagagagagtgagatgatctcaaaacctgtttgtgcggagaggagaatagatcttgtatagagtgagatgcttgcagatacccgctagccagaagttgttcacgtagaagagtcgtgtggccacagatgtgggagaataaacacatcgtatgtacacttagaatagaagaaccattggccctagatgccacagagagagagaatacactcgtagaattctcacccagaaccttggacccagaaccctgcttggaacatccaaccaacctgttgtagggcccagccccccacccccagacccggctatgggtgcccacccccacacccaattaaactgatgttactagc

SEQ ID NO: 561014 - DNA, 116 bp, Homo sapiens
agttcgacgacatgccatagctgttctgtgttcacttgttatcctgcactcccatgcacgaccgttgtcacacggacgtgacagtcgacctcctgtaatacactggctcataagtc

SEQ ID NO: 561015 - DNA, 1307 bp, Homo sapiens
  misc_feature (44)..(44): n is a, c, g, or t
tggtgcatgtggctgctgcagcagctgctgatgtgcccctgtgnaactgtgctgtctgctgcccccagtgtcctgtctgctgtcctgcctgctgcccctgtggctgtgtggattgtgtgtgctgtgccatgagcttgatgctgcctgcatccctgctcatccatgactcctgcctgtgcccttagcctgcatgtcccgtccatgcctgtgtgcccacatgctgctgcactgtgtgctgattggctgaagtgctgactgtcctgtgttgcctgctgtgtgtgcttgctgtacttgcttgatttgcttgcttgcttgcttgcctggcttgctatggtgcaacatgttgtgcatttgtgtgcctctaccttcgtcgacgtgtgactgcttagcttggtggatgaactgcttgtattgttggaccatgtgctggctctgtgcagctgcccttttgctttgtaactgtccatttgcacctttgcttgtggactgcccccgtgcatgtggactgtgttgctccaatgcttttcctgctcctttggttgccaatggcagtcttcctagctgtggcagctgttacctgcatcactgtgcatgcattgagtgacacagacttgtgactcttgcagtccacgtgacgtgagcaccctgtgccctccatctaacctatacacctggaggccttggaaccagtatgcttccttgtgtggagaatgctccatgttgttcctggcaaacctgctgtgcttttcccactgactacacctgtactaacctcagagtgtcttcctggtcagcccacaatccctttcgtgacgggctgaagtgccaggtggacagtgctgtgcccctggcggtaataccttctcctttctttcaacaccttccttttccagggccttgcatgctccacctcaaggcccccgggatgcctccttggttcccagtagacacatggccctcctttccggattccgtggaggaactgagcaccaaatggacctttccagcagattcccgacttggtgccttgtgacagtcttgtggccccaaaataaaggtgagcaaaaaggggcctggaaaggagggggctgcgcaccagagagcccagaagcctggagtaggaccacagggctcttgctcctagcccgtaaaagcaaagtgggaccgagacaagaacaggagacaagcaagatgcgcgcccgagcgacagagacagcgccagcaggggaacaccgagggaataaagagagaagagagcagtagacagtggtgaagacaggcactgagaagggaagaaaagagcaggg

SEQ ID NO: 561016 - DNA, 368 bp, Homo sapiens
agatgccgactcttggagaatccccaagcaggctttatgatcactgcttattaagactttgagtcatggggtctgtatcctgtgtgcagggatttatgatacttgtgtctcagtggctttactagtacgtgtccatttctcttaagtgtatcttgccgaaattacttgaggtctatatagtatgttgcttccagaatgaatctgtcttcacttctggcatatagctgtggagcattaccagaaccagatctctgttgcggaacttctcagcatggggtccttcgatcaccctatgataatatgaactaagactgcgaaactgcttttaaagccagctgccgttattattctcaggacagcatttttct

SEQ ID NO: 561017 - DNA, 198 bp, Homo sapiens
cctggtttgttttattcccctaaccccccccccccgtttttggaccgggtttttccagtgttaaacggacgtgtaaatagtggtaaatagtgaaagcctgtccttccctaaatgtaaaaccctctgtccggggtaaggacgaccccgtcagctgtccgactcgcccccatttaataaactgagctcttgcattcccca

SEQ ID NO: 561018 - DNA, 235 bp, Homo sapiens
taggttggttgtgggtagtaattaaaaaaaaaaaagtgaaaaagggaaaaaaaaagaaagggcgaagaggaaaaaaaagggaaagacaggtgtctttaaaatgtaataggtctgctgggagtcactaccatttgagtggttccatttacgtgaaggaggaggagggggaggaggaggagggtatgggtagggcagtctgccccattgtacccatatcatattgggtagctcccgg

SEQ ID NO: 561019 - DNA, 244 bp, Homo sapiens
ggatccccagcacagaggaggggcaccacagctgcctcaggaggtggcagcggcggcctctttagcagcttttctctcttgcagcatcctcctcctctgtctgtccacctcctctatgctgtccacctctctgtgctgtcctcctctgtgctgtccatcctctgtgctgtccaccccctcttgctgtccacctcctctgtgctgtccacctcctctgtgctgtccacctcctctgtgctgtcca

SEQ ID NO: 561020 - DNA, 360 bp, Homo sapiens
tatcaggatgcagctgggcacggtggctcacgcctgtaatcccagcactttgggaggccaaggtgggcagatcacttgaggtcaggaatttgagaggagcctggccagcatggcaaaaccccatctgtacttaaaatacaaaagaaattagctgggcgtggtggtgcacacctgtaatcccagctacttgggaggctgaggtgggagaattgcttgaacctgggaggtggaggttgcagtgagctgagatcctgccactgcactccaggctgggcaacagagtgagaccatgtctcaaaaaataaaaataaaataaaataatatcaggatgcatacatcagaggctgttcctagtgtaaa

SEQ ID NO: 561021 - DNA, 1183 bp, Homo sapiens
  misc_feature (250)..(250): n is a, c, g, or t
taattggaagatatttcattccatgcaccgatcagatgtcatgttagcctattttgtttaatgtaacgggatatataagctctttataatggtggtcgttgcaggaacatttcagtaagagatgtaaactgaatggaattatgagctgagtcattctaacgatgatggttctaaacgtgatgtaggcttatttgagacggaagtaagctgtgagaatgtgactatatgacatatctcagtattataaggntgcgattaagtcgattgtgaaatatttgatgctagctctataatataatcaataaactagagaaaaggacgaggaataacgtggagcgcctgtgttcgaatataacgagagatgtatccttgggaacaattgggtaacgacatcctaccaaagagtgatgaaagtttactgaaatgagacaaccttcctgaaattttatatagggctcaatacgtaggtgagtaagagcttaagtgattgcatacgaagtgcggctttgtacttccatgcggggaacctgtttaatctctcgtcgtaagagggctgtgttggcaaacaataaattgttacaaacacaaagaaagaaatacatataaaaagagatactggaaaatcttcggaaggcgcgggacaaacgagggtgtcctcacagggcgtgtcctacataaaatttaggagttggggacctaagatcgaggcgcctcaaaatgtctacgtcaaaatgcgcgcggcacgtgataatatggcacctgcgcttagaaaaggccgcccctgtaaaccgacaactagaaaaggggacccgctgacacgcggaacatgcggaagttggcgggcaaccaccactaccatacgagtaggggtggagtggaaatatcttccgccggcaaacgacgcgcccgagattactttgggtctctcctcttttggacggacaaacttggactcaggcgtctcatcgggcgggagcggggacttttccaccaaacctactggttatttacaaaattgatggtttcaccatccgcaggttaaagaactatcgcgctttgtgtacattgagaaacaatttacccccgccatttggaaggcggcaatctccgtaattttgctacttcctcaacaaaacgaaacggggcaatctgggggtttgtcatttgaccacaaaatatttgg

SEQ ID NO: 561022 - DNA, 314 bp, Homo sapiens
  misc_feature (42)..(42): n is a, c, g, or t
  misc_feature (113)..(113): n is a, c, g, or t
cgcggccgcgcgacacggctgcgagagacgacagagggctanccaagtggaagtaattcccgaatggaaaaccagactcgtatgttctccacccataagtgggagctaagatnatgaggatgcagaggcataaaaatgacacaatggactttggggactcaaggggaaagggtgggaaggggctaaggcataaaagactacaaatcaggtgcagtgtatgctgcctgggtgatgggtacaccaacacctcacaaatcaccgctaaagaacttactcatgtaaccaaacaccacctgttccccaataacctatgc

SEQ ID NO: 561023 - DNA, 320 bp, Homo sapiens
  misc_feature (25)..(25): n is a, c, g, or t
  misc_feature (84)..(84): n is a, c, g, or t
gttttccccggttatttggggaaantggggccccttaaggggaccctcaaagggtttccaccgattttgggggggtgattttcnccttttcccaaaccgggcttttttttgggggggcccctttaaaaagctgtgggcaaaagtttttaactgggttaaaggccttttttgggggggggttttgtcctttgggctgtttttttccctggcccttaccccaaaaggtttttttttttgggggggggggcccaaggcctttgtttgagatttttttttttttgaccggtttttagggtttccattaaatgggccccccccca

SEQ ID NO: 561024 - DNA, 116 bp, Homo sapiens
agatctctgaatacataggattaatatatgaaaaaatatccctccactaaagatacatccacagttatgatttcagacggggatgctagcatggctaagcgcaataacaggggttg

SEQ ID NO: 561025 - DNA, 420 bp, Homo sapiens
tgcctgtttaagggtacgaagaagttcctgaacgccttcatgtatctgagcctccgaattctccgtgaggttgaaattcaggccctccagtatttcatcgtgagtgtcacccttggtccacaggaagaccattgcaaagcctgtagcaatgctcactggggagaagaagatattggtgctgttgcactggtgtcacacctggcggtatagtctaaaggcgaactcagccaggttgggggttatcttgttaaaggttgggtgatcctgatcatggtggaatgtatctgtcttctggacagcctctccctgggtctcctcacacagagacacagggcacagacagcacaggcctcacagcaggagtatgcccccagacacaaaacgcggcattgtcgattctctgtcacagctcagtggtgg

SEQ ID NO: 561026 - DNA, 887 bp, Homo sapiens
  misc_feature (501)..(501): n is a, c, g, or t
  misc_feature (668)..(668): n is a, c, g, or t
ctggacgagggaagaggcgggcatacacagcaagatgagaagacctatggagctttaatttattaatgcaaacagtacctaacaaacccacaggtcctaaactaccaaacctgcattacaaatttcggttggggcgacctcgtgagcagaaaccaaactccgtagtcagtacatggtaatgatcttcaccagtcagaaggcgaactactatactcaattgatccaagtgaactatgaccaacggaacaagttaccctagggataacaagcgcatatcctattctagagttccatatctaacaatagggttaaggacctcgatgtttggtatccaggtacattcccgatggtgcaggccgctattaaaggtctcgtggttcaacgatttaatagtctctacgtgatctgagtctcagacccggtagtagatccagggtcggttgtgctatctacttatagaattccttcacctgtacgaaataggacaagagcaaataaggngctacttcacaataaggcgcgcttcccccgtaaatgatatgcatctcaagcttagttattatacccacactcatccaagaacagggggttgttacaacatagacctaacccttccttgtaacataatccctagtggaggcataagtgtggtgggcgggctccatctngctacgaagaggcagagcgtcaaatcggtcttttgggtacctcttctttctgccacatagccctcgtagggaggagccctctaatggaaaggccctgaagctgcaacggcgcggtcattcctagggccgggggaaattccaataaaaaatttgctaagaaatccaaatagaagcttccaagcggatcataatcttctctcaaggattaaatctatccca

SEQ ID NO: 561027 - DNA, 476 bp, Homo sapiens
gataacaccgaaatgacatagcatttgtaagcaccatactctcatcgtaacccatccagttaggttattatccgtcaggtaacaatttccctctgaacatccgacaaccggctcctattcccgaagctgtttcacagattagtaaccacaaaaaacccggcgaatgccgggttgtcaccagtgatgccaacgactggaaagacccggccaatgctcgaaagtcctcctcgttccagcaacctcgcgcaatacttcaaccgaatgcacgtcagccggtgcatccagcaattgcattgattcaacgttcgatcaccgaacagatccgcagccatccattgaccaaattcaaccaaccagtacattttgactccacaaccactaagaactgtggagaagcctctatgccgcccatcgtgctggtgctcaacggccccaatctcaacctgctcggcactcgcgagcagggaccccactcg

SEQ ID NO: 561028 - DNA, 335 bp, Homo sapiens
cccaccctccccttaaaccctttgcctttgaaagtagattatgttccctgcaaaggtggacactacagggatttgtccctgggccagcagggacctttaaagccttttttggggccttttttttttcaccccgggggtttttaaagggactttcgggaattttggaatttcaaaactttccaaggtcccccccttcctaaattttaagaactttaattgccagtttcaattgaagggggggtttgtaaacttaacccccagggaaagccccgccccctttatgggtttcaagttttatttttgcaaaaaaaggggtttaagccgggttttttcca

SEQ ID NO: 561029 - DNA, 720 bp, Homo sapiens
attgcaagacagtacttgagtgggaccttccccagaatcatttgcaaaaaaaaaaccaaaacacaaacaccaaccaagtctcttttttgctgagattctgatctcttgtgttatgacacttattccccttttgggtagtacagaatgggtatgtgaaacattaaaactgttttctttcaggagagtagaaggagggtagagaaagcggcattaggaattctttttttggtttttttttttttggaaacagaggtctccactctgtggcctcaggcagggcagggggtgtgaccctcggcctcactggaaacctccgtttcccaaattccagggattctcctgcctcagcctcccgagtagctgagattacgggcaggtgccaccagacccagctaatttgggatcttaagacagcagggggggttccccccatgtgggccaggctattctcgaactcctggacctcaggtgaattggcccgccttgggcctcccaaggtgcggggatttccacggcttgacgccaccggcacccaggccaggaaattttggatatttatgtataatagaggatcgcgagctgacccattatatagcgtctcaaaaaccaggggtttagcccactcacgggcggttatttccaatgtacccaaaaccgcgcggggaattgggaaaccctttttttcggagaaatcacaatatccgcgggggggggaattgg

SEQ ID NO: 561030 - DNA, 273 bp, Homo sapiens
  misc_feature (219)..(219): n is a, c, g, or t
  misc_feature (261)..(261): n is a, c, g, or t
actggcaacttctatgtacctgcagaacccaaattgacatttgtcatcagaatcagaggtatcaatgaaatgagcccaaaggttcgaaagctcgcaacttcttcaccttcatcaaatcttcaacgaccttcgcaactcaacaagcttcttacagtgaggattgcagagcctatatagctgataccccaatctgaatcataaatgactaatctacaagcntgttatgcaaaataaataagaaacgacttgcttacagatgcnttttaattgtgg

SEQ ID NO: 561031 - DNA, 603 bp, Homo sapiens
  misc_feature (99)..(99): n is a, c, g, or t
  misc_feature (115)..(115): n is a, c, g, or t
  misc_feature (315)..(315): n is a, c, g, or t
  misc_feature (360)..(361): n is a, c, g, or t
  misc_feature (386)..(386): n is a, c, g, or t
  misc_feature (446)..(446): n is a, c, g, or t
agaactgcacctcgaagggggaggaaaagaggaagacagggcatcagcctcggacctcaggtggctgaaggagagaatgtatttggtgtctgccatatnctttgcatcccttcantgacactttttgtccatgtcactgatctttctgtcagggaaccatctgccgtgtgactggtggatgaagtaaagcagaccgagatgatcctcacatatgctgtatgttgctgccagatgtggccagagtgcaggagctggtatcaccgcctacacataaactcggccacagggaggaatggaccaagacccctgacctgnggcccagtcgccctcagagcccttgcccgctcggtatgaagatcnnggcgattgaggatgtaccccatccnctctgacagcactcgcaggaaggggggtcgcgtgttcgccgtctgtgaccagattctcanatatttctgttataaatgccttatgtaaaaaacctcagggggcccgtaccattcgctatggagcgattcatcactggcgcgttacacgcgtactggaaccttgcgtcccactatccctgcaacatcccttgcagtgcgatactccgtaatttgtctt

SEQ ID NO: 561032 - DNA, 435 bp, Homo sapiens
  misc_feature (200)..(200): n is a, c, g, or t
tgcaccctgaataatctttggctggtattttatttaaagagagctaaactgtttcaattacgccacaatatataccattctctactaaaacaattttaggaaatgaaaaatgtaggcaatggggatgatataggctgctctatatgaatgtctttcattataggaattttaatttaacttaaaatgatcaaggaaccagncatcttttctttgtatttcaaatgcatacaaaatttaagaatccgagttttttgatgcagagttcatgagacaatgacttaaattagttggtgggcaacttttactgaaccatctaaatcctgggttcagaacattacaactggaggataaatgaatatttctctggatccatggaaaaaatcttgttttgaagcgggctgcgaaaatggcttgaccctttggagtctaaataac

SEQ ID NO: 561033 - DNA, 173 bp, Homo sapiens
aaaatggtgattccggggattcactagggaagtatgggtggaagttcctcccttgatcgaggggtaacacgacaacaggacagtctttgagtaatctgtaagtagtgggctgacattatttttcgtgctacactgcaggactcaaattttgttagcccagagtgacatttgtt

SEQ ID NO: 561034 - DNA, 520 bp, Homo sapiens
tagtcttgggcctccttgtctttacctagcacatgagaagcatttattatgacttttttttccccccattgctgaacaaattactacagtattgctctacctcttgtttctgtgattaaaggctggccactgtggaaggtaggtcatatctggccactgtgagagactgtattacagttaccgagtggcttattaaggaaagtggtgcaacaatcaggtccatgtttcattcaaatgaccctccattcccccaacaacatcctcacatctgccaaagcaaattatgctgctgtgctcatttgatgatggaatcagcatcgcatgcaggctgaacccctactacggcagaaccaagaaagccactctttcccctctcctcctaagatgccaccacagagcagggtgccagtggtgggtggggagaaagacggagacacagaaacgtctccttttcactgtgattctcctaaggaatatacagtcacccccacaggaaaagcaagagttccatcaagattct

SEQ ID NO: 561035 - DNA, 1516 bp, Homo sapiens
gtgtgtcacttccggcctccctttatctgccatcttgcgtccccgcgtgtgtgcgcctaatctcaggtggtccacctcggtagacccctttgtgcaccaacctcttagttccctccggcgcaggccccctttatttcgctccgaactgacggatgaatagtaaacagatcatgagccaggaaaaactcgcctaaatggctaggcacatatgtgactgccatgtgggtgggcagaggaacggctcgcgacgaaggaagaaggtgtgttcagtagcaacaggcctactacgcgagatgacaaacatagacttcagattgctccttcacgcagttaggggtaaacgaatatctctgggtattgacagaggtgaatatgtttgacaagccaaggacacagtgatccactttaacgaccctaaagttcaggcatctctggcgagctgaaacgacttgtcaccattacgggccatgctgagacaaagcagctgagagacatgctacccagcatcttaaaccagcttggtgcggatagtctgactaggttcacggagactgtccgccgctgcccaaaaacttgcgtgactgcggagaagcaccaccttgcctactgcagagggctgcgaatggcttgaagttccccaatctgtgggacacaccttgcaagcagggggtcccacgaactatgaggcacctgtattgagcacactctggaggaataaacctggcagaagatctggggccgcgacatatattatgccgcgcgcacaacgtgtgctggactgcaacaaacctctattataccaccccggaggagcctacaggttcacacaacttggtctaccaaccgcccgcgacaatccaattcgtgaaaaacaagccctgcggtttgtttgtctcacatattccacactacttttcattatcatatcaaccagatcaacatctatacacacacgacctacccacaccagccacatcctcactcacatcacaccatcaatacacaacgaccgcaccactacacgctacgtctaacccactcacacgcctacaagcacaccagatgactatcaacacttctctacaccacactcgcgaggaggcatgacgaagacacatcgaccagacgcgagcatcccgcgcgccggcccggcagcagacctccccacagcacccggaacaaccagacacagacaaaccacaacacaagacgagagccgacacacaacagctagtaccgcatctaaactcaagatacctaatctatcctaatacaatcaaactataacaaaagataaacagtacaccagagactcgtaaatatcaaacatattacaactaaactaaagataaacgcgaatacaatacatcacaacaacacccacacagaagaactaacaactaaacagaacgcgcaaccaaacacacataatctaccaccacaatcaaccggtcgaaccaaacaccaaagaaacgaaaaaactacaacaacacgctctaccaccacaacacacaac

SEQ ID NO: 561036 - DNA, 151 bp, Homo sapiens
gatctgtacccccctgggaattgggcgacttcataggactgtctcctgagattgccttccacctatcacaaactcgggggcattttctatgctcttcttgcaattctgcttctacaagttcaagctgctccaacttctgtctgccgtttta

SEQ ID NO: 561037 - DNA, 191 bp, Homo sapiens
  misc_feature (188)..(188): n is a, c, g, or t
agaagtttgaaaaagtgaatgtcatgtagacatttggaaattccatttgttacatctttaacagaaactgctctttctctcctggaccgaatgtcacattcctctcgtccgatttcctcctgttgtatgttccgccagatcctgaatgagccattttttccgtaaacgggaagaatcacatagtttcntga

SEQ ID NO: 561038 - DNA, 1462 bp, Homo sapiens
tgtgtgaaaaaaaaaaaaaaaagagaggtggttatacatcttctaggggggggggggggaggcggagagaaaaaaaaaaaatgatatatatgaggaggggagaggagagagggtgggtggtgtgtaagaagaggggggggtgtggggggtgtgttttcttctctctctactacactacatatataataaaaacagcgagggaggaagggcgtcgtgtacaacccgcgcgtggggagagagaatatatatatatctcttctgggggagagacatatacatattatatattgtgtgaggggggtgagaacaaatataatatgagcgagcgcgcgttatgcttgcagtgtgtatgtatatcttatatatacaacacagacagagagagggtgcgtcaccaacaaaaagaagagatggcatctaaacatcacgaggcgtggcatgactccccttatatatatatatttaacaacaagagagaggtgtctcttatatatacaaaacaacagagtgtgttatttatatatataagtatgtaataaacaaacacaaatctctccctccctcctttcacaccacacgccgctcgccctctatattatctacaaaaataaatgtaagttgtccctctatatacaaaagaaataaatattttaatgtagatcaacagcaccagaatcaaaataaaggtaaatatcatttctccgaatagaggactataaatataactcaacacataatatcacatacacacactccgataatataactacacaatacataaacaaacacacaacaaagacaatcatcaccatacttacaaacaatagctctttaaacaatataaaacctcttataaattctatacgatatcaatatatacccagcttatctatatctaaataacaacatcacatacacacttctaactactacctccaccaacaccaaactcggatgtacatatagaattaatacatacccacacaaataactaatatatcaaatatatcaaaaccatatatgtaacaaaaacaaaacatatactttatattaaacacaacaacaacacatataacttttaataaactagtatatcaactatacctcaatatatacaaaacacatccgagcataccaactcacacataggtcgtcattctacttactctcttctattaacgcacagtagacaaacccaacccaaccttacttgccgaactataacaaaaaaaacacaattcgagtgacacaagaactacctgctaagtcaacaccgccctctctacatacacactacccctcacaaacacaaaacactaaaacaaaaaataacaaaaaacacaaacaaacagccaccaaaaacacctaacactacaacaaaactactcaacaaaacaatgtatcctacatcctcactcactctcgtactatacaatcacactcattcaatcatcaataaatt

SEQ ID NO: 561039 - DNA, 274 bp, Homo sapiens
tccgtactaggtcatcgcaacagaaagaagttgcaagtagcacctcctcatgccaacctcatccccaataggatcaattaggccaggctttgatgtcactgaggaggggaccagcacgcctctgaggacagtaggaaaaacctaggcaggtattagagcagggagctggggtccccaggtaactgagggccccaggatcgacatgattctgaaggttattgtcatgggtgcaggggagcaggcggcgacaccgtctaggcttcctgcgggccgt

SEQ ID NO: 561040 - DNA, 149 bp, Homo sapiens
attcgcggccgcgtcgacggattacatatgatagtaaagcccacctgtttggatgggagtagaggaagttgctgcttaccacctggggaggatacagcgcgaagatggcctgccacccctaagagaggcctttacagaaactaatcatg

SEQ ID NO: 561041 - DNA, 958 bp, Homo sapiens
  misc_feature (576)..(576): n is a, c, g, or t
ctcgggatgcagaaagtttcagataacgggcgacagatgaattactctccgcagtctcgttcgagtatatggtggtttgtcaccctcgtccagcctgttcacaggaaggatgagttctccaccggtgagattttttcccggacttttgtgggcaacttcctctgatgaggcgatttgagccctggttcttacagcgcacatctgggggaaagcccaaaggcctttttttcggaaattgggctcaccaaatgatcctctaatcgctgcggactgcttctgtacaccatacagggtgttggccctgaacgttctcaccgccaagggggtgcacccttctggatgtttaggcaacggtgagacattccctgtcgtggttatgaactttccccgcgctcccatatgcgaggccgctatcttgttggtgcccttgcagcccctcttggggaaatgctcccacgagtagtgtaatgagggggcacaaggaaagtggtttttccgtcaggaccacgatgtgcaacaaccgaatgtcccgctgcatctatggggtgtccccccgtttttgcccacaagaatggnaatttacgcacctgtatatcccataacagggggggcccccccccttagtaaaacacagggagctcttttatagcccctccccgtttataaatctccaggagtgtgggcgccccacccaacgtaagaagttgtagagccggggcaaacattcttgccattccccaacgcctctcaagttgtcacacacaaggaaaagggcgagattcttcttcaaagacaatcttgtcgtgcccacgcgctgatagtgagactctatttaagaaagccaaatgttattttcgtgattttatgtgggacacaatcgcgcaccccataagtatgtgcgcgcccgttatgtcataattaaaaaaaagagcaaaattttcccatcgacgacaaaaca

SEQ ID NO: 561042 - DNA, 221 bp, Homo sapiens
  misc_feature (213)..(213): n is a, c, g, or t
ctggtgccgtaggcggcggtggagtcgaggttgatcacggcactgttgtggcggcgcttgccgatgaccagcaccagcacgttggaaccgttcagaccgcgcaggctgtaggggcgggcgacgctgtcattggacgtaccggaagggcgttgggagaacgatggcaaggatttctgcagcgcaccgcgcaggctggattcgccagtctgttcnaactgctt

SEQ ID NO: 561043 - DNA, 270 bp, Homo sapiens
  misc_feature (86)..(86): n is a, c, g, or t
catccagaatcatctgaatcatctattttagaaaaactgaaattatcaaattaatcttcagccaacaaccttctcgagaacaacgnttaacatcctgctatattttccaggatttgacatcttcaacgatcgaaaatgtctatattttgtaaatggaaatagcactcatacaatagaatgctaaatattgaatgtgttttttctgtttccaaagttggtatgctaaatcaatgaaaaaataataataaaagctagatattttgtgacaaa

SEQ ID NO: 561044 - DNA, 139 bp, Homo sapiens
ctctataggatcccccaatctcgcctatctgtaagtgcttcctctccactaagtggctcttgcagtaacaagctattcatacattcccagtctttcagcagctcagatagcacagttcccacaatgcatcagggatacc

SEQ ID NO: 561045 - DNA, 289 bp, Homo sapiens
  misc_feature (15)..(15): n is a, c, g, or t
  misc_feature (25)..(25): n is a, c, g, or t
  misc_feature (144)..(144): n is a, c, g, or t
  misc_feature (263)..(263): n is a, c, g, or t
ggcggctcatgcctntaatcccagnactttgagaggccaacgcatgtggatcgcttgagcccaggaattcgagaacaccctgggcaacatggtgaaaccttgtctccacaaaaaatacaaaaattagctgggcatgggggcacnacactgcggttccagctactcgagaagctaaggtgggaggatggattgagcccaagaggtggaggctgcagtgagccgtgtactccagcagtgctgtactcgtgtacagtgtactccancctgggcaacagaatgagaccctgtc

SEQ ID NO: 561046 - DNA, 124 bp, Homo sapiens
cagaggtcaggctcgctccagagaaacaagtcatcaggccgctttgaatgaggaatttatcaaaatgcgcatggaggagacttcagagcctggatagaccatgaatgtgctcgcgcaatccaga

SEQ ID NO: 561047 - DNA, 223 bp, Homo sapiens
aacgggtgatgcggttggaccgaagtgggcaggtcacggtgtatggactcattgtgcggcgacgctgccagccgacggatgtgctggaggggctcaacctgctcatcaccatctcagggaaaaggaacaaactgcgggtgtattacctgtcctggctccggaacaagattctgcacagtgacccatatgttaagaaaaagcatggctctaccaccgtggtata

SEQ ID NO: 561048 - DNA, 1174 bp, Homo sapiens
  misc_feature (592)..(592): n is a, c, g, or t
tcataaacagaggctaacaaatccgtggcctcgaggtttatattgtgtggtacaaattagcacaggaggaccccagccccagtgcagatgtgttagcccaggggcgggggtgtggggggctcgcaccagtccttcgtggtcctcagtgttgggcagaaaaatattatacctctgtgaaaccctttgtgatgaggggccgtgggtatacgttgtggagcgaagccgtaacctgtggaactgtgaaaccgtggggctgtgcagcctgtgggccttggggttggactccttgggcgcttggggccttgtggcctttggggcgcgggccacagacgcctgtggagccccctgtgtgggcaaaatcacgggggcccacgagagccaccgcttttcccaagagcttgtgggggggtggcgcacatggataggcgcaaggttgagactcgagaggcttgtgcggcgctgtgacaacccttttggtggggacctctgtggggggttatagacctctcctgtgtgggggctcttttacgaaaggggcgccttgtgaaatacgcctctcggggcccctgtgttgccactttctaagtgggcnctcttgtgggaatttgtggttgggggccctgtgacgattctctctcttttaaggggcccccctttttgtgggcgggggcgcctctccgttgggcgccaaaaggcgcccaatgttgttctccctttcaaaaggggaaaccctgggggggggttcccaacactccccctttataagagaacgaatttcaggaaacatcatactagggcgagaaatcgagggggggcattcacgctgtggaatatcccaatttttttctgtgggcggccccatattttccgggagggagaaccacggggggatcaggaagaaacgaggggagagcggcgggcggacccccctagggcgggccctcttggggcggccccaggggtcgctcgtggggaaaccacaaataaaaaagccgggggggggaatccccgcgaaaagagggcgccccccctattctttgcggagaaagagcaatcctatagggggggggccctcaacccacgagagaaaactaacccacgggaagagcgaggccggggagagagacgaagcagaacaccggcagcaggaaaaataaaacacggcgcgaacaaa

SEQ ID NO: 561049 - DNA, 229 bp, Homo sapiens
gaaacggacacggaacgacgacgacgacgacgacgtcggacacggacacgtgacgacgacgacgacgacgacacacgacgacgacaacggacacggacacggacacacgacacaacgacgacgacgcggaccacgacgacactgaccacgaccacgacacacacacacacgacacacgggacacacgacacaacacacgacacacgacgtggacacacgacacacgaca

SEQ ID NO: 561050 - DNA, 1960 bp, Homo sapiens
  misc_feature (15)..(15): n is a, c, g, or t
  misc_feature (159)..(159): n is a, c, g, or t
  misc_feature (268)..(268): n is a, c, g, or t
  misc_feature (420)..(420): n is a, c, g, or t
cttgggaggtagagnagtcgtggatgagcagaagcgtgagagggtgttgtgtacgtagtgtctggttgtgatgctgtacttgtgtgtgtgcagcttggtgtggtgttggggagtgcttgtgagtgagtgtgaggctgctagtgtagtatgtgtaggggntgagagggtgaggttgaggcggatgagtgtcgtgtgagtgagtgtgtaggcagtgcggccgctgatgtgtgtttagtacttggttgttggatgttaggtgtttaggtgntgatagtgtgtggcgtgtgagttgtgttagtgttcttcttgtgtagagacgtttgagtgtgagctgagagtgaggagtgaggagtagtgggtagtagcttgggtgaggatgctgtgtgtagcagtgcagtgtggtgggtggtgtgcgggtgntgggtgtgtatgagtgaggtgagtggtgtagtagtagaggtggggtggtggggggtgtgggtgtgttgagagtgggagggtaggtggtggtgtgtagtagggttgtgtgtgtggtggaggaggagagtgtgaggtgtagtggtgtgtaggagtagtgagggaagagtagttgtggtgggtgggtgtgggtgtggaggtggagatgtagtgtggtgagggagtgtggtgggaggtgagaggggtatagtgggggtgtgtgtgtggttagtgtgttatggcagcagtagagagtgttggatagtgtgagagtggtggtgggtgaggtgaaggtggtagtggggaggatattgagagggtgtgggataggggtgtgtgtgtggggagtgagtagtcggtgggggtgggggtgttgtgatggtggaggtgtgggggatgtgagtgatggtgtgggtgggtgtgttgggtgggtgggttggtggatgatttgtgggtggttggtatggaggattggggtgttttggtgggttgtgtttgtagggaagattgagtgtgggtggtggggaggtggtggttggggggagttgagggggggggggagggagggaggtgtggtggttggggttgtggagggtgggggtggtgagagagtgtgggtggtgtttataagcgaggggggttatcaagcagatggttagatggttggatgtctctcgctgtgaggggtggtggtgcatgggtggacacagatggtacgcggggtagtgtggtgggggggggtcgcacgggtgtgtggagatatctttttgtgctgagagggatgtgtcgcacacacctagagggtgggggacacaaacgagagatgacagcgaggggtgtgtgtttatgatacagcggggcgggccctcggcgtaggttatggtgaggtgagcggggctcttagagggtggttatgtgagagactcacgcgggagggcggaggatatttgtgcacacacacagagagggagaaataatagactgctgagttctctcgcagacacactcttgtgtgtgggtattgtcactagcgctcctcgtgggggtatttgtcgactccctccgggggcgccccactctgttcttggttgtactttctctgtgcggggaatacctccgctctgtctctatagaagaggagagatatgtgtgagaggtgtgttctcagataaagagtgaggggggcacaccacgctggcgcccacgccgacctccaacgggggagcgggggggggctcccgagaggagtggggcggtgggcggaaagtgttgttgtgtgtaaagagaggtcaacttttctagcaccggataagaaacacatttgtgtggaccaccgaggaattgttgtaagagaggaccacactgctcaagagtgaaatagaggaggtgtggttcgcattaacacgtatgttctcctccccccccataagacacaaatttttttaattttctcccccaaaccttgtggccccaatgtggataaataaacattttttgagccaca

SEQ ID NO: 561051 - DNA, 540 bp, Homo sapiens
ttctgatgcctcttataatggcatgtgaagcaggatggtttcaaaaagatagggtggttctcaatattaaaaatgatcttggtttgcatgtagatctcaccgttcattgtaaatctgcagacgacgatcttggagtacatttggtcccttatctaggtaaatattcgttccgttttcgaccaaatttcgctggaagtacatcatacacatgcaggttttcgtggagaagggaatctcattcattaaatatatacgatgctgggagatcaagtgaaacagtttgtaggggtggtggtgattgtaactggagtataagagcagatgcagcatattggttggatccaagtccaaaacacaatgacaaacgctttacttgggcatgaactaatgtatgtgttttttttttttctttctatgaaaagaaaaaaaatctcacaatattgtgcgatcaataaggttttgaataaaggtcgcaattaatattatgtgtttcttttattttgtttatgaataattataaataattcgaggtttggaaaa

SEQ ID NO: 561052 - DNA, 150 bp, Homo sapiens
  misc_feature (8)..(8): n is a, c, g, or t
  misc_feature (45)..(45): n is a, c, g, or t
  misc_feature (47)..(47): n is a, c, g, or t
  misc_feature (129)..(129): n is a, c, g, or t
  misc_feature (148)..(148): n is a, c, g, or t
atagacgntgctttcaccaactttttcttctttaaacacgatgcntntatggcccattgtgaaacatatttcattttttgatttcttcaagcataagtatcattatcgatggcactgtagcagcttatngcctgccatatttgctgtngg

SEQ ID NO: 561053 - DNA, 342 bp, Homo sapiens
gtcgtatacgacctttcatgtgaaatctttagtgttgtgagcccttaaacgggacagataattgtgcatttggggaactcggattttaaggcagtagcttgctgatgctcccagctgaataaagcccttcattctacaactcggtgtctgaaaggttttgtctgcggctcgtcctgctacatttcttggttccctgactgggaagtgaggtgactgacggatagctgaggcagaccccttttgtgacttaagcctgacctgtggagcatccctgagggggactccagacaaactgagtgacgtgatccaaagagcgctcccggggggtggggataccagggg

SEQ ID NO: 561054 - DNA, 239 bp, Homo sapiens
ggtggggcccccagtagcacacaggatttcccagtaacgcggcatgggaacagttaaacagggggaggggaggggcagttacaaaggcagggcccggcaggcttgccacgttttgcaaccgtgcctttggggggcaggttttgaagcctcagcccgactcaaagggcctgaaccctgccgggccagtcccccgtttattgcatattgcccttaacgtagcatttttaataccctggtga

SEQ ID NO: 561055 - DNA, 404 bp, Homo sapiens
tggcaggaaaatcacttgaactgggaatcagaggtgcagtgagctgagatcacaccattgcactctagcctgggcaacaagtgcaaaactgtctcagaagagaagaaaaaaaaaaaccacgcaagcttaaaaaatcaaccataggcggccaggtgcggtggctcatgcctataatcccagcactttgggaggcgaggcaggcagatcacaaggtcaggagatcgagaccatcctaacacagtaaaaccccatctctactaaaaatacaaaaaatcagccgggcgtggtactgtgcacccgtagtcccagctactgggggaggctgaggcacaggagaatggcgtgaacccgggaggcagagcttgcagtgagccgagatcgcgccactgcactctaccttgggc

SEQ ID NO: 561056 - DNA, 661 bp, Homo sapiens
accccagatgcagaagaaccacagcttccagacgggactggcagggaagggcctgcagcagctaggggcctggccaatccagagcctgccccagagcccaaggttttaagctctgcagcgtcactccactggtctctgaacatccccgtcctccaggcctgagggttcccagggaggagaggctcctggcgactcccatgctgcagggggccctcccagcgggggccatgcccttctacaaacctgctcagctggcacaggcctgagccactccgggagctcaaggctagggaggatggccagaggaagcacctggtgctgaactaggcttgccctgctgtgaacttgcacttggagccctgacgctgctgtgctccccgaagaacctgacgactccggatctcagtgccgcccccaggagacaagcagtgactcagagctggtcgcacaactgtggacttccctcgtccaccgcccatcgtactcgaatcatctcgacaccacttaattccacccatcctttcagattctggatggaaagactgaatcttggactcagaattgtgtgccgaacagaatgactgtgactttcttagtcattacggatgatttaaggatatagtatacctggtccatttaaggaatgtcattcatggaagcg

SEQ ID NO: 561057 - DNA, 166 bp, Homo sapiens
cattcgagcggcgcagtttaggatgcaggaaaccatcatcaccaccatgaagtggtacatcgagtggcgtcggggtgttgtgcatcgtggatactcagaggcgctcgattattttacgtccagggtctagtagtgctaggtgaaaagaatcctgatatgtcgtccg

SEQ ID NO: 561058 - DNA, 756 bp, Homo sapiens
ttgatctatatagtccacatcttgaactatatttcacatgagtttaaatatcttttaaagaaaaaaacacctaaaaataaatcttaacagagaaaactgtgctgagaatatcaaggccatttttcctttcttgcgcatgcgttgtgtgttcacatgctaggtctagatagcgatagcttttagtagacagcggtaggtgcctgcagaacttgtgtatttctcatctttaaaatacacactacttatagctcttaaatcaaggtgtctgcttatttatactagcgtaggcaacacttggatttcccttcttagtattgcttcataactgcgtttacagagagctttgctttgtctttctcatgtatctccgtgtgttatagtagcacagtggcccaaaagaaagactgactggggtggaggctctggcctttgcctcaagaaacatacccctggagagcataccggggagggttctcgccccataggctcacggggacagtactctctggggcaggaaactgggacacccttttatttggagaacacactgggaaaacatggtccttaaatgtgaagcctttaaaccatacatttcaaatggtgccgaacacaaaaataaaatccagagtgggctgtgccgagaatatgggtgccgggttatgtgggaactcgaagcacgagaattattgtgtcctctgtgccaaacttttgttgtagtgatggatatggagtaaaaatcttgggccttttggcaac

SEQ ID NO: 561059 - DNA, 159 bp, Homo sapiens
  misc_feature (19)..(19): n is a, c, g, or t
  misc_feature (88)..(88): n is a, c, g, or t
  misc_feature (131)..(131): n is a, c, g, or t
gtgagcgcacctgggccgngaagtggagcctgtgcccggctggggcaggtgctgctgcagggccgttgcgtccacctctgcttccgtntggggcaggcgacttccaaatcccaaagggtcagaggccacanggtgcccctcgtcccatctggggctgag

SEQ ID NO: 561060 - DNA, 1808 bp, Homo sapiens
  misc_feature (666)..(666): n is a, c, g, or t
ggccgtgttcgacgacgctcatcttcttcgtgcctcgcttctctcggtcgtctgctgctgcctggcatccggctgccgcctttcttgctctgtcctccccgctctatcctgtgcttcctccgtcctctgtcggcttgcctctctccggcctggtggtcgcccgtctgtctggttctcatcggtgtttctgcttgcgggtctgtttggctccccgtgtgttctcttggatgccccctgttgctgctgtgggttctgttctctcgtgcctctgtggctggttgcctggctcgcctcgcggttctgttcttgtatgtcttttttgtgttttgtctgtggcggcctgctgctctcgctgtcgtctctctccttttgcgggtctcctcttctgctggtgtgttgttcatctcttctctgtcttattttcatgttgttgcctgctgctcagcttctcttggtcgtacgcgtcttccgccgtcgcgttggtggtgttgggtctgtgggttgggtctagctactcgtcgtgtcgtgattgttgtgtgagccccgtacaaatgttagtattcacattatacccccgcttatggggtgtgtccgagagagaccccaccatgttccccgagttttttagggggcgagccacccctctattataggggaaccctctcnctgtaaggtggagattctccacccaccagaggtgttggggtacccccacaagaataacttctccggtgccgcttttgtgtttataacccgggccccggccccccccgtgtttaacctttatatttaccccgcggttacctctcttaaaagaggttttataccggcggaggaggcccctctgtggtggtgtggccccgccaaattattccttcgcgccccaccgcgtaagaggtaattctccattagggccccccccaagaggatctcctcctataagagggtgtaaaaacaagaggaggtgccacctccccctcatagtcctcgggggggaatacattttttggctcaattcccccgcccaaaaacagttctgctgggtctgttccgaacacacaatactggtggtgtctttgtggggggaagagaaattggtgtgagacacccagagacctttgtgacacctcgggagccccacacccccctcagaggtttttgtgggagccacagaacttcctcatacaagaggccccagagacacccccctgtgtgggttgttgtcccccacaagaccttcagatatatacacacctgggtctcagagaatactccctttgggcccactcccgcgggagagaaaatgtgggaaagaaattttccctggtctcccccactgcccaccacatttctcgagaggccccccagagcccagaatagaaatatctttgggagaaaagaggttctcaaaagaggtccgcgggagtttatggagttttttagagaaaaacaccaacatttctccagagatatactgtggaaacatcttggtttttgggggatacccagggacaccaccatacgcatatctgggttatacccaataatgtgacccccgaccattggtattttccggccctggacattttatagtggtgctgggtaggccccgagtttctagccatctcgccagcaccagaagccccaggcacccggctgccattggggccccaacacaccagaaatccacgcccaagaaggaggcccatgccctggttccccccagaaatatgatgggatcatccttcctggcccaattaattccccgttctatccccaagagcccattaaaagattttccacgtgga

SEQ ID NO: 561061 - DNA, 534 bp, Homo sapiens
attgcaggatttcggcacaagttcttgtggtcccgcccaccaggttcctcaggtggatgaattgcatgggcatggcatgttaagtatcatctcacctgtaatcacccccctgctctctttatagcctgtgggacagagtgagatcctgcgcatacacaaaaagaccgtaagcaagcacctaagtcagaaaggcgtgcataggcaaagtgagtttctttttggtccatgctaattgttaaatgctgttccggacttccaagtagaagggtctaatagtcaattaaatatatggatctggatcttggtacattatgtagttaaaatgtcctaactttttagcccgcatattaatagtatatgtgcagctcgattggcatctgtgttaatttcggcaatgcctcagtttttctactaaagtaactgtttaccaagtctcgccaataagttgttccagtaggttattccatgcctacataaaagcctctctctcaaatgcaccacacctccatccatggccacccccctggaaatcat

SEQ ID NO: 561062 - DNA, 958 bp, Homo sapiens
tatccagagcacgaggctgctctctcatcttgatatctctttctctgctctgctacatctttgcattctatccaaccaattgtgttgaaggcacgacgtgggattagtgtctacactggggatcgcactgtgatgggaagaattgccatacttgcttctgggctggaatgaggccagacccccattgctgcagaaattgaacatatatccacatcatcacgggtgtggcagtgtcctgggtgtgtcttcttcatcctttctctcatccttgagtacacctgcgcttgacggctcgtcactcttcctcatctggtatcatcgtagccaatgtgccggaaggtggctggccacgtgtcacggtctgtctgacacttacgtgccaaactgcatggcaatggaaaccactgcttagtgaatgaacacttagacaagctgtggataccttggtgtccacgtccaccatctgctctgataaaactgtgaactctgactcagacaccgtgatgaccagtggcccacatgtggtttgacaatcaaatccatgaagctgataccgaccagagaatccgagtggtgtctctcctccgcaccagacttcagctacctggcttgctctgtccagcaattgccggtctcttgaaccaggcagcagttctcaggctaacgccaggaataaagtcctaacccttattgctttaacgcgggccacgtcggccagcgagatgccctcatgcagttcaagcagctccttaacaggtggcataggagctggtgccagggggctaccggcgaccgcgcgattgagaagaccacgattctagccaacatcgatgcagagtaccctaaagtccgcgccaacacaagagccggtgagcgcatccacaaaccccgaaaatacgaggccccaacccctgtggggaatcagggcgcgccacacagggtcacgaccgttccacca

SEQ ID NO: 561063 - DNA, 129 bp, Homo sapiens
agctattcatgttacttatactaacattagttcttctatagggcgatagctggttgtccaagatacgaatcttacgttcacactttaaattttgcccacaggaaccctctaacagtccccttgtaaaat

SEQ ID NO: 561064 - DNA, 390 bp, Homo sapiens
  misc_feature (22)..(22): n is a, c, g, or t
  misc_feature (49)..(49): n is a, c, g, or t
  misc_feature (209)..(211): n is a, c, g, or t
  misc_feature (215)..(215): n is a, c, g, or t
  misc_feature (278)..(278): n is a, c, g, or t
ttttctccccaaacttgatagngactcgcattgcgcccagctaaagcgnatggtgcgactcggctcatgcagctctgcctcctgggttcatgccattctcctgcctcagcctcctgatagctgggatacaggccccagagaatctttgacaacaaagttgagaatcatagccctggcgttcagaagaaggaaaggttctctggacatgnnnttgnttttgaaagggatgatccgtctcacctgaagtttcctatcgtgaggttcagtgtcatctagancaacggatgaacataagtgtcactgtggaattttacacacaaaagaagaggctggataaagaagataactgaatattgaaactgttcttttcattaaaaaatagcaaaaaag

SEQ ID NO: 561065 - DNA, 308 bp, Homo sapiens
atctgcagaggtcgcaactcctcctggatttgttcaggataccaagatactcttattatggagagaagacgatctgcacttcgacatataggcatagacatattaattattagggtccttatatatagacgggagagaaggtaaactgactttctttttttaacaggcaagggtatgacacatcttaggcaaacttggaagccaaagattgaggtgcatatcatgcctcctttggaaagtctagatcagccgcccaggctgtagtgcaatggcgcactcttggcagaggctgtgagaatcgctagagt

SEQ ID NO: 561066 - DNA, 858 bp, Homo sapiens
  misc_feature (5)..(6): n is a, c, g, or t
cgccnnataaaccactccaacatcatgacaaagagaacaacgacaaaataacaattaatcgcgtactttgtttctcacccagttctcaaaggtcgtttgaaacactggtttatcccgtgcgcactttctttaaacactctccacttggcacaaactcttccatgtcaaagtcccttttccctaatttcggtcgcacacagttttttgaaaagcgccgtccatatttcggcttagggtcctctatatgagatttatggacacacccaaacggggtcatggttcccaagcgtccccagggggtttcttgttgcccacaatggagcaaggtccttttttctagggggacagtactactagggtgggcctggctcctgactatcgtcaatgcggcccacatggtcacggattcccgtggggtccgcatagtagcccccacttgttcttgcgcgatacatattaagggccgaatagttcctccgagggatgtccttgaatcttgttggccacggtcaagaaggtggaaataaaaaacctgttcgcaaagcattctatccggcacttctcacctaccttccctagtaacaattacttcctctcccctaattatgacacaaacaactaccccgattccatttcatatcaccacaggtgactcgctcaatttctaaggtaatcactaataggttattccgcccatgatgttccccccatctctcgctattgatcaccccccccagcacttgttataatcttggctgcttttttctaaacgctaacaccacacgggttcatctttttccacaggttcctctaaaccgggacagacaccccttttttaaaaaggggcaaacaaaaaca

SEQ ID NO: 561067 - DNA, 479 bp, Homo sapiens
  misc_feature (27)..(27): n is a, c, g, or t
aaatcctttgcttttgtttgtcccagntggtacctccttttctacctggtgaagtacatctttgctgttgctcacagattgttcttcccattccccttgccgctttttgcctatcgatgggttgcaagagtctttgaaataagccctttttagcctttgataacaatggattaagtgtagcggatgcatattacagacatgaaattgcctcacctgcctggtcttagaagaccttggtattcagtcaacaccattggtactcatggccattgaggtgttgcggcgtcttcgcacttaccgctgtctgtctgttgaaattgaggatgtgaatccggccaagaccgtcaacatttagtgcctcctgtgcagctcttggttttggcgttttttgtgtctgcccatgtggtttgtagcacccagccaggctgtctcttttgaggatcctgtacacagttctcactatttaaacatttcaggtt

SEQ ID NO: 561068 - DNA, 134 bp, Homo sapiens
  misc_feature (124)..(124): n is a, c, g, or t
gtagagtagcgaatccacagtccaggtgcgttaccctgcgcgaagagtacaactctgttctgcggaaccacatgtgttgcctgtgctctctggctgcacttgtaacagccaatcctcacaaaangctgaggcct

SEQ ID NO: 561069 - DNA, 267 bp, Homo sapiens
gaaacatctggaccccgctgtgggaggagctggcagccttaatgccagaccctaggccacaatccagagggcatgctggcccaccactgggccgatgggccagcccgtgaggtggggctgcggcaggttcctggcctccgagccaacttctgccggcattgaactgctcgtgactgggggtgcacagctgggtccgttgcaagccattcagacccctcgtggcccccccgatatcccttcctgatttccttccttcacttgggcccc

SEQ ID NO: 561070 - DNA, 175 bp, Homo sapiens
caggcgcggggctttcctccagagctccagggctcctggctaagcccggggtttcgctgggagcgctggaaactcggcagccccgtcgaccctatcctggggcaaacctgccccctgcccacgtcccggggaatttgactgtgccgggaggagcttgaggtttaagacgcggact

SEQ ID NO: 561071 - DNA, 202 bp, Homo sapiens
acgaggatctgaatactctggcctgcaagtagaggctaattcgatgtgtgaaactgtagattcggcttaaggtaatagtcatttatagactattcaatagagtcagactggtcgaggctggtaagtgtagcggaacggttgctgactgatattgttagagtgaggcttgtactggtgtgtatccgtaggtggtctgcagtgt

SEQ ID NO: 561072 - DNA, 363 bp, Homo sapiens
cacgcggggcacacacatgtggcacatatctcgcggagaggggactgtgacagatttgtgagagactctctctctgtgagagcctgtgttgagagagatggaatggcctctgccgtttggtgtggggctcttgcggctggtcttggtcttgacccacacgaaccttggttaaggtaactctccgtgcacacacatttctgtgaccaaactcttgaggccaaacacacagggccggattgacggatccgtgaaaggcttaataagagaacggggctgagcttacacctgtgaaggacatcaacacattatataagggaacacaggcgcagattggccttttggcacggattggcccttcacggg

SEQ ID NO: 561073 - DNA, 237 bp, Homo sapiens
actgtccgcatgccagctcggctcaggctgttgatttactacgacttgacaggcataccccatcgcgctggctaatatttgtataatagtggaaaggggatctcgccacgttgcccacgcttgaagccggatcaagcaattgggttcttcggatttccgaaatagaccccaatattctgccgtttaccccggaggatgcagatgtaccttctctcaggccgttgagatcaggcatgt

SEQ ID NO: 561074 - DNA, 449 bp, Homo sapiens
attgtgtggacgaggaacccttggtagctgtcatgaggcgaatggtgacagcggtgcacggtagacacgggaagcgcagccaaagctatacttggcgagtgtgagggaagcaagagaagaacattctgttaggggcagagaagaatcccacactcacaagagatgaccaggagtaaacctgcctgcctgccaaaagtaggcaagatttcatgagtcaaagcacaagaccatttctgctcaaagcacagcaaacaatattagcatcagcataatagtgctggttccccagcccatgcccatgggagatgtgctgtgatgggtctagatggtgcctgtgtgcacagccttgtagccgacgatcacagtgcccagggctcagcaccctctgtagcaagcagccaaggagcaccctccctccctgaggggtgagtggcgccaagaggcatgct

SEQ ID NO: 561075 - DNA, 423 bp, Homo sapiens
  misc_feature (7)..(7): n is a, c, g, or t
aaattcnaagaaataaaatttccatttttcccccttccaagatttccatacctatccccacccgcaagccatcctgaaagtgttgcctcagtctgcagtccattacggaaacaggtacaccctatcagccccacagtcaagaagctggagaggacgggacgcttgttactcacgcctataatccccagaaatttgaaaggctgaggcaggtggatcacctgaggtcaggagttcaagaccagcctgactaacgtggtgaaaccctgtctgtactaaaaatacaaaaattagccgggcatggtagcgtgcacgtgtaatcccagctacttggaaggctgaggcaggagaatcacctgaacctgggaggcagaggttgtggtgagctgagatcgtgccattgcattccagcctgggtgacagagc

SEQ ID NO: 561076 - DNA, 859 bp, Homo sapiens
atgggacgggggtatagcccgccccacgtgggctggtaacaccgtgggccccatatgtaggagcagcgcgtttcccacaaaaatgttgccgcacagtttgggcgcacaacagaaaaccgctgcccattttggcgcccccctggagtactcgccgttatattaaaaagggagttgtaccaataccaccgtcctgggacgacaggtaatgcgcagacaccactgtttgccaccagtacacaggtacccgccgcgttcattcttgcagcgttactaataaggtgcaaaaggactccccccggtgccataaagattatcttcgtccacccctccctctgttttcccgcgaacaattttctgcccagacgcagtccctttggacacaagcgattgctgtttctcacacaagggcctatcgcatatagattcgtcaatcacggctcgcacacatctcggtagtcaatactccgtattcgtaacacacccccactcgcccgcacgttgttggggtcctgttgtatatataccacccagggtctttatgcgtgcgcagtgcagtctgcaccaccgctgcgtatgtatctttcttgccccccaatcagagagccctacaaatactgagaacccacaacagtgccgttctttcccccccgacagaggtaaagctttctcctccacagcaacgggcatgaagcacggcccccacgcttcttgataattgcgttctgtcagatgaacgtaggatcatgtttacgcccaccgatttatgccatggctgatcttgttccccgagcccatacctgactatcggtagcagtcctcgacgtcggacccccaaaaaaaaaaatacgacccacaagac

SEQ ID NO: 561077 - DNA, 926 bp, Homo sapiens
tgttgtgcgatcatacagcgggtcctgtgtggtggtttatataggccctttgttgtgatagtgcgcccagggggggcgccatgcgaaccttttgcgacccacagggtcaccccccggtcaattacaatgggtgctcacgccccgcgcggtttagtctggcccgactttctgcggactcccggccttgtacttctgttgggtcaagtcccctactgagtggtaagaggagtgtttgtccccacgccacgtgggaaacaacttggtttttacgcgccacacggcgctgtgttgccagcgacacccccatagtgggggaaaacacccctttttgacgcgaatgcccgatgccgccgtgacactaaaaaatttttgtggcgcccccctggccattcccaatttcaaactcctccggtgttcaagaacttccccccccgccccccgcttttctctgggacatctcacaaaaaccctggtttctcgtatggcctgtctcgcggtgaaataaattaacctatacgccgctgctatccaacaatagttttttgggtacacccccagataaccaccacaaaagcaagaaggtccccgacaaatttatgcgaaacaacaccagtacaacaatcgtttaaagagggaaaattctataatctatttacgctcttcaacactctcgataagtatttaatattccaaaagccccatctatttctcctcaaagatgtcctcacttaacaccagaatatacgacatattagatagaaagaccgcttgttcagatacaactcagctagatacacccccatcaataccccctcctcccctgaataatatctcacaccaccacccccggagacttgcgtttattttgtaaaaataacccaaaggccccccggtgtttaaaaaaaggaaaaacaacccacaaaaca

SEQ ID NO: 561078 - DNA, 417 bp, Homo sapiens
  misc_feature (29)..(29): n is a, c, g, or t
  misc_feature (178)..(178): n is a, c, g, or t
agaacgggaaatcccagggggtctccggnagtttgccagcccaccgctggtcctctttgcaacctcctctacctccccactcccattgtctgtgcccttagttccgaaatggatcagaaggctgtgtctcaggccagacacggtggctcacaacctgtaatcccagcacttggggagnccgaggtgggtggatcactttaggccaggagttcgagaccagcctggacaacatggcaaaactccgtctctactaaaactatagaagaaaattagccaggcatggtgggcgcgcctgcaatcccagctgctcgggagccttaggaaggagaatcgcttgaacctgggaggcggaggttgcagggagcctagatgataccattgcactccagcccgggcaacagagcaagactctgtctt

SEQ ID NO: 561079 - DNA, 311 bp, Homo sapiens
cctacgaacacgagaccatgcctctcgcaaaggatctcctccatccctcttccagaaggaggagaaggaggaaccacaaggaggaaccgcctggtgcagagccccaattcctaccttcatggatgtgaaatgccccagattgctattaaattcacacggccttttagccatccacaacggtagtttggtgtgtggctgctccactgtctctgcaacctacagaggaaagcaggctacagagatgtcctcagagaagcagcactaaagcactctagtaagatgagtggcaaccactcattaacacatttggt

SEQ ID NO: 561080 - DNA, 103 bp, Homo sapiens
atggctcctcccgcgaaatatgcttttgagaccagtgttgctccgtcacgtgctccgccttcgccaatgacgttcctatcagctatacgccagtcgtcaggcc

SEQ ID NO: 561081 - DNA, 608 bp, Homo sapiens
  misc_feature (1)..(1): n is a, c, g, or t
  misc_feature (67)..(67): n is a, c, g, or t
  misc_feature (69)..(70): n is a, c, g, or t
  misc_feature (83)..(83): n is a, c, g, or t
  misc_feature (360)..(360): n is a, c, g, or t
  misc_feature (384)..(384): n is a, c, g, or t
  misc_feature (429)..(429): n is a, c, g, or t
  misc_feature (521)..(521): n is a, c, g, or t
  misc_feature (523)..(523): n is a, c, g, or t
  misc_feature (542)..(542): n is a, c, g, or t
  misc_feature (550)..(551): n is a, c, g, or t
  misc_feature (553)..(553): n is a, c, g, or t
  misc_feature (557)..(557): n is a, c, g, or t
  misc_feature (562)..(562): n is a, c, g, or t
  misc_feature (566)..(566): n is a, c, g, or t
  misc_feature (570)..(570): n is a, c, g, or t
  misc_feature (572)..(572): n is a, c, g, or t
  misc_feature (576)..(576): n is a, c, g, or t
  misc_feature (582)..(582): n is a, c, g, or t
  misc_feature (585)..(585): n is a, c, g, or t
  misc_feature (587)..(587): n is a, c, g, or t
  misc_feature (592)..(592): n is a, c, g, or t
  misc_feature (598)..(598): n is a, c, g, or t
  misc_feature (605)..(606): n is a, c, g, or t
ngtaaagaattatctcagtcatttctctctcccagcttgaccttaggttaatatttcattctcgcgncnnggaaataatacgnggggggggtatgttattttaacaaacaggaaaatggacaaaaaattgatagtttgcctacattaaagtaagttaaattcatgtttcgatataattaaatcatgttagaactaagggttctatatacatttccattgtcttacttgggcttattctaaacttaaatgctagtgaacaaagtgttagggatatacacaggctgcttctctggggttattaccaactaaaaggcctcagccagccgctaccaccaataaaacagtctggggctgcctccnaatataatattgtgggggttttcnggggaatttttatactgtgtgcttttgtctgtgactttgcttttnaagatgtgttttactgtcacatttaaaaaaggttcatatacaatacaaaaatacaaaacaaacaccctaccatacaccaatctgacacagtntntgtggtggggttccaaaanatgtttgnngntgcnttttntttnattntntttnagtgtntgngntgtgntttttngggggcnntt

SEQ ID NO: 561082 - DNA, 228 bp, Homo sapiens
aggagaggatgagcatctccattagagagaagtgggtggctaaagagatggcacgggcattcctgtaacaacgcatctcatataattgaatgactattaaacaaacaacaatgtgcaatcaaagtcctcggccacattgtgaactttgggggatgctcgctccaacctgactgctgtcaacttcaccgttccagtttttaaatcctgagtcatgccacacaaaacaac

SEQ ID NO: 561083 - DNA, 790 bp, Homo sapiens
gcaggttcacgtgtgctcctgtcgtcagcctcctgtgttggctgtggattacaggggcatgacaggagtgccgtgcgctgcttgtgtatgctgatttcctagatggcaggggatacaccggcgttggtcctgctggtctcgaactcactggatctctggtgatctggcccgccatggaagcgtcgccgagagtgctgggattggcgggggatgcaggtcccctgaggcatctcagggcattgatgtgcattctgactctcacgtgcttcgtcgacagttttcagaggtcatgcacactacccctgaggtttcgtcctgaccgtaaagctctctatccttactttccgagctgcgcgtgtctggaatcgttgtgtgagtttctaaatggtgacctggctttctcgtgcatgtccatatctggagaaactaggtgaaccattcgatgctggatctggtgctgagcgacatcactgggacgctggaaggagatcaaggctccctcttctgcatctcattgggcaaagagtgtggcctaataagcgcctgtgagtcgctagcggttccgtatcgtaaggactgataagccctcgtgatgaaggctagctcgatgccagcggagcgaaacctaggaagcggtcgtgttactcacatgatgaggactagcaggattttctagggccaccaagggttcctggaaggttcgatttggaggggttagaatggtccataggaaccctcttgaggtagggctcaacagggcataccatagtaatcactgaaaccgtagatg

SEQ ID NO: 561084 - DNA, 337 bp, Homo sapiens
  misc_feature (99)..(99): n is a, c, g, or t
  misc_feature (317)..(317): n is a, c, g, or t
tttttttgagatggagtctcactctgtcactcaggctggagtgcaatggtgtgatattggctcacagcagcctccaccccccagattcaagtgattctnttgtttcagcctcccaagtagctgggattacaggcttgcatcaccacacctggctaatttttgtatttttagtagagatggggtttcaccatgttggccaggctggtcttgaactctattaaggtgatccacctgcctcagcctcccaaagtgttgggattacaagagcgagccacagcgcctggcctaaaaataattttctttatattaactttttnctattagtttcttaattgtg

SEQ ID NO: 561085 - DNA, 1013 bp, Homo sapiens
  misc_feature (736)..(736): n is a, c, g, or t
  misc_feature (739)..(739): n is a, c, g, or t
  misc_feature (742)..(742): n is a, c, g, or t
  misc_feature (746)..(746): n is a, c, g, or t
  misc_feature (748)..(748): n is a, c, g, or t
ggatcagcaaggaccgaattccttataaagctgtcatcaaacttgggaaggaattcaggctggaaaggagctcgaggagcagcacggcatccactgcaacatgacgttactcttctccttcgcccaggctgtggcctgtgccgagacgggtgtgaccctcatcttccccatttgttgggcgcatccattgattggcatgtggcaaacaccgacaaagaaatcctatgagcccctggaagaccctggggtaaagagtgtcactaaaatctacaactactacaagaagtttagctacaaaaccattgtcatgggcgcctccttccgcaacacgggcgagatcaaagcactggccggctgtgacttcctcaccatctcacccaagctcctgggagagctgctgcaggacaacgccaagctggtgcctgtgctctcagccaaggcggcccaagccagtgacctggaaaaaatccacctggatgagaagtctttccgttggttgcacaacgaggaccagatggctgtggagaagctctctgacgggatccgcaagtttgccgctgatgcagtgaagctggagcggatgctgacagaacgaatgttcaatgcagagaatggaaagtagcgcatcctgaggtggactccagatctgcaccgccgaccagatgggatctgactgcacgtgactttgatgaatctgcgtttttacaaattgagcagacagatataatttttttcnttnaantttntntgacaatcactcaaaaaggtggggttgtctctgttaggatccaaggattaaagacaagatcattgtgaagagatgagagagataggatactgtggaagtagagaggagaagagagagaggagagaagcgaaagcagagaaggagaagaggagagtagacgaggagaggaggagagaggcgagaaggggtgaggaggagaggatggagtagaggatgatgctggttggtgagtggtagtgttggttgtgagggatgaagatgggat

SEQ ID NO: 561086 - DNA, 255 bp, Homo sapiens
  misc_feature (172)..(172): n is a, c, g, or t
tgtatatcgatgccacaaggagcacctccaaatgcagacggtaagacatttgggaggacatggtttcagccacaaataaatagcatgaaaggagaggaagggagaaggagggttactaatgaaatggaatgtttggtatccgccccgcgcaaaattcatggaagtcccaacntcctaatggtgggcagtataacggagatgggggcctctaagggaagtcattaagggtaaacatcatggtcataaggagtgggg

SEQ ID NO: 561087 - DNA, 238 bp, Homo sapiens
  misc_feature (70)..(70): n is a, c, g, or t
  misc_feature (93)..(93): n is a, c, g, or t
  misc_feature (98)..(98): n is a, c, g, or t
  misc_feature (100)..(100): n is a, c, g, or t
  misc_feature (115)..(115): n is a, c, g, or t
  misc_feature (122)..(122): n is a, c, g, or t
  misc_feature (134)..(134): n is a, c, g, or t
  misc_feature (152)..(152): n is a, c, g, or t
  misc_feature (159)..(159): n is a, c, g, or t
  misc_feature (162)..(162): n is a, c, g, or t
cctttttaacgatttaggcctggcaaaaactttggccccaaagcctcctctttccagggggtgccaaatnctggccctggccctggcatatcnccccncnctgtggggccaggcncccctancctggctcaaanattccccagggaaaatgntgtgtgntgnccgcctgcctggtggctttcccccagccccccatcccctttggaaaaaaatgtaaaataaacctgggcccaaggga

SEQ ID NO: 561088 - DNA, 463 bp, Homo sapiens
ctgacaggtttctccatgttagattaggctaggtctcgaactctcaacctcaggtgatccacccatatatggctcccaaagtgctgggattgcaggcgtgagcaccggcctgggccaatagtaacttcttttaagacttactcatatatagtggtgtctctaccaggataagaaaatttctttatgtatttattaaggtattgataatggcccacggttaacagaatagggacaataaactctggttggggtggattggaatttttaaatatcctaaacagaaagccagatttaccagtatcttggtagcgttgggacaacttaatttagttaattacaatttgagtgttacaatttcgactgatcttttctgtcagataattttaaatggtaacagatttaaggaactgagagtttttattgaaaagtcctttaaagaagaaatttattaggtaagtgtatg

SEQ ID NO: 561089 - DNA, 820 bp, Homo sapiens
  misc_feature (273)..(273): n is a, c, g, or t
  misc_feature (546)..(546): n is a, c, g, or t
  misc_feature (551)..(551): n is a, c, g, or t
  misc_feature (586)..(586): n is a, c, g, or t
  misc_feature (620)..(620): n is a, c, g, or t
  misc_feature (641)..(642): n is a, c, g, or t
  misc_feature (691)..(691): n is a, c, g, or t
  misc_feature (698)..(698): n is a, c, g, or t
cgccgggacagtcgggtgtcgccctcagcctcctggggactcgagccggggatccctgacggtttttcttgcctaagttatttgagtcacaaaggcctccttccctgccgcctgcttcagctgggttgctggggggtgggcgtggatttagggagggggctgtgatgtacaacgtctcccctgccaaaggaggggcaaagtgctgtgtcagttcctgtttcttcccatttcctggcacactctgcccctctgtccgggggacacgcgcatgtnttgccaggatggggccaccgggttgatgccaacgctccgggtgcctgtcttgtctgtgtggcttctcagatggtggagggtgctgggagctggcagggtccttccagacagtctcagcctctccccgccgccccaacaggctgtcaaacaaaaccggagagggggtgggggagccagcctcccagcgtgctgtgcccgcaggcacccgtgtgacatccgcacgtcagctccgtgacctgtgtgtgtgtgtgtgcacaagtgagtgagagattncgaangccaccctcgatttgaaatctgagcaaaacaaganactggggtcttcctctcccccgaactctcccagntagtcttccctctgttcttcnntgctccagcgccgcgcagattttgaatctcggagacaaactagtacgtnagataantttggaggtactgtatgtattgtgtatagcgattttttaaacggagaattctgtacatttagaactcttgtaaattaacaaaaccgatccttttttacaaactgtaaacacacaaacacaac

SEQ ID NO: 561090 - DNA, 140 bp, Homo sapiens
  misc_feature (1)..(1): n is a, c, g, or t
  misc_feature (8)..(9): n is a, c, g, or t
  misc_feature (63)..(63): n is a, c, g, or t
  misc_feature (80)..(80): n is a, c, g, or t
  misc_feature (88)..(89): n is a, c, g, or t
  misc_feature (91)..(91): n is a, c, g, or t
  misc_feature (99)..(99): n is a, c, g, or t
  misc_feature (128)..(128): n is a, c, g, or t
  misc_feature (130)..(133): n is a, c, g, or t
nccccggnncactgtcggcatcatgattgggggccactgtcggcccagtggcccggccctaanaagtggtgacattgggntgacatcnncntagcaagncaaggccaatgtgcatcaaccagtgagcncnnnnggggttt

SEQ ID NO: 561091 - DNA, 155 bp, Homo sapiens
agaagaaggaggagctgctgaaacagctggacgacctaaaggtggagctgtccagctgcgcgtcgccaaagtgaacaggcggtgcggcttccaagctctctaagatccgagtcgtccgaaatccattgcccgtgttttcacagtttttacccaga

SEQ ID NO: 561092 - DNA, 589 bp, Homo sapiens
  misc_feature (382)..(382): n is a, c, g, or t
gcacgcctgtaatcccagctactcgggaggctgagtcaggagaatcacttgagcctagaagttgcagtgagctatgatcatgccacactgtactccagcctggatgacagagtgaaaccctgcctctaaataaaagaaaatagaggcagactgtggtggctcacgcctgtaatcccagcactttggtaggccaaggcgggtggatcacctgcagtcaggagttcacaaccagcctgaccaacatggtgaaaccctgtctatactaaaaatacaaaacattagccacgtgtggtggtacacgcctgtaatcccagctactcgggaggctgagtcaggagaatcacttgaacctgggaggcggaggttgcagtgagctgagatngtaccactgcactccagcctgggtgacagagcaaaaccctatctcaaaaaaaaaaagaagaaaaaacatagaaaatccaaaaagaaaaaccagaaggcctggtgggcgtataaatcccggggcgggtttctcgataaatggccctgtgctgtcagcccctgcactggactgttgccttccatggtgggtgggagaccccagagcggg

SEQ ID NO: 561093 - DNA, 230 bp, Homo sapiens
tccccgggtggggagtacggaagtaaaccagttgaatagaagaaaacacgtgattgtatcaatagtgcattattagccggtcttaccttaaatgtttttctgctgtgaaacatttcaagtatttattgatttactattttctctcactatttcgcccaatcacaactcgaccaccagtcaggcttcatctcttatgtcgattttgcccatcttgaactcgtccattcccc

SEQ ID NO: 561094 - DNA, 135 bp, Homo sapiens
gcaccttactaccagacaaccttagccaaaccatttacccccattgagtataggcgatagacattgaacacctggcgcaatagatatagtaccgcaaggcacaagatgaataattataacccaggcataatatag

SEQ ID NO: 561095 - DNA, 693 bp, Homo sapiens
gacctgacacccacatcgggtacctctgtggccagggtgacagctccatccggtactttgagatcacttccgaggcccctgtccggcactatgctctcccaggtccgttcccaaggagtccccagcggggcctgggctacaagccccaacgtggcccggaggtgaacacagtgtgagatctcccaggttctaccaactgcacgagcggaggtgtgagccccattgcccaagaccagtgcctcgaaagtcggaccctgttcccggaggaccctgtgaccccaccccaccgcagggcccgaccctgccctcacggctgaggaatgctgggggtccggatctgggcccctcctctatctccctcaaggatggctacgtacccccctaagagccccggagctgagggtccaaccggggccatggaccaccgggcgccagagggccagcacccgaggcccaatggcacatccccagctcggatgcccgtgtctcggctggaggaggagatgccggaagctcccggccccggtgccggagctcccgaagcgcttggaccggctggaggagaccatcccggcccagtagagcccccccgggcctcccaccgggtcagcccttcacacccctcccctcacctccccttccccgccccctggccgagaaaaaaatcataataaaatggctttattttctggt

SEQ ID NO: 561096 - DNA, 266 bp, Homo sapiens
ttattcagtattcagagcatgaagtgaaacaccaaagtataaaaaattaaaaaaaaaaaaaaggaatccgaaatactggcgttggttgccggcctcggcgtggacgccccaaccatggtccacgcagggggtttgcctcttaccactttccgaaaacataaggccttcaaagctcttccttgggcctgctaagattaggggcatgtgctcttataaactggctaaaatgctcaagatctttgtcaccaccctaaaattaaactggg

SEQ ID NO: 561097 - DNA, 635 bp, Homo sapiens
ctagtgttgcggcgtccgttgcttttgtgtgtcacgggtttgtgtggtgtgtgtctgtgcgtgctgtctgctgattattgtgcgggggtgtgtttccgcctatcgcgcgcgcgggtagttgtgtggtcggctttgtttgtaagtgtcgcctgtctctgcccgttcgttgttatgctacgcggggtgctggctacgtacacgtcgtgcgtttttccgcccgccttttgtttttgtgttgtgtctacctcccggccggtcgcctgggttgttgttccgccgcccggttggagcgccggtccggtgtaggcgctgattccgggcgcgccgccgtgtgttgtggtttgcgcgcgccccgactgctgtgtcttacgcgctttggttgggtcgcgcgccccccctgccacgcgagtttactcgcccctctgccgctctctctctcttcctcccgggtggtgctttctctcgcccatttgttttcttttttgattcttatgatgttttcgccgcctctcctccccgtgctggttttgctcctctcctttttgtgccctcgctccctctctgcccgtcgcccccccaccactaataaaataaataaaaacaaaaaaaataataaaaaacaaacaaatagacaa

SEQ ID NO: 561098 - DNA, 178 bp, Homo sapiens
  misc_feature (63)..(63): n is a, c, g, or t
  misc_feature (96)..(96): n is a, c, g, or t
tatgcttcagaggctttggggtcatggccaaagctgctgtaaacatttgggtgaggctttcgngtagacatgacttctcagctcctggggtggaancagccaggagcgtaactgctaccttgtgcttttacgtgtggaaggacctgtcttggaaagtgcgtcgcgtaattttcctggg

SEQ ID NO: 561099 - DNA, 220 bp, Homo sapiens
atgtggtcactgcaaattggacaggaatcagcaaagagactcactgctgtcaggttgcagcggcagagagccatcctctataagcggctgaacgtgcctcctgcgattaagcagtacacccagtgcctggaccgacaaacagctactcagctgcctaagctggaccacaagtacagaccagaagaaaagcaagagaagaagcagagacttgttggccctg

SEQ ID NO: 561100 - DNA, 807 bp, Homo sapiens
ctgtgcacgtgcctggggctggcgaacccggaaacgacgccgagtcccgcgtgcgtatccatggagtgagccaactgcgccggaggaggggtttctggccgacacgtcgggattggcgtgctgcagccagagtgtcttccgacggctgcgcttcctgtgagcggtgctctgccagatctctcggacccgtgagttctgtcccattctccgctcctcatggttgtactaggaaaactgtgctggctggtggttttcgggatggctacacggttcccagcggtgggctccgtgggcccggacactcctggaatattggcgactttccccggttcgcgtggtgacccggaaaccctaggaacgcaaggcagccaaggagctgaggctgcatagtctgctcgaagctatgtgcggagggaagacccacacgatgcaccaggtcatcatggatctggccctggatggggcttacgccaccttcatcgtgacccattactggtgatgagctgctagtcctgcgacccggattgtccggtggtggcagctgcgtcgctgatctgtgtcttgcgccttggcctccagtatgttggtctcacagcgcggctgcgtgaacccctccctcacagcgtgaccgccgcggggcgattggtccgcgccgcactattgacgcggcgccgggggggctgcggcctccttcccgggcccttgcgttcccctacccggtcgggtgccccgccttttgaaccctcttcccttttttcccgagccgcccggaggacctttgtttccccgggtcccccgtgtaagtcc

SEQ ID NO: 561101 - DNA, 292 bp, Homo sapiens
gtcaccttcaaggttgggatggggtggagagaggacacacacacacacacacacacacacacacacacacagagacggacaggtgagagtgagtgagaggatgagagagtggtagcagcaggaataggtgactgaggaatcgcacagtgacactgagagagaaatggatagagaacagtggagagatgtcagagagcgaaatcagacatacacacagagagactctgccgaagagctgcacacagatctagagactagggcagacacaccgagaggggattctatagagtcg

SEQ ID NO: 561102 - DNA, 475 bp, Homo sapiens
acccccctgtggatggtatactttttctgatttctttagaaagttcttagagccaggtccatgagtaattctgagactgtcccgtgctcacttccctgttggtgacacacacacagaggggccgggagggtggcaccagagaggccctggcagctccacgctcgcccatagctcaccctgtgcacccctcccctctggctgttcctgaagtgtatcctttataataagctggtaaatggtcaagtgtaaacgatggctttaaccgtggagactactggccaatgtggggctccggatgacctcatttttgccacagcacatcccagtgacctcagccccaaacgccatcacagtgctgcaaccgcagcttgaaccttgcgaggcgatggcccggaagtgtgtgctgtgaagcccatgggaggccggtggttgggtgcaactcgactacgaccctctcccaccagacccgtcttca

SEQ ID NO: 561103 - DNA, 144 bp, Homo sapiens
cccaagagagtatcctcttttaattttacttcccatagcgtacatgcctggacatagctcttgtgcaccgttgagaataaattgttgcgagtgtttgtttgagccccagacgaaataatgttttaagtgttatcccacttacga

SEQ ID NO: 561104 - DNA, 127 bp, Homo sapiens
gtgcgggacctcgcagtattgatggagaatgtgctggggtggtgggcacagtggctgatcgcctctgccagggggtcgacgcggtgaggtgtggtgatgaggactccgcccacgcctgcagaccctc

SEQ ID NO: 561105 - DNA, 368 bp, Homo sapiens
tcctactagacaaacacaacagattagccaggcatggtggtgtgcacccgcaagtcccagctacttggcgagactgacacacgagcatagtcacttgagcccacgtaggcagagggtgcagtgagccaagactgcgccactgaactccagcctgggtgacagagagggactctgtctcacaaaaaatgaaagaaaacaagcctgaggcacgaggatcactggagcccaggagttccaggctgcagtgaaccatgattaccactgcactccagcctgagcaacagagtgaaaccctacatctttaaaaaacaaagaaaaagccaggcgcggtggttcgcacctgtaatcccagcactttgggaggccga

SEQ ID NO: 561106 - DNA, 1077 bp, Homo sapiens
ttaaatgaattgaaagggaaacgtcctagtactctgagtttccctttcaagttcatgtaatttcgaacaagtgtgtgaaagaaagaggcgagtgaaacaaatactggaattacagtgaatggaaaagggaaacatcaagagtaggtagggacgttgataaaacaggaaaccaaatgtattgaaaatgtgcgcgtaatcaaagaggaggacgaaagataactatggtaataactatggatctagtagaaggtcaacaggaaacactgtggacagatggcatagtacattatactattactataatgagtagaaaggaacgtaaataacctggacacacagacgtaaccaagacaccaaaatacacaacaacacagcagaaacacgacaaatatcaacaatgaagtcctctaaccacaggggcatagaacagaaccacacaaaaaaaaaagaacaaaaaaagagacacgacacacccaacaccaaccacaaagaaaaagggagagacaaacaaaaagagctacacaagagaggcgaaaacagggaaacggagaaacacagaaacaaggcgacaacaggggaaacaaaaataacaacaacaaaaacaaaaaaaacaaaaaaaaaaaaaaaaaaaaaaaaagagaaaaaaaaaaaaaagcaaaaaaaaaaaaaaaaaaaaaaacgaaagaaaaaaagaaaaaaaaacaaaaaaaagaaacaaatttagaacaaaaaaaaaaataaaacgtaaacaggaaaagaaagagaaagaaaacaaaaacaaaaaataagaacagagaatagaatgaaaaaattaaacaaagaattaaggaaaaaaagaaaaaaaagaaagaaagaaagaggaggaaagaaagaagaggaaaagaaggagagagacgaaaagaagaaaaaagaaagaggtgagaagggcgagaaaagaggaaacagaaagaggaggaaaggacgacgagagaaggagaggagagcaggcagagagagagaggggggagcggaacggcgggggcgaaggggaaaagagaaagaggggagaggaggagaggaggacgggagaaagaaaag

SEQ ID NO: 561107 - DNA, 688 bp, Homo sapiens
atgactcgtggacccacgtttgtggtggcaaatcaagtcaagtacagtaacaacagacactcacgctttggctctgacacttagcgcatcgattcacaacagaagatgctgaacagtggaagttcagtgcacaagactaaaacctagcacacaggcactaagagactacacttttagataagtatacatattggttatgaccacttagaagggttttctgtagtgcttccctcatcccagttgactacctccgagatgaggggttgtcggtgtactctgattggagtgaattgatagagcccactggagagttggtgctctggagtgggggagccagcagaggctctgtgcagggttggccaatctgttgtggagtctaaactgcagggcctgtgtactgatgtgtgctgcagttgttgttttatgggacctggtgtggttacagctgtttctaggtgcctagtctgtaggcaaaaaggcatggtcagaacgtttgctggcgtggatttaggtctgaggtctgccgccacgcctttcagaatgacaaatccacagttaaactacaggtctagttcccctttgacctgaaaagattcgtatattaaaaaaacactagtggcctataaaagtgaacaatttatcatgcttcccagttcgacactggtccttaataacttcttttgtgtac

SEQ ID NO: 561108 - DNA, 392 bp, Homo sapiens
acgcatcacacgtcacaggggaatccccaggctaaacgggccactccgaaccgtagcaccaacccagcacgggaggtcactcccttgaccatcagtaaaaatcacagagcagtcagcgggcaccagtaagaacaaaggaggggaggacagagcatgaaaaccaacatccatgccaatgaaatgtaattggcacgctcctcacccccaaatcttacatctcaagtgccatcctaaaacgcactcatactttatgcatccccgcagctacacacacacaacacacagcacacgcatgaacacagtacacacacgagcacagcacacacactagcataccgcacacacacaaccgcacagcacacacagaacacagatcggcacacattatggag

SEQ ID NO: 561109 - DNA, 425 bp, Homo sapiens
  misc_feature (32)..(32): n is a, c, g, or t
  misc_feature (85)..(85): n is a, c, g, or t
  misc_feature (121)..(121): n is a, c, g, or t
  misc_feature (135)..(135): n is a, c, g, or t
  misc_feature (265)..(265): n is a, c, g, or t
aaatcttttaaatctttgttacccgactttantgcgcgaagtggtcagtgtttctggctttcaaactttactaaaggctcagagnaaggaaaacccaaggcagttggtggggaggaagagnataaacaaatagcnaaagtcacatagatatcaaaccagaaaggactctgcctgagctaggattgagcctgggccaccattgtaaaatggcggaggctaaacaaagcattgccacatggttacaggtcacacttccaaggacgtnaaacaagatggaggcctgcagcaaagtttgctactgaccatacagaaagacatgcaaagcacaccagattggctaaagcttaagcccaacctcacaaatcctttttcataactaaaactttacatagaaagaagaagcagttttccttatcattcttgaa

SEQ ID NO: 561110 - DNA, 352 bp, Homo sapiens
  misc_feature (174)..(174): n is a, c, g, or t
  misc_feature (303)..(303): n is a, c, g, or t
  misc_feature (336)..(336): n is a, c, g, or t
ggcatctgtttttttgtttgttttgagatagagtctcactctgtcgccaggctggagtgcagtggcgtgatctcggctcactgcaatctttgcctcccgggttcaagcgattctcctgcctcagcctcccaagtagctgggaggtgtgcacgccaccacaccccggtaattttngtattttttgtagagatggggtttcaccatattggcaaggatggtctcaatttcctgcgcttgtgaatccgcccgcctcagcctccccaagtgctgggattccaggcgtgaccacggcgcccggccggnatctgtagattttaaaaggccccagtggttctnatgcacacccccagag

SEQ ID NO: 561111 - DNA, 369 bp, Homo sapiens
cgcgaactagtatttattccacaacagctcaagctatttgctgattcaaagaggtatttgaaatatgagacttctaatggcataatattgtttgtcagtgtacactcaatattcttctacttttattaagatggaattagtctggttactcagataggtcctttcatcacgaggttttgtagcccgttgtggtatgtcctataggcgccaagattcacttttccctgcggatattgttcttgttggatcaatcaccattgctacaaatggttcctggcaactgctgattgagcatctgagtactaacatcaatcccataaagccagtagccatagcctaggatggatattatagcacccgattgcattt

SEQ ID NO: 561112 - DNA, 538 bp, Homo sapiens
  misc_feature (528)..(528): n is a, c, g, or t
cagataagtctttaggtatattgtgtaccaaattaaattagaagacaaaaattgtgctttcatagttgctacaaaggtaaataatggagagatttggtacaaaacaacaaaatatatatatattctcatatatatatatatagctgataaaattacctgaggagtgtaatgcttatttttttgtgtatatctttgcaatctattttatatatattgacaaaagagactgtgaaatacttagccatgcagaatatgtgaccagaccagagccatgtgaaggaacacatggcgagtatcagtatctagatctcataagacacgtccttggaatatagctgcgtttacctgcacatcaatcagtaatattagcaaatctccaaatgttagtcacaatgggttgtctcccttggacattctttaatcatgatattacagttccggaactgggtggtcctttttaaacaaaaccgtgtttgcaaaaccgagggtaatactccctcctaaagcttttggtaataaagggttacnaatggttttt

SEQ ID NO: 561113 - DNA, 1217 bp, Homo sapiens
  misc_feature (297)..(297): n is a, c, g, or t
  misc_feature (405)..(405): n is a, c, g, or t
gtggcggcctgggaccctgtacacgtatcctgaataactggtagggccttctaaaggctcatcatcgtctgctcagtacagcgggagctcaggtccgcgtgctcatccggcaccgagcccagcttgccagttatgggccaagaagcgagaacgcaaccgccgtggacatttctcgcgctaatagtttcactgccggtgacagggtcccagtccatttgcagggtgagtgatggattctgtgtgtattgagagcgacgtccatttgcactgctactgtgagcaacttgatggatgctngcgagtgcaagtactccagaagagcaagcaagccccagtgttagttgcacgtggagtgatcgctttgcttgatatcctgatactagtgcccccattccatgtaacctnggtgtagttcccacagacttggggcgatcatggtcacccagaaaacgaggacgaggccacttggagtagagtgccacacatggcagtgaaagtgaggggccgacaattctgtgggctgtcctggcatcgcttaacttgaagtaccgaggaccttccatcgggctgcggcggaaacgaagtgaccaagttttggcgttggagcagtcacaacgtaatgtacttggcaatcgacgtagtcaggtaggctcgtattacagcaggggtttctatcgaagcctttcgtttttcccaggcccaagggaacttttgccccaagtagcgcaaaacggctaggttattcatccaaccgtggacgatataagcccagccccacaatggtttcgctgtgggctgggttcttcttgggcgcgacagatgagaaagcctggtggcttgagagaaaccgaatggggcgcccacgtttgtggagttgccgtagccctacgtttgtggcagggaggacccccaaagtcttaaagcaaaagctgcacgcatgaacccacacggcgcatagagggaacggaaaagggtgctttccaatacgggggacactgaacggacatggcgcagaaagggccccctcacgcgggttggactgccgggaaacagagaagggaagcaacacaaacaacagggccaggcgttggcccccgtgggcttccccttgaagggacgcgaacagatttggggaattgacaagttcgttggacagcaaaggctcgctgcgagcattgggctgacggacaccagaatgtgtgccattgggacagcgc

SEQ ID NO: 561114 - DNA, 440 bp, Homo sapiens
acgatggaatatgtgtccatgaaaacagtaaacaaaagagctggagtggttgcagtatagactaaagagactttaagttaaaaattgttactggagaagaaaaggacattttataatgactaaagggtcactccatcaaacaattataagcatatatgtacttaacaacagagcccagaaatgcatgcagcagaacttgacacatttgaaggtattcataggcgattcatcagtaacagaaggaaacacttcctaactcattatttggagccagaattaccctgataccaaagccagacaactcacaagaaaactacagaaagctatatcccttatgaatatatatacaaatatcttcaacaagatactagcaaaccaaatccagcagcatataaaaaggatcatacaccatgacaaagtgtgattaatcccaggaatgc

SEQ ID NO: 561115 - DNA, 265 bp, Homo sapiens
accagttgtccgagttattagaaaactatatatagaactaccatatgacccaacaattgcactcttgggcatatatgcgaacaaaactttccttgaaaaagacatatgcacccgcttgttcactgcagctctattcaccatagccaagacatggaaacaacccaaatgtccatcgtcagatggttgaattagtaagatgtggtatataaacacaatgaaatactactcagccatccaaaagaatgacataactcggacaactcgt

SEQ ID NO: 561116 - DNA, 116 bp, Homo sapiens
aggagtttatacggagctgttcatgacacttaagtgagacatgagtgcaatgtaaaaggcccagtacctagccgtgcatggattgcttcattaccttttccatacgagaaaccaca

SEQ ID NO: 561117 - DNA, 428 bp, Homo sapiens
tactgttagttttattattttgttaaaaagatttttataatggctaatatctgaaagctatatttgatatttttgctatagttttcaaataaatgtttatggaatacctataagtgaggtactttaggtgattttttttggcatttatagatatagattccttcattattttaaagctcaccaaggttattctatatttgtaattattaatgctttatctgataatatcatcagggcatgtataccttatatttaatgtgatttttttaagcattgatgtttgattattaaaacttccataaatattaactttattctaagacctccgttaaatataatccttaattcccatgagccatggttttggtaattgattgaactgacactgctgcttcattaccaaagagcctaggtcatttgtaataggg

SEQ ID NO: 561118 - DNA, 399 bp, Homo sapiens
  misc_feature (14)..(14): n is a, c, g, or t
  misc_feature (169)..(169): n is a, c, g, or t
ttctcagagggggnagtcaatggggccagaagactgccccagagtgatggcaagtctaacaactccttccaggcagctggagacattagtcaggcactgtgacacaggggcaggtacgcagggcttgcacggaggcttcttggagaccagtgtgagttcaggaggaccntggtgaggggctggaggacagccccaaagactggtgtattacagccactgatgctgcaggtaggtaaacaaagtgagcttcactctccgaactgcccagagatgggcccaatggctaatgttatagtgaaccaagaatggccagggggcaggagcctcagctctgccctctcccacagcagattctagtagccgatttgccaggtcctcggagccttctggaccccaaac

SEQ ID NO: 561119 - DNA, 1222 bp, Homo sapiens
gtctttgcttggccgaatggcgttccgtctccagggctgtaccggctgctacgtgcctagctctgtcgcagcttccaccgacaacttcgacccggcaaaggcacatgcaaaggcggctcgagatattcagggcgtgagacgagtcaggattaggacttgtgccttgtcggtctactatgaagaagatgactcagggcactttcatcagatacagtagacggagcaagggacactgagagctatgttcatgggactgctgtctgagtgtctagctagtagaaagaatcgtgttgggctttccggctgatcttgcttgtctcttcgagcaaccatgggatgctaattgcaattgctgctccttatggaatcaaaggtactcaattgatcaagaatgggacagttgcatgcaggaatgactcgttcagtccactgttaatcctatttagaatacacttcatttctacagatgcgtgtctatccattcacagcctttatactaatgggcgacagttccgtagacacccgagggctcttcctgcaattactacacgtttaagctatcgcaattgttgggcccatatgaaagaatactagtctgtctctcgattattattgaatccccggattaagagagaactggccccgaagggattctactcgtgcacctaatgggggccatacagaacttgacctcccttacaaattgtattgggaaaggtccaggaggaggacacaaacgggacttctgggccccctctgaaagccattggaccacaaagccaaaatttttcgaccctttttgaaggtaccattggtcttgcactgaaggtgccccggttgtggtccttttcaacaaattttccacatcctggattcaattgttccttaatggtgggacaacttgacaccagaagtccaggctggttgcagcattacagcattgaaattggctccaagcctatgccagcagccactcccattgggggaagaatcctacagtaggcttgatggaccaggagtgggattgacactgaagccaagacttttaggttaacttcccacacattccatttaggaaatccttagtaaaacaacaggcagcagaaacattccagtaaataagcagcggtccgccgacaggcagactatttcagcggccagagccggaggaagaacccccggtcccccgtacggaggccctgttccaaatctttcaaccacc

SEQ ID NO: 561120 - DNA, 410 bp, Homo sapiens
  misc_feature (51)..(51): n is a, c, g, or t
  misc_feature (74)..(74): n is a, c, g, or t
  misc_feature (82)..(82): n is a, c, g, or t
  misc_feature (96)..(96): n is a, c, g, or t
  misc_feature (150)..(151): n is a, c, g, or t
  misc_feature (168)..(168): n is a, c, g, or t
  misc_feature (183)..(183): n is a, c, g, or t
  misc_feature (252)..(252): n is a, c, g, or t
cttttatacaatgataaggacatatcatttgtttacaaagaaagtctaaantttccgggacattcaaagggctnacacagtnaaggtcatgcaagncctagaatagtgaatcatgacaggcctcattcattttctcctttacctccaccnngcccatctccttaacgngaaggcatctcaagnccaggagcttgtcactagtctgatatttcattcagggatattgggcctgttagcacgtactggcttggnggggggtgactcaaccctaactgtggggaagggttttctgggggggctcactgctgcgaaatgcatgccctgtattcatattgtgttatacggtgaacatgccacatgctttcatttaagtccgtgtgcgtaacacccggaccagggatctcagctat

SEQ ID NO: 561121 - DNA, 321 bp, Homo sapiens
ggtcgacgtttgcaatgagctatgattgcaaacttgaactcctgggctcagatgatcctcctgctttagcctcccagagtgctgggattgcaggtatgtgccactgcacttggctaagcatgtatttttaaaaccagtctttgggccgggtacagtgggtcatgcctgcaatcccagcactatgggaggctgaggcaggcggatcacaaggtcaggagttcaagaccagcctggccaacatggtgaaatgccatctctactaaaaatagaaaaattagccaggcgtggtggtgcacacctgtaatcccagctacttggtcg

SEQ ID NO: 561122 - DNA, 538 bp, Homo sapiens
  misc_feature (1)..(1): n is a, c, g, or t
ncggtgaacactccgccttacaggctcctctctacccaatactataatatatcgtatagcgcattccctaagatttgctccttaagtttcattctctccctttatattctaaacatttccattcctattcatatttcagttttcatcatctaaaccaatcctatttccttgcttctagctctcagctctaaaattccattgcctggctttttactatactagacatcgccaaccacataccaagcaatgcaatgtaaggcactcgtaccccatatcattttcatcttcccctctgaacgttctgcctctcctaagagctacttctatattcaattgtaaaagttaggtcagaaggaaaagtcaggtcagaggaagggatgctgatattacggtccgttctgctaccttgtaatacagcacagtgcactggtgaaatgaatgggcatggggagactagaggaggatagattacattaccacgatcccataaagaaaagagaaccacctgtcatatatgcgatacatgagacaggccaga

SEQ ID NO: 561123 - DNA, 960 bp, Homo sapiens
  misc_feature (343)..(343): n is a, c, g, or t
tcgttggatagtgatgagagtcgtacaagagccctatgttagtgctgtgtgactgcctcgggacggcgtttacttatgggctccccgcgcgcgctttgggagccgccactttacacaatatattccggccgcccaaatttcctggttgccctttcacggtatcccgggctgttttaaatgtgccccccctcaccccccggtatattcgtctgttaaggccccccgaatgtaggggttcccccccaaaatggtgtttgtacacccacccgcccgcagttgggtcttaatactttgccgccgcttgggggtatatccctcccagatattgggccgcggccttgtntcatagtgcagctcttccttggccccccccccacgggggggcccacccctaggacgggttcgcccaagaatgctgggtagccaattgttcgacgggccctgctccccggtccctccaatgatgtccacggcgatgtgggcgcgcactcgtttgtctgaacttttcctctgtgcctacccagttccatcgagcaatgggcgacacaccctcgcggcttcatataaaagattctttgtccgcgccctcttttcaggattgcacttatgccacgacgccccccggcgtaaccttggtcaaccctcgtggccaggccatgggccactgtttctaccacgagggcttcaagtaggcttgccagagtgcaccacccacatacatggggttaattattccccactaatgcgggaggttaccagacacccagcggacattcctccgggctgtatactggaggtgtgcccaccgaggacccactttcgctccctctagagcgcccccagtagcccaaagtggtgttttccgctcattcatggaagactcaatagccattgtgcgtacctacaaggggttttatatccccgggggaaaaccgcccccccaaacacaccaacataaca

SEQ ID NO: 561124 - DNA, 305 bp, Homo sapiens
ctcttgggttcgggtgattctcctgcttcggcctcccgggtggctgggactacaggcgcgtgccaccacgcccagctaattgttttcgtatttttagtagagacggggtttcacagtgttggctaggatggcctcgatctcctgacctcatgatcctcccgccttggcctcccgaggtgctgggattgcaggtgtgagccaccgcatctggctgaggctgggaacattcttgagtgagaattcttttatggtgcaggggaagaaatgggcatgagatcagcctttgagctcactttgttctgcgc

SEQ ID NO: 561125 - DNA, 201 bp, Homo sapiens
cccttcaccagccacacaccacacccagctaattttgtgttttagtagagacagtatttcgccgtgttggccaagctggtgtcgaactcctgaactcaaattatctgcctgcttcggtctctcaaagtgctgggattataagcatgagctgccatgaatgcagtgaaaaggaaacaattctacactgctggtggaagggag

SEQ ID NO: 561126 - DNA, 124 bp, Homo sapiens
ttttttcccttttttaaccccaaaaccaaaaggggagggtttttcttcccgggaattgttttttttttccaaaaaacccggggcgggacccttttttttttatttcttttaaaattttgtccca

SEQ ID NO: 561127 - DNA, 461 bp, Homo sapiens
  misc_feature (453)..(453): n is a, c, g, or t
atctgaatagacatttctccaaagacataaaaatagccaacacgatatatgaaaagatgctcaacatctccaatcagatgaaatctgattgcaattagagaaatgtaaatcagaactacaatgagatatcatctcatcccagaatgctggcaaggatgtgggaaaaggggaaaccttgtacactgttggtgggaatgtaaattaccacagccactatgaagaacagtatggaaattcctcaaaaaaactaaaaacagaattaccatatgatccagcaatcccgccattggatatacatgcaaaagaaaggaactcagtatatcaaagagatacctgaactctcatgtttattgcagcactattcgccatagccaagatatggaatcaacctaagtgtccaccagtggataaaggaaatattatacacactcatatatatataatttccccaantacacgct

SEQ ID NO: 561128 - DNA, 468 bp, Homo sapiens
cacgaggcgtctcctacactgtcgcgaaaacagctggcggcgtgaccgcacggcgatgacgaaaaacgtgtcggaggaggacgggccatgcgattcagggacgagttttcgcaacacatgaggcgggtcgccgcggcgtcggatgcgcgcgctggcgcgctcgcgctggcgggcgaggagcgcatcgccgattcctggcggcgctcgatggagctctaccgggtggatcccgaagtgccggcggcaccgcgcatcctcagtgcggcggaggtgcgcgagcgctgcggacgcatcgaatccttcctgcagctcgcacgcctgggcgtcgggaagctgcacagccagatcaaggacgccggctactgcgtgctgatgaccgacgccgacggcagcacggtcgatttccgcgggctgccgaacatagatcacgaattcaagtcgcgcggtttccgtgtcggtgcctgctgg

SEQ ID NO: 561129 - DNA, 155 bp, Homo sapiens
  misc_feature (1)..(1): n is a, c, g, or t
nctaggagatgtgtgatcacaacagagagaggcacctggatctttgacgtggtcacgtgaaagatgcaatgcacagcttgccactcgactttccacattttggattggcacggcaacaaaccatggattctcttccccgaggaaagggtatcggg

SEQ ID NO: 561130 - DNA, 186 bp, Homo sapiens
tacgccacctccaacgtgttcagcgccagcggcgaccagaaccagtacaacgacatgaacggcgtgatgttctgcgaaaccccatggctgctggatgccaacggcccgctgcgccgccaggtcaccgcacaatggccaccagccggcggcagcctcggacgcttgtatgccatgggcgtcgacgcg

SEQ ID NO: 561131 - DNA, 368 bp, Homo sapiens
tccgtgggattagcctttatggttgcacccgccgcgcccacgtgcaaggaatttagctcggcttaggccccgcagctcaggtgccgcgcccacgtcacgtgacgcgagggcggggacgcgctcgggagcgagcgtgggagcctggaagcctcggtgggtcccgaggatgcagcgagcccgggcccgtcccctgtgctggcgggatctggcgtttgcgggcaccccgcaccaaatcccggtctcggtggtaagggaggtgcagtgtcctgaaatgcctgcaacagctgtgtgcaataattcgtgcatagaatgcgcccagtaaatatgtgttgcgtgcaaaaaagaaaaaaagaaaagccgtgcggccg

SEQ ID NO: 561132 - DNA, 740 bp, Homo sapiens
  misc_feature (186)..(186): n is a, c, g, or t
  misc_feature (388)..(388): n is a, c, g, or t
  misc_feature (740)..(740): n is a, c, g, or t
ggaggcgcacagcgctggcacagcgtagtgctgccggcccagactccactccccaggctgtgcacataggaggagctctacggtgactttgaagacttggaaacaggggacgtgcacaagggaaaatcaggccccaatactcagaatgaagatatagagaaagaagttaaggaagaaataaacccngagcgaaggaacgataagtgccaagacaaaagcatttggactaagaagagaaaattgcatggacgatgtttgatgtggaagtatgatgataggcagaaagctacatactttgtgatggatcttgaaaggaggaaatggcggaaacgaagcagtagactgaatcattgcagtaatttgaaagcatcagagatgatgtaagccntgtagttcgatgtgatgtaggcgtttctccgactctggggatggtacgtcatcgcagttgcagtattgtaaagatgttcccatgtgcaaatattgtcgtaaacaacattggcaccccccgttgtgaccccgagtgtattccctgggatgggctctggagcaaatcagacggcatgcggacaattcgttgagactatcggatgcaagaatagcgatcgttgaacaggacataggatcagatctgcgctgataaagcagaaatctcgtccagaggtccccgggagaaatcctaatccaatgattttcccctgctagcgcgtgggaggggaagggtattccaggtaacaattccn

SEQ ID NO: 561133 - DNA, 880 bp, Homo sapiens
gagagagagagagagagagagagagagagagagagagagagagagagagagagagagagaggtgtgcacggtggtttggtggggaacactctccccgagtgtgtgtttcctctctctcggcgcgcgccccaaccccggggtgttttggtgtgtgtgggacaagagactctgtgtgggagagagacgccaacgagagcgcgtgtggttattccgtgacgtcgtgtgtgtcctcctatttgcatgctagttggtatctgtcacactagtcgtgggacgatgtaggaatatcatcgtcggcaaacacattctttcataaaagcaagagtcgtctgtgtgcgcccggggggcacacccgatgtgtttggtagagagagcgcccctcgtgacacccccaagggcaagagaagaagatatagtgatcatcatatttagtgtgagagactctataaacacccgcggtagtagtgtgctgtgctactactacaggggcgcgcgtcgtcctctctatgtcgtgtgcagcgcaccgacgtgaggtattgtcagtgcgtctaatgagagaacgggtgatcaccacaaagtgtgctgctactatattaggagggactacggctctccccccacgctacgtcgtatgtgtgtatgtgtgtgggccgataatctgacgctgtctctctcataaatactctctgtgagcgaggatagtgtcttcaaccacaggcggcgcgcgagaaacgcgcgcgcaaatatcaagagaaaaatctgtcctatctcgcctcatgatatctcacgagagagagtattggccccgcggacagtactcctctccttttttctgggaagaaagaaaacacacaagctgcgccagagtggacacggatcc

SEQ ID NO: 561134 - DNA, 859 bp, Homo sapiens
acatatgaaccacatgttgagaacctgcttggatcattttgcaacgatggtcattcgtagaaggcagaggaaccactcatgctggtatccactaagtatcactctaaatgttccgtaagtaatctggctaacaccttcttaaacatggttagttgctatgtacaaggaatctctttattggtacaccactctgtggtggctggctagctagtgcctaccgaagcatagttcgcctctatagaaggctatccttagatcatgtctcatatggaaacattcttgcttgtcttagaccttacttgaatctttgacctgataataaagtagagcattatacattgaaagcgtctgatcaacggccctgaaatttcccatctctgaatgtctttgtatgaaactgcagtttgcttatatagctaatcactagcatcggtaattgttccatgaacttcagccgtgtgatactcctgcaatggaagtgttatgtgatcgaagcaaatgtgagtcgtattattgttcaatggtggtcagagtgactttaatctgatcatgcgtgatccgctcatccctgtatatagagtagagtgtagtcattttaactttacttgtcatatcatatagctaagcttaggtctaatgctatagtctctagcatattgagttcggtggtaatcgacgtcatacacggtctttttttttcacaggtccccgggattgcattgtgcagctggctagtcatctggcgtcggctgaaagcactccttgggaacaccttcgagagtccgcctttttatgggggaacaaaccactaaaaacataagaaaatgggggggcgcacgcgcaggaaagtcatagaccg

SEQ ID NO: 561135 - DNA, 223 bp, Homo sapiens
atttatcctgtgtgtaacagacagattcaattatagcttaaaaatgtacaattattattgactgtagtaaccttgtagtgctatcaaatactaggtcttagtcattctacctttttgtgcccattaacattccccaattccccctcatcctgcccgcactacctttcccagcctctggtaaacattcttctactctctatctctagaagtacagttgtatata

SEQ ID NO: 561136 - DNA, 294 bp, Homo sapiens
cccccccttttttttttttgggggggtaaaaagggggggggctttttttttttgggggggccccccgggtttttgggacccccggggccccggggggtttgggttttttaggccaaaaaacccgggaaaaaagccctttttttgggggggcccccccaatttggcgggggggggggggggggggggtttttcccgggttcccccccccccccggggttttagggggggggggttggggccccccccccctttttccccggggtttttttgggccttaaaattttttttccccca

SEQ ID NO: 561137 - DNA, 82 bp, Homo sapiens
ggggccgcgctttacatgggcctgcgctttacaggtgccgcgctttacagggtgccgcgctttacaggggccgcgctttaca

SEQ ID NO: 561138 - DNA, 240 bp, Homo sapiens
gagatggcgtcatagcacaccagcctgggcaacagggcaagactctgtctcaaaaaaaattaaaaaaagaaattttttttaaaagcccagtttttttaatggactaaagatttgaacaaaacacttcacaaacgaagatacacggttggctaataagcccatgaaaagatgctcaacgtcactagtcatcagagaatgcaaattaaaaccacaatgagaagctcctacactcctgctaga

SEQ ID NO: 561139 - DNA, 1150 bp, Homo sapiens
cgatggaaataagggattggggtgcatgagatatgaggttggggtacttgtccctcctctagaaaagtgggacttggtacgagtgaaggagaaggggttgaggggtacttgccccctcccagaaaagcagagaaggggtagagacaagaagacaaggggttcggttacttgccctgtccctggaaaagcagacgaaggggtacgagacaaggagagaaggggttggggtatttgccccttccccagaaaagcgggacttgcccctaagggtgaaggaccaaggcaggcgtccttgtgtggtctgacacccttgaaacgtgggcgtataatcagagaggtgtccctgcagtgattaaacaccaagggaaggctgccttcccagtccgtgaccggtgccggagtctttgggctccacggcataaaaacgtgctctccttatgctctctaccagaaacctgcaccaggccattcgcaacttcaagcagccaaggcgagaccattgcacgctgtggtgccaacgcatcgaacaggcacgaacagagcattgcgcgcgatacgtgcacgggaagcgctcggacgcacagacgacgctaacacaacgattgccccgctcacccgcgacctcgaaaacctcgggcgacgacctgtccactccgcgccctcgcgctgggcgctcctggacggacccttgaccgccggcccggctggactccccctccacagcgcgccacaacgagcccggaggacgcggccgacttgactctcctaacgggggaaggatccccctggaatcccaagctcaacggggcaccgcaatcttccatgcgcgcagatccagcgcctgcacgcagaacgcaagcaacacgaggcgcatacgcggctcgagcaccatggcgcacgagcaacgacacccctgcgcacgacaaggcgcggaggcacggacttcccgaacacacgacagctcacgccgcccctggacccaatcgagccggcgcggcgccccgtcgcaacacgcgccacgcgcacacgagaacgaagaacctacagcgaaccagcgcagtacgtccccactgcgacgccgagagacgtgacgcgcaccgacgggcgcaacgagcgcgcacccaacgagaccacgaagaacaaaggaacc

SEQ ID NO: 561140 - DNA, 107 bp, Homo sapiens
  misc_feature (22)..(22): n is a, c, g, or t
gatcctaaacaaagctctgatngctggggggcccttgcctcgaccaccgtgatgagcccctgtggaggtgaagacattggtggctgaccacgtcgcctcttatgcca

SEQ ID NO: 561141 - DNA, 694 bp, Homo sapiens
  misc_feature (13)..(14): n is a, c, g, or t
  misc_feature (17)..(20): n is a, c, g, or t
  misc_feature (22)..(22): n is a, c, g, or t
  misc_feature (24)..(24): n is a, c, g, or t
  misc_feature (31)..(31): n is a, c, g, or t
  misc_feature (165)..(165): n is a, c, g, or t
  misc_feature (167)..(167): n is a, c, g, or t
  misc_feature (354)..(354): n is a, c, g, or t
  misc_feature (357)..(357): n is a, c, g, or t
ctaagtagaggcnngannnngnancggccgnggctgaggcggctggagcggaagccttgacttcatctcagctccagagcccgccctctcttcctgcagcctgggaacttcagccggctggagccccaccatggctgcaatccgaaagaagctggtgatcgttgngngatggtgcctgtgggaagacctgcctcctcatcgtcttcagcaaggatcagtttccggaggtctacgtccctactgtctttgagaactatattgcggacattgatggtggacggcaagcaggtggagctggctctgtgggacacagcagggcaggaagactatgatcgactgcggcctctctcctanccnggacactgatgtcatcctcatgtgcttctccatctgacagccctgacagcctggaaaacattcctgagaagtggaccccagaggtgaagcacttctgccccaacgtgcccatcatccttggtgtgtgtgaatacagaaggacctgagtgcaagactgagcacaccatgtgagagagctggccaatgatgaatgcagtgatgccctgttcggtctgagtgaaggcctgggacatggcgaacctggatcatgtgcctttggctaccttgagtgctcagcccaatgacaaggcgggagtgcgggaggtgtatgagatggccactcgggctgtcctccagg

SEQ ID NO: 561142 - DNA, 132 bp, Homo sapiens
ccgagttttggtggttggaaagaaaagtacgaagcactggagaaatattggtagaataaagcaatagggaggaaataaaaagagatgaaggcaaattactaatttaaatgaaagaaatgttgccttggcatc

SEQ ID NO: 561143 - DNA, 108 bp, Homo sapiens
gctgcggacacggccgtgtattactctgcgagagacgcgggaatccgagatacagcaatgattattaacgggattcagtactacggtatggacgtctggggccaaggg

SEQ ID NO: 561144 - DNA, 909 bp, Homo sapiens
  misc_feature (32)..(32): n is a, c, g, or t
  misc_feature (99)..(99): n is a, c, g, or t
  misc_feature (118)..(118): n is a, c, g, or t
  misc_feature (134)..(134): n is a, c, g, or t
  misc_feature (138)..(138): n is a, c, g, or t
  misc_feature (140)..(140): n is a, c, g, or t
  misc_feature (143)..(143): n is a, c, g, or t
  misc_feature (159)..(159): n is a, c, g, or t
  misc_feature (161)..(162): n is a, c, g, or t
  misc_feature (183)..(183): n is a, c, g, or t
  misc_feature (193)..(193): n is a, c, g, or t
  misc_feature (207)..(208): n is a, c, g, or t
  misc_feature (253)..(253): n is a, c, g, or t
  misc_feature (259)..(259): n is a, c, g, or t
  misc_feature (265)..(265): n is a, c, g, or t
  misc_feature (267)..(268): n is a, c, g, or t
  misc_feature (295)..(295): n is a, c, g, or t
  misc_feature (299)..(299): n is a, c, g, or t
  misc_feature (309)..(309): n is a, c, g, or t
  misc_feature (317)..(317): n is a, c, g, or t
  misc_feature (332)..(332): n is a, c, g, or t
  misc_feature (336)..(338): n is a, c, g, or t
  misc_feature (340)..(341): n is a, c, g, or t
  misc_feature (344)..(344): n is a, c, g, or t
  misc_feature (346)..(347): n is a, c, g, or t
  misc_feature (352)..(352): n is a, c, g, or t
  misc_feature (356)..(356): n is a, c, g, or t
  misc_feature (358)..(364): n is a, c, g, or t
  misc_feature (367)..(371): n is a, c, g, or t
  misc_feature (375)..(375): n is a, c, g, or t
  misc_feature (394)..(394): n is a, c, g, or t
  misc_feature (398)..(398): n is a, c, g, or t
  misc_feature (406)..(406): n is a, c, g, or t
  misc_feature (412)..(412): n is a, c, g, or t
  misc_feature (438)..(438): n is a, c, g, or t
  misc_feature (475)..(475): n is a, c, g, or t
  misc_feature (479)..(479): n is a, c, g, or t
  misc_feature (483)..(483): n is a, c, g, or t
  misc_feature (492)..(492): n is a, c, g, or t
  misc_feature (519)..(519): n is a, c, g, or t
  misc_feature (522)..(522): n is a, c, g, or t
  misc_feature (662)..(662): n is a, c, g, or t
  misc_feature (704)..(706): n is a, c, g, or t
  misc_feature (709)..(709): n is a, c, g, or t
  misc_feature (711)..(711): n is a, c, g, or t
  misc_feature (714)..(714): n is a, c, g, or t
  misc_feature (720)..(720): n is a, c, g, or t
  misc_feature (726)..(726): n is a, c, g, or t
  misc_feature (734)..(734): n is a, c, g, or t
  misc_feature (812)..(812): n is a, c, g, or t
  misc_feature (900)..(900): n is a, c, g, or t
tcgagctcctagcatctttggggcgtcgagcngcacgccgaggtggctataaaatgcccgacagcgattgtggccgccgcgatcaaacaccacccactntttgataacacacagaacnaaatcaattgcaaagnagcncnttncgatacacacccaccntnnctccagtgataaaaagtgagngctgggatcngggcacccaggttnngcttctttatgcctgcactcatttcacataacgctgttcccccanatgccngtgccncnntaaggcgttgactgtgtgttatagagnacanttcactcttntgagtagncctcgtaacctaatncctnnncnnccnannacctngtcntnnnnnnnaannnnnggcnggggggggcgggcgggcgnatcnggaggggncttttnagaggccaccattgcttgtttgggcnttctttccaaaaaactttgtccaaaaccaaaaaaggntctntccncaaaactgnaactgagtcctttctcgggcctctctngtnctacgggtctggaaccagaaaaactcctttgtcggggaacaaatctgttgggtcttttattctgggcttctagggtcatcaccataacatgtcctttgtccagattttttactggggcctataaatactctggggccatnttttttaccacctctccaggcttgatctttttttttataaannncancngcnccaccngcaaanccactggncatacccttggattggttgaagagctttggtcatactgaacttcattggaagttcgaggattaggaacaccgagagcnataacttcactgatatcccgattttcatttctctgaagtttcgacctcttatcaggagctgccctggaaagattccggtcatgctgtntctcttttc

SEQ ID NO: 561145 - DNA, 232 bp, Homo sapiens
ggtcagacatgcgatacagaagagccgcgcgagctgacgatgagccaaagcctgttgagcggggaggaacgctgtcgctcagcctgtttaacgaagactactgggataacaatcgccgttcgcagtctgtcagcctcagctacaacaacagctgggaagcggtcagttacgggctgaattacacgttcaaccagaacggttacgacagtaacggcaatcgcagcagtattcg

SEQ ID NO: 561146 - DNA, 443 bp, Homo sapiens
atggtcaactgacagtgctgtaagatcaggagagtggaaccaggagctcagagtcctgactgcggactatccctggaggctcgtttaattttattgtgctcatctcaggaacaaaagcattttttagttaaataatttaacatcaaaacaacatgcaaccaaaaacttctgacatttatagttgatacttgcctatagaaatgtttggtggctggtgtcaaaggtccttaaagcatttgctgccaagttagtggaaggctcacttttgttaagatgactgtaattctccttgttaccgacgagagatcattggaagctgccttctaacactttgtgtagctctgtggagttggattttcttaaggtttaaaaagaatcacagcttcggaacttttaactgaaaatgagagacagaagccacaggggaagcaaagcaaatagga

SEQ ID NO: 561147 - DNA, 533 bp, Homo sapiens
ggccgaacagaggctcttctgcttcttaacaccgacagcagacttctttccatttcttagctaccacaggcttcttgccgtgcaaccggcgccttctcatctgattcggcttgtagtgccgctgctgcatcatctgccattatccatccggagcttgtgattcctggccgggcgaagaatggtgttccggcgcatggtctttgcctatgggtttagcttcaacatgattctcaagtttttcagtgggttcttctttaggactctgcgatggatcttcttgcgtggtgctcgaagggctctttggatctctgggcttttcaagattctgctaagatctgtattaatcatcttgtgcatgggaagattgtagttactcttgagggaagcggctttacgccaagtgccgtacaattcatctaacttccggaaagcactttcagtccaaatgcagaaacgtcccacatgcccaccaggagcaagcttcaaaatgttcagcttgcttacattaagcagagtaattccagggatgtttc

SEQ ID NO: 561148 - DNA, 828 bp, Homo sapiens
taagtaaagatggagtttcactctgtttcccaggcgtggtcttgaactccgtgggccatgccgtggccagggacatgaattggtacaaagaaatttccctcccgtgccgtgcacaattttcacccgatggacgtcacgcttagtccaagagcgaagtttccgtggtgaaatgcggccagattacttcgaatatatttccatgtggattcattgggcctccgttccataagcctttcgcccattttcaccagagaaacacgtggcgagacctaagtccgtttgagaatagctagcattttggagtgcctcaagaacagtcagcattttaaagttcagctttagaaaactttgttaaacctttgtgtgtcacaatacggagttgaggcaattgagccaggattctagccctagtccgatggtatagaaaacgaccatttggattcaggtatcaatttgccatattcacaggttggactggtcccttttacagaaggctaaagtcagaggaatgggggctgggccactccctgggagctctcagatctacagacaagctgtgtgaatgcatagatgtaatctggtgtcaaatactaatacagtggagattgggataatgttaccattaagttcctctaaaaagtgtgtatgcctctacttaagagccaaaatacaagtgaactacagtgtgtccagataaggtcaccaatctgatgctgtcagtttgaccgagctggttagcttagggccatgctggaattggtagaataatagggatcagtttcaaatcctactactcccttgtacgggagtctgaggccagagttagga

SEQ ID NO: 561149 - DNA, 257 bp, Homo sapiens
tgtagggagatgagctgccctgtgacatgcggactcccatctgacaagcagtgacaacgcttcatgtgctgcctgtgagcatcctcttataaccgagtgtggactcctatcaatgctctcctcaaggggccagctcatgacgccgggctttctgaagagaccaatgcatatcccttatgacaccacagcattacagagcagtttaaacgagacaagaagagtagtacacatcctgtggcctggagccttgatccagc

SEQ ID NO: 561150 - DNA, 402 bp, Homo sapiens
gagggccgagtccacccgccggcccgtgtcagcacgacggtcatagctgaacagtgcgcaggatacgaggacgcggacaggcagatcggctacacaccgaacaatcagaccagtacaccaactggaatggtcaaacaattgaagtcaactgtctcagtggtgcaattaacataagggttcaaatatgtaagcaatctattaatttctttaaagtcatgttcaggcacggtgctgtttcaaaaaacactcattagcttggtccacacatgtacgttcatccaaaagttacccaaggtcattaggacgttgaatgcagctttaaacaataaaaaaatggtattaggtttacttctcgcaacacggcgagcccccaaccttgtaaactcacccttctgacacaaa

SEQ ID NO: 561151 - DNA, 104 bp, Homo sapiens
tctgggttgcaagaaagtccagtcagaatggaccagctttctctctccttgtcccagcacttcttgtcagcacaggcaacactcaggctttgtcatgagcaggg

SEQ ID NO: 561152 - DNA, 1771 bp, Homo sapiens
ggttgttttccgtctcctcgccttccgtggtctgtggtgggggtgacggctcgtgcgtcggcttgtgtcttgttcttgggctgttcggtccggctttgtgctgcggcgggcggtgtagtcgctctgagggctgggtgtggtcgcgatcgttgtttgtgtctctttgacttccttctcatggtgtggtgtgctcgcccgactgtgtggtgtgttgtttatgtgtggcggctgtcttttgttccttcgttcgctagccgccggccgctgccggttggtcagcccgcggccgcgctatgtttgtgtgacgccgctgcggggtcctgccttgtggcggcatggtggtctgcgtggcgtgtggttggtcgcgtgctgtgttgttgtgttgctcggcgtgtggtgggtgggagggggtccaccgactgtaggggctggcaatgtgtgtcgttgatggtgtgttatcgtctgctcggatcatattcttctgctgtgagtgtgtgtggtatgcggctgagggtgaggtgcggcgtggatgttgagtcttgtgtgatttgtcatccacccgcccgtccagttaggcgtgtttggtgccgcgggctcccccctgtgtgtttttacagctgtcctcccccctgttgtgtgttggttcctcagtacaccaccaaccacctgccgcgagtgtattgttttgtggggcgcctccccccctctgtgtttgagagtctgctcctcgtcgttagggggtgccccccccccccagagtgtggggcgccccccactaagtgtacccacccgggcgttcttgtgtttttatcacccgccgcccgccgcccccccttgttgtacgttttttattatgcccgcgtcgcgctcttacaaggtgtgttggtcgggataggacgcccctcctcgtgaggggggcgccaccacaggtgtgggccgcgcagccgcaactacttctcccacgacgtcgtctgtgatgggggggcggctcgctctcacacactataccaccgcgccacgccaactctgtgtttcccctcacacacacacaagcaagagagggatgtccctctctctctgggaggagaaaatactcgctgcccacagagagagaaaagtctctcccccccgcggtgtcttcacacacagagaaactctcgcgtgtgtgtgtgtggggtgtctcacaagaacacaccaccgcgcagagagggtctctttgtgaggggcgcccctcaccactctgtgcccacacaagatatatagccccccctctctcactgtggggttgagagtgggcgccccctctctgagaggggcgcggtctctctctcttctgggcgcgtgtgtggtgaccccacacagaaagtgagagagagactcccagcgagaggacaccactgtgtgtctcacactctcgcgcgcgcgagagactgagtgttgtcgcccgctcacacctccgccgcagagtgcaccacccgcgcgctgtgtgagaagagacacccccacacagagaacacacagtgtgtggggtgacacacccggcgccccccgcggtctagggacacctccccacaaccgggggacaactgcgcccaccacgggccgaggccccgcccctctgacgcacaacaaacaggcgcgccgtcccacacaggccctccaaggcccccacaggcccccgccacccaaacacccttccccaaattttgggggggggccccgggccccccccccccccacaggaaaaaaagttttttttcccttcccccca

SEQ ID NO: 561153 - DNA, 658 bp, Homo sapiens
ctagttctagatcgcgacggcgcctttttttggaaatcatagataatatcttggccatatttaaaatctattcaaaatattaaataatagttcagatatgaaaaaaatactgcaataaaacggtcaggggtattccatggtgctcccttccctataggaaagtacctgtccgcccaaaagacggatggacggccttcttccagctctacataaagcgcaagcccatgggctcacccgggtcctgcttaacatatattagggctatgtttctaaaaagctgtagtgaccttgtaagtcaaccatggttcaaatcacatatttacatatggatcaattcttatgatagaaagacagacataaatgattcccatagtaaatacttccagttgccataaaaaacaaaaacaaagaaaccaacgtttgggggaccaacagggtaatggtacacaaatatcctttatgtatacaaacaacttcattcgggtataatcttaattggaaagacctaggtacagtattatttcagtgataatgacccctaagatttatcccaaatttaccggtaaaataataaccgagtagaccgaatctgatatattttaaactctgcccatggcttgaaacccttggaggaacccatgctacatcaattggtact

SEQ ID NO: 561154 - DNA, 120 bp, Homo sapiens
atagcggataggggcctccggggtaaagtaggttgacggggtcggaggtgtagagagggagccgtggaggtccaggtgactgcttagaaaactgcacagatatctgatgaaattagcgaa

SEQ ID NO: 561155 - DNA, 108 bp, Homo sapiens
tttagcttacaagtggctccgctactcttatatctcctactcaaattaacaagagatgaagacctccttggtgactggggaggcagatgaagggagagcaggaaccat

SEQ ID NO: 561156 - DNA, 249 bp, Homo sapiens
gctgaaaaattagccgacggccatcttcagatttacaataagtgatacatatgtttatctttcactgtctgactaacttcacttagtatgataatctctaggtccatccatgtggctacaaatggcattatttccattcttgatatggctgagtaatattccattgtatatatgtaccacatcttctctatccactcctctgacaatggacatttaggttgcttccatgacttggttatagtgctgcaa

SEQ ID NO: 561157 - DNA, 119 bp, Homo sapiens
tctccgtgtacgtcggtggccttcaccttctgtgtctcaccactcgtatggaccacgtacgaaagcaaactcctctgctgaattctcaatcttaaatttgttgagcagcagcagcagga

SEQ ID NO: 561158 - DNA, 462 bp, Homo sapiens
tcactgcaaccgccacctcgcaggttcaggtgattctcctgcctcagcctgctgagtagctgggattacaggcgtgggccaacactcccggctgccaaggcaggcatgtaaatgtaataaataagggagataagcaagaaccctgttggacctggtagaagcaaacatataatagtactattacgttgtgtaaaatattagcgccttctatattcatgtcctcccagaattatcaaaaaaactactctatagccgatctggcttatatctcaggagtaataaaattagttaatagggttggcgtcgtggtactctgtgtattcctgcccttatcccaccccaagttgatgtcacatgataacttgatctagtctaagaatgtttatagtgataacgagaagttcagattctggcttaaaatatataattgttttttaatctgtaaaccaaagagaatgagtt

SEQ ID NO: 561159 - DNA, 554 bp, Homo sapiens
tgatagtttgttttaatagccaggagttctcaatggaaaaacgaatgctcttacactgaatgtacaggcagtgggcttgcagcactgccatcttgccatgtacaggcttggggtggctccaggaagcctcgtccagtgatatatttctcatagcattcattctatggaacaagaaattagatattgctgttaattttcaactgttctggtatgatctaaaacaagtttaacctgcttaatggctacagtttttacatgtgaaaactgtagccttggtctcttaaccatgtaatacataagttttgttagaggtaaaaattaaatttggactataatgtccttgctttatttgagaacatttgctgtgtttgcttttgtctcctcgtggtgttattcatagacctggaaatgcttctcagatcctgtgtggccggtgtttgcatcttcagtggccacaagcataataaagcccctttgcctttctctgtattatattcaatacaatacatcaatagtcttgaaaaatgttttgctgtctttgctttgtttgtatt

SEQ ID NO: 561160 - DNA, 964 bp, Homo sapiens
  misc_feature (458)..(458): n is a, c, g, or t
cggggacaggcggaggcgcgggcaggtccgggcggatcgggcgctggcagcagtagcagcgtgcgcgggcccttcagagtggccgcagtccgagctattgtccctcgtcatcctgttccaacgcgagggctggctgtgaggtggcgggagccatcatgtgggcgccatggcaagagacgggcaggacagaccctgggcccagaggtccagccaattggacaagcagttcctggtatgcagcatctgcctggatcggctaccagtgccccaaggtgtcttccttgcctgctggaccttctgtgatgatgatgtcttccaaagatctatatcccttgctccatgatgccttgactgctatccttgtaccatgtatgccagtgcggatcggtccaatcctccgagagccagggacgtctcggcactggcgggaacaacgtatgcgttcgatcagcaggtcntcatggcaggcaactgcacgcatggcacctgagtgggggcccgcgtactcgcggaggagactcgagctccctacagctgtgagtaggactgtgccgtctctctctgcctgtcccaggcatgaaggcaagacgatggagtgttactggtagaggccttgtgacgacggacctatgtgtggtgagtgccgtgccgtggagcaatctgtagacgcatgagcaacaaggctgactgacgggatcgctggctggacgcacgtcgaacggcaggggcctgacaaagcgccaaggtcagaggctgtgcgttggcccgataggcacgagctggtccagctatgcaaatggccgcgagtcgggggagcagtcgcgccgagcaggctggagggaggcggaaggcagagggcccgtggggccgagatcaggggcgaggagttcggaaggaccctggaagcaaggccacctggagcaggcgcacggcacggcttccggatcccgcgacctggagacca

SEQ ID NO: 561161 - DNA, 365 bp, Homo sapiens
gcagtctgtggcaagaattgttggaacagagacttgccatgctggttctgcatcaacagtctctctagctcagcaatctgagaatacacacggataaagtgctatcagttcaatggaaattggcaggttttcagagggtgtgactgcagaagactattgttcaatttcaaaaatgaaaccctccagaagcaatttcaaagttatacaaatctttcacgtatactgagagtgcaggtgaagatcatccattttccacataaaaataaattgttaaggacttttaaatgaacacccctacctaaaatgcagtgttctgtttggaaatctgtacattatacaagtgaagagcataataaatcttgaaa

SEQ ID NO: 561162 - DNA, 849 bp, Homo sapiens
tgtgcccatctcatgcctgtaatcctagcactttggaaggccgaggtgggtggatgacctgaggtcaggagatggagaccagcctgaccaacatggcaaaaccctgtctctactaaaaatacaaaaattagccaggcgtggtggtgcacacctgtaatcccagctacttgggagactgagacaggagaatgcttgaacccaagaggcagaggttgcagcagtgagccgagatcacgccactgtattcagcctggatgataagctgagactctgtctcaaaaaaaaaaaaagggcaatatagcaaaacggactctcggggttcggcggctgggatatcagaaatctgactccatgaaagtgcttcatcacaatactggacttcggtggtatacgcttggacgtcgtgtccacaacatggtcggacaacttcctcgatacactggagatatccttctcgtacatctggctttcggtgaacgataacattctctggaggatctcagctcttggggtgactgcatatgcagtggtgacccagcaccgttcccatcaatctcgtcaccagacctcgaggttgtgggcacagtatttcagattgaccacccgtccaaccagctgggtatacccacattaacaacccaaacgtgactcatgcatttatacctttccctttatgaccaattctccaataaatatggttctctgctcatactgtgagacccaccaaccgtcgtagtacccgagcgtaatgctgacacacgatgtgcctggcgccacccatacggcgatacgacccgcgcgacacgcccaaactcctcacaaaaaaccaaggcgcgcaacaccaggccc

SEQ ID NO: 561163 - DNA, 178 bp, Homo sapiens
ctcataatcgcccacggggtgacatacctccattactattctgactagcagaaacaaactacgaacgcactcacgagacgcatcataagtcctctactcaagagacttcaaacgtctactacccactaaatagctttttagatgacttctatgtacgcctcgctaaacctcagcctta

SEQ ID NO: 561164 - DNA, 336 bp, Homo sapiens
cgggggccccacgttttgccaattcctccagccaaaggaaaggcccggggtccggggtgttgggctttaagggttttgtgattggatggaaaaaaactgctggggaggaaactggaagtttttgcattccttcaacagaacatttaaagaagggctctatatatatatataaatatatatataaatatatatatatccttctatttggggggactttaggaaaaagccctttggtcccggtaaaaatgaattgtgaccccatcccttcccgcatgagcccagtgagtcccagcaggtatcagcccccctgaaggattaaaaagctcctccccgcca

SEQ ID NO: 561165 - DNA, 723 bp, Homo sapiens
attgctagattgtatggtaagagtacacttagttttgtaaaaatttggcaaattgtcttccaaagtggctgtaccattttgcattgccatcagcaataaatgagagtttttattgctccacatcctcaccagcatttggtgttctggattttggccattctcatagatgtgttatgttcagcagtctgttttaacaaaccctcatggtgattctggtgcactaaacattgaaaaccatgactgtggacagatcttctctcatagaagtagccctcccagctggtcctgattcaatctgctgaccttgtaatgaaacagaataaagaggaggacaatggggaggaaagcagtgtttattgagcgaccacaacatgccaggcactgtatcattataatttcattttattcttccatagaagctaagaaatttttactcttgtccccattttaaagattttttgaaatgagattccaagccatagtaatgtttaagcttacagacctactaagtagtgagttcacattagggaattttgaaaagtacaaaagttataaagaagaattttaggaatttacccaccaccccattcaaaacaacattattatttagtgtaaagtcctcacagtatttttttttttcctggtgtaaaaactcctttgggatttcaggctgctctgtgggtctctcatagaattttaggccccacagtggggtcctttgcc

SEQ ID NO: 561166 - DNA, 478 bp, Homo sapiens
  misc_feature (66)..(67): n is a, c, g, or t
  misc_feature (72)..(72): n is a, c, g, or t
  misc_feature (95)..(95): n is a, c, g, or t
tcaagagcggagggaggcgggagcaagggtgacttcccctcccagctctctccgccggaggaggcnngtacncgccccaccaatcagaggcgggngcgggaccttgcgcctcacgtcatccgcaagaaccgtccctcctccctccgcgaaaaaaaaatcctagcaacttaaactccagcccggcctcccgataggcggagctcgggagaatgtcatccaatccacatccaagaaggagaaaaaaagggagtctcgcctagccagtggaagacaagagaaggcggggctccgggagagccggaggtgggtgggagagaggaaaggggtccgcccctcagctcccctgcaggcgggttgcacaagcgccggcggagtagatagtaaacagtctgggccgaggagtgcaggcaagggccgcccggcgctcggtggactgggcccctgcgccgcctctcccggcgtcgccccgcccggccgg

SEQ ID NO: 561167 - DNA, 752 bp, Homo sapiens
gcatcctgctttgttccattgctggcgaggagctgcgatcctttggaggagaagggatgtcaggtttttggaattttcagcttttgtgctctggtttctccccacctttgtggttttatctacccttggtctttgatgatggcgacctacagatggggttttggggtggatgtcttttttgttgatgttgatgctattcctttctgtgtgttagttttccttctaacagtcaggtccctcagcttcaggtctgttggagtttgctggaagtccactccagaccctcaaacagggatttcttggtgttgcctattctctcccatgtgtttaaatccagggagaggtgtatatatgctttcttcctatttgttggtagtatgttggctagtatttttgcaagaaaagaaattgaaaaagtaaatatattatatcaaaatattgggaaaatggggcccttaatacacaagatctgtgtctgcactgcgtcaagaactctcttcacaggccgggcgcggtggctcacgcctgtaatcccagcactttgggaggccgagacgggcggatcacgaggtcaggagatcgagaccatcctggctaacacggtgaaaccccgtctctactaaaaatacaaaaattagccgggcgtggtggcgcgcgcctgtagtcccagctacacgggaggctgaggcaggagaatggcgtgaaccgggaggcggagcttgcagtgagtcgagatcggccactgactccag

SEQ ID NO: 561168 - DNA, 158 bp, Homo sapiens
aggagatgggcgacggcggaggtgcaaggcaggcacggcgcacaagacgagggcggcctgggcggggtggattagaggtcactctcgccgtacatgcgccgtggagaaggacatgtagtccagagcacctggcactggagtcggtggccggtacctgg

SEQ ID NO: 561169 - DNA, 335 bp, Homo sapiens
ctccccagccgagcatacttccacagagacctcgcggaagaagaagtagacatggtctctatgctccaaggcctggactaagtgtggctttggcggagcagagtgggggctggggcccaaggcttctgttcactacagcatcactggcctggtaaatccgcagctgtggctcagtacaggctgccctctcactagccgcggcacacagggctgaatgagttcgttccgcaggcaaggagcgtcctgggactcccagggaacaagaacacgaatatcgttgtaccactcatccgtcagctttccccgtacagcacagttctccacatctgtactgg

SEQ ID NO: 561170 - DNA, 1074 bp, Homo sapiens
  misc_feature (29)..(29): n is a, c, g, or t
  misc_feature (31)..(31): n is a, c, g, or t
  misc_feature (34)..(34): n is a, c, g, or t
  misc_feature (36)..(37): n is a, c, g, or t
  misc_feature (631)..(631): n is a, c, g, or t
ggcggccgccgccttcgccaggaccgtcngnggncnnagctctgtgacggcgctctctgtgtgtctcgcacctgccctgtgtggattcctggctttaactaaacgcagcctctcatcctcagcacgcgtgtcagaggaggaggagctggaggccctctcagtggccagcacctgccagcttgtctgggactctccagcagctgccgggacatcgtgtgtgtgtcacctgtcactccctggacggcaagtgccagctgaagcgcagagccctcgcccgcctactatgagttcatcggcgtcaggactgccaggacgtgctgcacctgtaccgcctgctctgggcctctgcagttctgaacgtcctgggcctgttcctgggcatcatcaccgccgccgtcctgggggccttcaaggacatggtgcctctgtcccagctggcctatggcccagccgtcccaccacagaccctctacaaccccgcccagcagatcctggcctacgcaggcttccgcctgacgcccgagcccgtcccgacctgctcgtcctaccctctgccccttcagccctgcagccgcttcccagttgcgccctcctctgccctggcttcgtctgaggacctgcagcccccttntccaagcagctctggctctgggcttcccggccaggctccaccgtgctacgcacccacctactttcccccgggggagaagccacccccctacgcaccctgatagaggcgtggagtaaaagataacttgtttgttttttttttaaaaaaaaaggcagcctctagaaatcccgcttctgtggccaacctcctagagaacccgggagaatgttccagaagtctgtcccctcctttcctccctgggcacactggtgagggaggctggaaccaggcagggagtggggccctccagacccaggctggtgacaccttggcttgggctctgctcacaccaaatggcgctgaaagttcccacccggcctcctcctctgagagcaattgttctggtgttttcacatcccttaattaattagctattattatgattttgcaaagacagagaaaaa

SEQ ID NO: 561171 - DNA, 334 bp, Homo sapiens
ttttcacaatgtttcaacatttctcattattatatttgttatggtgatctgtgatcaatgctctctgatgttactactatcatcattttgcggcaccacaaactgcacccataaaagatggcaaacttggccgggcggggtggctcacgcctgtaatcccagcactttgggaggctgagccgggcagatcacctgaggtcaggagtgcaagactagcctggccaacgtggtgaaactttgtctctactaaaaatacaaaaaacttagtcaggtgtagtggtgcacacatataatcccagctagccaggaggctgaggcaggagaattgcatgag

SEQ ID NO: 561172 - DNA, 236 bp, Homo sapiens
cgcttaccttccagccaacgcaaaccctccaaggtggagaatggcttacacagaaacatggcccgtgcttggagccaggtgggtttatcctagtgtatgcgatctcctccaagcagctctttcccttctgtaagcacagctgtgtgctggcagcctcgcctcaggagactatggggttataggggtgggtgagtcatgggttggctcggccaggtggtgtccttgggagattcccg

SEQ ID NO: 561173 - DNA, 440 bp, Homo sapiens
gtatgcatgtatgtgcatgtattcatgtgtgtgtgcatgtgtgtgtgacagtgtctatgtgtgcactactgtgtgacagtgtctgtgtacactactatgtgacagtgtctgcgcatcactgtgtgacagtgtctgtgcattactgtgtgacagtgtctatgtgtgcactactgtgtgatagtgtctacatgcactactgtgtgacagtgtctatatgtgctttactgtgtgacagtgtttgtgtgcattacagtctgacagtgtctgtgtgtgcgttactatgtggcaaggtctatgtgtgacagtgtctatgtgcacattactgtatgacagtgtctgtgtattactgaaattacagaaaaaaacagcggagggggaagccctggagggaattgtgcctggaattctgtcgacgcgcccgcgaatgtagtagtaggcgg

SEQ ID NO: 561174 - DNA, 889 bp, Homo sapiens
  misc_feature (274)..(274): n is a, c, g, or t
  misc_feature (317)..(317): n is a, c, g, or t
ggatctatctcacgtcagctgcccctattatataggagctgattcatgcatcttgcatgtactactagcgcgtgtccacttactgcgatagaacgcgtctcatgcgtgtgttgcatgagtgctctgatcttgctccattatatgctatcatccgagcgtcacagaagaggatgcatcaacgttatcctacgtataccaatcatcgatcacggacatctaggaggatctgctgcagctcgtggaagtatgccctggcctgcttgtggtcactaangtttacctgcattgagagccctggcctcattcccacgtaacgnctagtctgtatgtcacacttatgcgaaaacaacgtcaagagctacgaggcagaataccgcatgcgctcgtgtaacctctacctccaaaagaatgctacacttttggtggctccatctccacacttggtgctcatcgtcgaataccgcctcaactgaagtttcatcgatccaccgcagcataatctgcgtctggggaacaataagacttcttttcccacagcatttcacatgaccaaggtaccctattgcgcacaacgcaaatattaagtaatacacattatgcccaatccctggatgtcgtgtagcgcttggcgggagcgtgctcctttggccacaggttctttggacgagacccctgtacacgctatggttaccgctcccagcgtgggttggcgaacagtactctctcactaattatctgacctcattacactatgagtattaaccacttcttagcagaaaagcaaccggttgactttggcgaacgttgccattggcagccaagggtctcccacaataaatttgaagtgccttgtgagcaaaagtctatggaatagacaaaaataaccacg

SEQ ID NO: 561175 - DNA, 131 bp, Homo sapiens
gcagagctgccacactcaagatctgctcttgtgaatgtggatgggcttcgagcctggattaagaagaaaggattagatttgggtaaacggacgaagccccatgatatacggtgtgccttcaatgagaccaa

SEQ ID NO: 561176 - DNA, 158 bp, Homo sapiens
catagatagttagttattcgttaagcagtaagtcatgaaactccacttatagaaaacaatagcaacagcaggaccactaagtcctaaatataccagagtaaaaacaagtttacgaatattcaaatctgtctgtcattctctaccttctaaacatggga

SEQ ID NO: 561177 - DNA, 132 bp, Homo sapiens
ctgacactgctgcggctgctgaacctggatctgctgttcttgctgggtttgtggctaacactggtggtgactggacaggcaagttcaagcaaagacccagcccacttcagtgctgtctctggcccagagagg

SEQ ID NO: 561178 - DNA, 710 bp, Homo sapiens
ccacgcgtccgcagggtttcaccatgttggttggccagtatggtctcgatatcttgaccttgtgatctgcctgccttggcctcccagattgctgggattgcaggtgtgagccaccacgcctggcctggagaacttttttttttttttttctggtaaatccaaatgtacacctagaaaaacggcgtttctggaaacattccttagtctgggggctcacctaatagtcgtcactcaagccttatcaggaggtaaggattctgtctgaactcaggatccattgggatcggggggcctacctatgggcaatgagaggaatcatatataactggtcactggtccatcctctgagtcttggtagtttggtggagtaaaatacatactggtgccgcatatagaagaaatggagaattggtggttaccctaaatggtcagataattgggggtttcccagtctctccagctctaaagaatctctggcggggtatccctttatgtctgggaaggagactggtacagcttcgggtatctgagaccgtggtggtgccctataacatcgtagttagggctagtgcgtccttaactagtttagggatacctttcgggtggcaattacgagttaccccacagatcttcagaggcaagagttttcagaacttatggaagacctttgggtcattgtggaaaccttcattcaaccaaaagagtgcccc

SEQ ID NO: 561179 - DNA, 464 bp, Homo sapiens
ggcacgcgtggcgaagagagtccgtccagagctccagccatcactgcacttcccaggtgccaagacataacatcactgggtggggagagaactgtcatgaggattattccccctccacacaatcctgagcttctctccctctctcaatgaagaagtgcgtttatgactgatcgcacaacaccatgttggttctgattgcagaaaacacaccttataaatttctgatagccttcctgtaatagagagtgtgacaatatacttcacactgcgtttcggtgtggtaattgatcgtttcagtccagggacgatttggaataaattatacccatcaaaaggatatcacagctcatcctggtggcaggctttacacgtcgacatcgcgttcgtctcccggagagagcagattgcacccggcgggcgcatgaggatgcggagggagcgggcaggggaaaaggaggcggccg

SEQ ID NO: 561180 - DNA, 855 bp, Homo sapiens
tcgccttacctgccatcctgccgtgtgcggcacggccgcattcatctcgctatcgatgtcgctggacggttgattcgtgaggtcgtggcggtactgcgcctgagagtcgatgattgcagggcctcggcggaccgttgcagagggagaagagtggctgttgctgatgagcgaaggggccccctttcagaggatcatctcgtgggatcttggcatacatattcgaaaccttagaagcgcaagtagatcctggctcatcaagcatgtgatatcatctcgttgccgggaatttcctgcatgaaccagtcaacggtacgttatgatcacctagtcgatctgagtgcaccccagggacgagagaggactatggatcgaaggaaaaatggattacaggggaacatctcaggactgatttgcgcctgtaccgtgagtcggtcgctgcgtaggctgtcggagacatttgaagctggtatctccaacgaatggggcagacctcgagagcattgccctttctggcgttacacaacttggggtgtgcacctatcaagctaaacttgtcggtgttaaccgagaatggagttccagctgagccagcctacagcagaagacgatctgcaggaaacttgtgcaacggaagtcacgcacgttacatttcacggaagaattggtggtaccaaccccggacagagttagccatttgtgtccccaaattctcgtggcttggcaattggtgacaaaccatgctggaagccgaagtgtctaacattgcctttgggttcccaacgggcatgggaaaatctcaacccgtcaagggattgcccttgccagttggcaaccccggcttggattgaggcgcca

SEQ ID NO: 561181 - DNA, 239 bp, Homo sapiens
ctggaaacactttatctaagagggtggggaggggggaatctttgccaactataggtcagttctttccttcttgtaagttacacccagtgtatgtatttgcatttatttcgtcgattgcagaatcattgctttgagtgattgtcattgcctacatcttgctctcttttttccttcttgcttgctttcttgctttctttttcaatttccttcttctttccccttcttttctttcatttaaa

SEQ ID NO: 561182 - DNA, 335 bp, Homo sapiens
aaaaacacccctcccaaggatagtagaccacaccacagagtgacacacgacgatccaccaccacgagtggtgtctataatatgagagcacacacacacaccaccagagtcgatgaggaaagacagtatcataaatcctcaacacacactcagcatgcaagaacaaattaggagtgtgtgtgctgccacgggcacccttttattataggtgggtatatataattatgtggtgtgctcaacaaacacaatagagatacactcaccacatggtgaatttattatagtggatcatgagcatatacaccatttatgttgtttttgtgtgtgtggtgtggc

SEQ ID NO: 561183 - DNA, 405 bp, Homo sapiens
  misc_feature (17)..(17): n is a, c, g, or t
  misc_feature (20)..(20): n is a, c, g, or t
gacagcacagtgctgtnagntacaggcagagcaattatcacgtgccaggtcatcttccttgttctttttattcggagacagagtcttgctctgtcattcaggctggagtacagtggcgccatttcagctcaccgcagcctccacctcccaggttcaagcagttctcctgcctcaacctcccgagtaactgggattacaggtgtgtgccaccacacccgactaatttttttatttttggtagagacggggtttcaccatgttggccaggctggtcttgaactcctgacctcaggtgatccacccacctcggcctcccaaagtactgggattataggcgtgagccacggcatccagcctcatccttcttttaaccaataaacatgatgctgtatcttaaaaagagca

SEQ ID NO: 561184 - DNA, 517 bp, Homo sapiens
  misc_feature (125)..(125): n is a, c, g, or t
  misc_feature (334)..(334): n is a, c, g, or t
  misc_feature (372)..(372): n is a, c, g, or t
  misc_feature (386)..(386): n is a, c, g, or t
  misc_feature (390)..(390): n is a, c, g, or t
  misc_feature (402)..(402): n is a, c, g, or t
  misc_feature (414)..(414): n is a, c, g, or t
  misc_feature (458)..(458): n is a, c, g, or t
  misc_feature (469)..(469): n is a, c, g, or t
  misc_feature (477)..(477): n is a, c, g, or t
  misc_feature (491)..(491): n is a, c, g, or t
  misc_feature (494)..(494): n is a, c, g, or t
gggaattcggcacgagggagcagcagacgtattgggcagcccaggtgctgcaccttgcttgacgacccgttgagaagctgccatatcttcaggccatgggttcaccagccctgaaggcacctgtnaactggagtgctctctcagcactgggatgggcctgatagaagtgcattctcctcctattgcctccattctcctctctctatccctgaaatccaggaagtccctctcctggtgctccaagcagtttgaagcccaatctgcaaggacatttctcaagggccatgtggttttgcagacaaccctgtcctcaggcctgaactcaccatagggncccatgtcagcaaaacggtgaccagcaaaatcctcttnccttattctaaaanttgncccttggggagncttcaggggagnaaggcatttgtttccttccctgggtgtgaactctttcttttggnatttccatccnctatcctnggaaacttaaaggnttnttctgttaacttgaaggcttgtt

SEQ ID NO: 561185 - DNA, 335 bp, Homo sapiens
ggtaatatctgagaatcggcttccacttacaagtgagaacaagtggtgtcagttttctgctggggttagtttgctgagaataatggcttccagctctatccgtgtccctgcaggcgacaagatctcatacctctttatggctgcatagtattccatggtatctgtctgacaggtaattttcccactgatttaccactcatcatgtgggcactggtgacacagactatctgtgcccggcactcgggccaatcccaacaccattccctacgtctggcaccaagaccaccctcaacccccgttaccctgacacccttctctctgcaccgcgaccaccc

SEQ ID NO: 561186 - DNA, 129 bp, Homo sapiens
caaatcacttttctttgtagtgaggtttatatatatcagagcagttacttacgcttagtcatagagaactctttagtggcttaatgtcagctttcatagtggcatccatagataatacaaaaggtcgac

SEQ ID NO: 561187 - DNA, 389 bp, Homo sapiens
tgggccgccagaatcacctctgccagttattggtggtcagcataaggactcacatcctccagttacaagatggaaccgaggggtgaccacctctgagatttccttgactttgtcatagcttgttcctgttttttaaaatctctctcacatctgcctttcttatccccattcttgatgtaaacctccttccgagtcatctattcctcctcctcacatacaaacagagcatctgatcgtacctgtgcagagagcagctcttccttttgttcgctggcaaagtggtagttggaggaagcctcaaagctcgagttgttccctcggtgcaggggagacaaatgggcctgatagtctggccatatttcagcttattcttgagcttgatcagggca

SEQ ID NO: 561188 - DNA, 794 bp, Homo sapiens
aaccctacttgcctaaatgaggaatgtctttcctaccatctaaaactacgaaggtttctggcctgggctaaggtttgtagttgacagtaaaaccctgatgacaccacttggtttcccgtgcaacgctctacattacatatttcacaactcttgtcccatctctagctaggcacactcgcgaacaaacttcttcaactgcaaaactacctctggctaccatgctcctacacgctctttaaaccttcagctcttcaaaacattcccctggcgaaatagccataagtattcactatcaagttcagcttgctgactctcttgctgtatacaacttcacttctccttgctgctcttcagggctaacactcacattctccggtaacagcggctttcacgccttccgtgcaaaaccgctcccggctgtgctaagcatgaccacacaaccagacctcagctaacgctgcccagtcctcactactaggcacaacacacccttcaccaggacacatctaacaagttaccagggcccaggcaccagctggctcacgccctgtaactcccagccacactagcggcagcgcctgaggcagcacggactcccaagctacaggcaactccgagacgagccccgcgccacacatacgtggagacgccggtcacaccaacaccttagcaacaacatcaacccgccgcccgcgccggatcccccactcgcgacgatccacacctcaaccggcccaggctggccctgcatatcacgcagcccgagccctccactgaacctgactggcccactg

SEQ ID NO: 561189 - DNA, 325 bp, Homo sapiens
  misc_feature (89)..(89): n is a, c, g, or t
  misc_feature (95)..(95): n is a, c, g, or t
  misc_feature (219)..(219): n is a, c, g, or t
cagcggcgggccagggccgatttcccgcttccattcgaaccgacaaacgcccaactatcacccgcgtttaacgttagctgaggcaattncagcgnttttgtgtcgctaagacgaaacgtgccttgcaaaatttgcaacgatgacattttatatcccactttgtgcagcgattactgacagggatacgtgtttcataacaaattgtcaacacgcttagcncagcgtggcgataatcacgcctgtcggcattaaagtaggccgtgacattctgtccttctgaagagaagtcgcttcatttaccggcacatgtggcggacaagtgttt

SEQ ID NO: 561190 - DNA, 229 bp, Homo sapiens
cctgctgagtgcaatgctctgtcttttctttcacaaacttgatatatttctcaggggtatcacttccccactgtgtgtgtttttctaaggtgttcagactcatactgccatgaacggtgctggcgattgtctaattgaaacctgtgatgagattgacgctctgtgaaccgcagaggatgcccccacgctctcactatcacatgaactgctgcagcactgacttgacagc

SEQ ID NO: 561191 - DNA, 162 bp, Homo sapiens
cttatcatgatgttgtatcatagctactgtagctgccgatctacttgcatagaaggactctgtcctgttacatcagtcatgccccccagtatctgagttacaccacatggtttgatctactgtccatcaaagtaactgcttgatcagaacccttggggcccc

SEQ ID NO: 561192 - DNA, 414 bp, Homo sapiens
  misc_feature (241)..(241): n is a, c, g, or t
cagatgctgctttgttgttgctgctctttgccagccttctctgctggagtttggactattgagagggaggtcttcattgttgagtccccaacatctagcacgtgaatggcacataatagacattcaagaaatatgtctgtgaacaggctgggcgcggtgactcatgcctgtaatcccagcactttgggagtccaaggcaggtggatcacgaggtcaggagttcaagaccagcctggccaanatggtgaaacccatctctactaatacattagccgggcgtggcggcgggtacctgtaatcccagctactcgggaggccaaggaagaggtgcttgaacccgggaggcggaagttgcagtgagctgagattgcgccactgcactccagcctgggctagagagagcgacttcatcct

SEQ ID NO: 561193 - DNA, 759 bp, Homo sapiens
agcggtgggttcccagagtgctccgcggcgtgtggagcgaggccttgttcccgcgttgagccgccgcgccgcgccgctcctcagcttcagcctccgcgccaggccggcccgctcgacgactgtgcaggagtgtctgatgtcgtcaacgggactataggagggagatagcaacgggacaccaaagtgagaagaagtgtatggcacatgtatgccacgccactcagctcgtatcgcaccgcacacagtctcactgatcactacatgataactaaaaacgtcgcacagcgtggcacaccggcaagaaaggggccacaacgagcccaggggcggcggcacggggggccgacggccggcacccacacgcgcggcgacaactgacggcacacgccgcgcacctccgggcacaccgcggcaccgcgcgcgcacctgcgggccgacgcgcgcccgtcgcgagacgcagccccccaggccgcggggcacgggcacggcacgcgacgcggccccgcagcagcgcgcagccccagccgcccggacgagaacgcagccgccgagccccgaccccgacgggcacggccgcgcggcgaggcgcgcgcgcgccgtgcgggcgcggacccccagcgcgccgagcaggcgggaccggacgcggcgagcgcagaccgcgctgcccgcgcagggcgcgcgcgcgccagccggacgcgcgcgagccgagagccggcgcgggcgcacgcgcgcgccccgccgcgccacgaccacgcaccg

SEQ ID NO: 561194 - DNA, 656 bp, Homo sapiens
ttgtggtgctagtttctactaatgccagtaccagatgtccatcctacgatcgctgcagcgatagcacgctctcggcggcgtcatgactgagcagatagacccttctgtaggcatcctcgatggggccacgaactggcctcgtggtaacgccagatcggcgtacgtacgcgcctgtcgagattcacctggaacaatatagtccgtcatcgcggcactacttctggacgataataaggacccattcattcattgtgcgtagatttgatcatgggggattgatgactcaagctaatggtaacttccatcatgtctggagcgtcttgcgggggctcacgtcccacattttggtcaagtagaatagctagagtgaatactccatacagaatgagtccagttttagaccctcgtcaaggtcatccttgggaatggaaccccctagctagcacttctagggagatatcgtcactaaatctgggggcaggtcagcgaaactggaaaggagcagaaattgagtgtggagggcccaattagcccaatggaatcgctgcttggagtttggttgcgactttcttgcctctgtgactaacccgggcatgaatatgttcttcttgagattctctgaagactagtaaaccgattcaagcttatggaattac

SEQ ID NO: 561195 - DNA, 172 bp, Homo sapiens
tgcagaaagcccaaaggaagggtgggacttttggggccccttttttttggaaggggcccaggggaggtttggaaaggaacaacctaggcaacgtggcaaactgcgtctctaccaaaaataccaaaaaagtttttaaaaaggggggcccccctttttgggggggggagaagag

SEQ ID NO: 561196 - DNA, 337 bp, Homo sapiens
  misc_feature (321)..(321): n is a, c, g, or t
gcctgctgccatagcagcacctttagctaggttggcccgagtaaggcctttttgctttcctgccctggtgaatggccttagctttttaggccactgggggttgttggctgggtttcccattttccaaagggaaatctccctgttgggatggaagatgggcctggccttgggaaaggaattggccattggttgccatggtgaccagggaccacgttgctgccctgtgaatgctgagtgagcgagtaagggaggaggggcgattgagggttaacctctgtcttggggaggctgatttctaaaacactggctggccctctcatnctcactcctcctgggg

SEQ ID NO: 561197 - DNA, 249 bp, Homo sapiens
tctatagatccccctcgtcagcgaggacaacgactactggtacgggcaggcggccggagcgcgggtgggcgacgagtaccgcttcgttctcatgaacggagggcaagtgatctcccgcatcgacccttacgcccgccacgtgacgaactcgatcggcaatggcattatcaccgaccccaattcttacgactgggagggtgatgacttcactgctccaccgacgaacgaactcgtcatctacgagatgca

SEQ ID NO: 561198 - DNA, 700 bp, Homo sapiens
  misc_feature (25)..(25): n is a, c, g, or t
  misc_feature (65)..(65): n is a, c, g, or t
  misc_feature (157)..(157): n is a, c, g, or t
  misc_feature (181)..(181): n is a, c, g, or t
  misc_feature (302)..(303): n is a, c, g, or t
  misc_feature (314)..(314): n is a, c, g, or t
  misc_feature (316)..(316): n is a, c, g, or t
  misc_feature (325)..(325): n is a, c, g, or t
  misc_feature (415)..(415): n is a, c, g, or t
  misc_feature (459)..(459): n is a, c, g, or t
  misc_feature (470)..(470): n is a, c, g, or t
  misc_feature (474)..(474): n is a, c, g, or t
  misc_feature (494)..(494): n is a, c, g, or t
  misc_feature (503)..(503): n is a, c, g, or t
  misc_feature (517)..(517): n is a, c, g, or t
  misc_feature (527)..(527): n is a, c, g, or t
  misc_feature (565)..(565): n is a, c, g, or t
  misc_feature (614)..(614): n is a, c, g, or t
  misc_feature (700)..(700): n is a, c, g, or t
aggcatgtgacctagtattatcgcnagcatctatctcgctaagaatgagggcattttcccgtggnctgcagttccgtttaatggctattagaggaatggttggtctttgtgagggtctcacgtccaggatcctcatcaaagcgtgctaggcccttancagagagggtagatcctgctcgcnggctccctcaccttctctcccatcccagataggcagaacaggggctacacaggtttctggagagctgtccagatagaggatcacaaacatgagctccacctgggaaacacagacagccccnntcccccccccncnacaagagcnggcaacctgggtccaaattcagaggacaccacagccggcagagggctgcagcatgccaggtaggacggaagtcgctgggggtggggatgngccccagcccctagagcctggaatagcacccggcgtgggctacngccctgccccncccncctcgcagctgctcggctcncccatggcnctgcctatgctgcnggcttttgcngcctaggctgtgcacatgaagcctccatttccaggtcnaggggtcaggcaaggagatctccttcagggctgggccctgcatcaccanctttgctggtgggaattaaatatagcacagggagacacagttgccaggcagaagcaggaggtgctgtgaatagaaaagtgcccttn

SEQ ID NO: 561199 - DNA, 1050 bp, Homo sapiens
  misc_feature (41)..(41): n is a, c, g, or t
  misc_feature (58)..(58): n is a, c, g, or t
  misc_feature (406)..(406): n is a, c, g, or t
  misc_feature (414)..(414): n is a, c, g, or t
  misc_feature (713)..(713): n is a, c, g, or t
  misc_feature (962)..(962): n is a, c, g, or t
  misc_feature (986)..(986): n is a, c, g, or t
  misc_feature (995)..(995): n is a, c, g, or t
  misc_feature (1050)..(1050): n is a, c, g, or t
ggcatttcgggcatacacccgtataagaatcacagcactanagatacatagacagacntacctgtgttgcttcatttgggtttagtagtgtgcatgattctatcgtcatgtagatcgtagtcatagctctctgactcatgaagagccagctcccgtcgctatgctatctcactatgcattgtatatatggcgccctctggacatgcgtcagaacacgtctgtagccaagtaagtgagtgctcttctccgtcgtctggcctactgtggcacttattgttgtagtggtagggaggcgtaagagaatgatccgctagagagacgagcataatatgattggggccttatatcagtataacgcataagccgaatatattacttttattaaacttagtgctcgtttgtgcgntgtcattntcctcggacagcagtgataatcttttatatgagagccatgagagacctgtagtataataagctgagctcgagtagtaccacattggctccttctcccgtggctacagattcaatgcgatcacactcaccctcccgcgcctagactcgctccttcttgtttgtcgttcacctctgttctcttcgtctttgtcttctcttcgcaccctcgcctcttgcctcgccgctgttgtccagtagtcctctcactgtattcgatccattttcgcacgctgtaccgtctgtctcgcttcctctctatngagtgatagggcgtgtaggcaagagtaagtgagctgttctaatcttgctacatctcatctctaccctggggtccactgagagcttgcgcagttctatcgtggtagtggtcacatgtgagtgttacagtgctgagatagcgtatagtggtcgaggtgtgacggcacttgttgtgctcttgtctttctctctcgtgcttcactgaatgatcttgcagtgatgttgacttgcgtgtgtggcacactatgttnccacaccgcaaaccgctgcactcngaggacacntcatttgtatcctcttgagcccacgagagaactatcaataacatgtaactgacgn

SEQ ID NO: 561200 - DNA, 826 bp, Homo sapiens
agcggagtagagcgcttgctgctgcagtacttagtggtcgcgctccactgacagataggagcgaccgaccgaccatggcgcccggcagatggcccgcgggccgatcgtccgtactggaggttgcgctcgtcggaggcgccagacgctgctctcgtgcttgctacatcccagtggccgcgcgctgcaggagcctcccggagcatgcttgttcatcagtaacacaaacaaaacctgtgaagagtgcctagaagaacgtctccttgtctttggtgcaaacacgtaacataggcgttgtctggtactaccctagttagcaatgcgtcttgccgagccggacttccctttgtaaattgagctctgcacgctggggagtttgttcgggtgaactttgaggcgctgatcatcaccatgtcggtagtcgggggaaccctcctccgtgaggcattgccagtcatgcttgctgctgctgctgtgcaggaggaagaggcagccggaagccggcacaggcaggtgcaggagaaggccagtgcgtgagcgggaggagaggcggatacggcaggaggaacggagagcagagatgaagacaagatcgagtgatgaaagtcgagaacaatgaactagtggtctgttgtaaagaagaaaacccgtatgctagatttgaacaagcatagctaaatgcgctccagctacatcagatcccgactgcttcctgtgaggtgcacgctccagtagcccagccagccgggagaccacgtggccatttgcggtctcctgacctttggcagtgaacctgtcagccttccggacatgggcgggagagctgccc

SEQ ID NO: 561201 - DNA, 184 bp, Homo sapiens
ttttatgtatttttttttgttttatatgattatgatggaagatcagaatgctgtctggcagtctgatccatccatctctctcttgctgaggggaaagagagatgggccaggcagagaacagaactggaggcagtccatctagggaatgggactgtgacggccctaccttgtgaaatgtctggac

SEQ ID NO: 561202 - DNA, 410 bp, Homo sapiens
ttacaatccccacgatcactgaggtaggaccccacagggttctcagggaacttccttaccctgtcctcaagtctccggccaaggccaggccctgtggacgtcatgcctggcatcctgttcggaatacccttgtggaccctgcctttaaccaaaactccaggacccccagagaattccagaattatattaaatgttaatattatttactagagggctgggcgcagcggctcatgcctgtaatcccagcactttgggaggccgaggcaggtggatcacatgaggtcaggagttagagaccagcctgaccaacatggtggaaacccccccgctactaaaaatacaaaaattagccaggtgtggtggcgcatacctgtaatcccagatactcaggaggctgaggcgggagactc

SEQ ID NO: 561203 - DNA, 708 bp, Homo sapiens
gtgtgtgagtgagagagcgagtgagtgagtgagtgagtgtgtgtgtgggggggactcgggttggatgtgtcggtgacttccccctccacttcgacccttcgcctcccgtcgccgctgcaggggccggtcccctgggccgtcaggaaactgagcgatacacgatgacgatcgcaggcggaggcacgcgacgctgacaccaacgggctccatcgatcgagtgcacatggacacgaaaacggtagcggaccaccatcgcgcaggacagaccttcacagctctgcgggactcagatcgccaatcacgtccacgggagcagaaggccctcacagggcaccaaactccgagagaccgaaagccagcagaagtagtagtccaggaactagtgccgacaggacagaaacccacacaccgcaaccaggcacgaagcactatgacagaaccgtcagacgccggccagacaatgcctcgtttactgcgaaggaccaatacgacagccaccgatgccgacagcagggcagcaaaagtgccgaagagcatccgcatactgcgcgccaaaagcatcggccagggcacgcacaacgatacacaccgcatccccgctccgaggagcagaagcacgcaacctcacatactcaccccatggcggacagacagcgcggcacacggcgaaccgagtcataccttgagccggcgaaagagaggggtgga

SEQ ID NO: 561204 - DNA, 148 bp, Homo sapiens
gacgatccccgtaccgatgtcacttaatgtgtcaatttcatcatacactttaccatttattttcataaatgctttcatgagctagcattattgttatgatacttaaatggtcataatcaatcagaactgtttatattctgcctaatat

SEQ ID NO: 561205 - DNA, 344 bp, Homo sapiens
ttgaaggggggatttttaaattttcccctgacccaatgggcaaagttcccctgaaattcaatttttgtccaaaatttccccgattaaacccagggaaattcccctttccacaacgggttaggggtattttttaagccaaaattaatcgggaaacccgtcatttttccccctgggggaaaaagtttttttttaaggacagcctttttggtggccttttgttttttgttttgccttgttttgttttaaggaagggtttccctttgccccggccaaattttcagttaacccaaattttgttttttttgcccccccccctagggggcaaacttaaactgcctttccca

SEQ ID NO: 561206 - DNA, 323 bp, Homo sapiens
gagcacaagttaaattgtttctcagaaattataacagtccgtcaggcgcggtggctcatgcttagtaatcccagcacttttggaggctgaggcaggtggatcacctgagattaggagttcgagaccagcctggccaaaatggcaaaacctcgtctctactaaaaatacaaaaatgagcttggtatgatagcacatgcctgtaatctcagctactcaggaggctgaggcaggagaatcacttgaacccaggaggcggaggttgcagtgagccaaggctgggccattgcacttcagcctgggtgacagagtgagactccatctca

SEQ ID NO: 561207 - DNA, 219 bp, Homo sapiens
  misc_feature (115)..(115): n is a, c, g, or t
  misc_feature (152)..(152): n is a, c, g, or t
  misc_feature (157)..(157): n is a, c, g, or t
  misc_feature (181)..(181): n is a, c, g, or t
  misc_feature (212)..(212): n is a, c, g, or t
gaagttgaagagctttttgcctattgaaggtgcattgagaaataaacttctttcctgccaccagaaattgcagttggttaacggcctgcaacttcattcccatgaaatgcagttnaatagccacagaaaatgtcacattaagcaaagcagcnagggnctcatcgtgtttgagactcgagtnctctcagaccttggattcattccctggtgtncttgaag

SEQ ID NO: 561208 - DNA, 304 bp, Homo sapiens
caataaaaactacatagaatgcaaccgagcagccgaatccaaacgctgagccaacacgtccaggtcatcatcaaataaatcagcgtacacatccagagtcatcgcagccgacgcatgcccaagcatccgctgaaccgccttcacatttgcacccgactgcacagcgagacttgcagccgtatggcgtaattcgtgtggagtaacccgaggaatcccagactcccttaacgccattccccaccagccgtcacgcgcattcggccacgaccgcaacgaggaccgctttaaatgcgactgatgagcg

SEQ ID NO: 561209 - DNA, 102 bp, Homo sapiens
acgcacgcttatgccattgccctattagtacgatgtctgaccgtacctagcgtaccttcgaactcctccgttacactttgtgtgagtgagtaccaccatgag

SEQ ID NO: 561210 - DNA, 336 bp, Homo sapiens
gctaaatttgagggaatgttatcctctcgccgcctcccccggcgccggatattagagacaataacacaggggtaatgtacacccactgctttattgggagtaatatcatcctctcccttcttggatattaggaacaatatcacactgtgcgtgtacacctgtcgtgaaattcaatggaatgtcatcctgtgtctccctggatatgatgaacaatatcacgggggatgtacaacttccgagatattgggagtgatatcatcctctcccctctggaagttagggacaatatcacaggggtagtgtacagcttctgggatgttgggactaatatcatcc

SEQ ID NO: 561211 - DNA, 553 bp, Homo sapiens
  misc_feature (91)..(91): n is a, c, g, or t
  misc_feature (499)..(499): n is a, c, g, or t
gaatacttcatggtgttctctgtatttcctgaatttgaatgttggcctgtcttgctaggttggggaagttctcgtggataatatcctgaanagtgttttccaacttggttccattctccctgtcactttcaggtacaccaatcaaacgtaggctaggtcttttcacatagtctcatatttcttggacgctttgttccttttcattcttttttctctaatctgtcttcacgctttatttcattaagttgatcttcaatctctgatatcctttctcccacttgatcgattaggccattgatacttgtgtatgcttcacgaagttcttgggctgtgtttttcagctccatcaggtcatttatgttcttctctcaactggttattctagttagcaatttctctaatcttttttcaaggttcttaactccttgcattgggttagaacatgccctttactcggaagaatttgttatatctgcctctgaagctattctgtcaatcntccaacttatcctgtcaattttgttcctgtggtgagaattgtgatcttggagaa

SEQ ID NO: 561212 - DNA, 244 bp, Homo sapiens
  misc_feature (21)..(21): n is a, c, g, or t
gggctgggtgcatgccagggncccaatcaagcatttttatcttctgaaatctttgaattcctgcctttcttggatgtttggtcttttgatataatttagcatgggccaacatttggtccagatttgtattagccaagccctcctaaaatagtaataacagtatctggcgatttgagcttttacgtagaatgtagaatctctggtgagtgaacatatcaataaagacaacctgaaccaaaattaa

SEQ ID NO: 561213 - DNA, 144 bp, Homo sapiens
  misc_feature (9)..(9): n is a, c, g, or t
  misc_feature (66)..(66): n is a, c, g, or t
  misc_feature (104)..(104): n is a, c, g, or t
cagacattncctcttactgtgaccgacagcccgtgatggatgtggcctttgtacagttcttggcancagtttctgggaaagtctcttgtttggacacctgtggnaccttgctggtgactctacagtcctgagccgccaggtgag

SEQ ID NO: 561214 - DNA, 196 bp, Homo sapiens
gccacttgttaagaagtcagcgctgagcaggcagctgcaaatatagcgtactgccgcgcggcaaggtttcatgcgatagcctgcacgatcaccccgtggccgcccactggccgtgcgccagattatcggcccccagcagctccagcgtctgcagctgcagcggcacgccctggccttgcgccaccaactgaatatg

SEQ ID NO: 561215 - DNA, 112 bp, Homo sapiens
ctgacctgaggggaacgggcttccaactgaggaaacactgttctgggtgctatgtggctcatgcctgtactctcagtcaccttgtgtgaggctgacggaagcggaggactgc

SEQ ID NO: 561216 - DNA, 336 bp, Homo sapiens
  misc_feature (14)..(14): n is a, c, g, or t
  misc_feature (149)..(149): n is a, c, g, or t
  misc_feature (217)..(217): n is a, c, g, or t
  misc_feature (262)..(262): n is a, c, g, or t
ggcggcatagcctngagacctctggccagcgccaggcaggcagcgggggtggcagaggcctgggctggagtcttctggctctgctctccctggggacaggagggagcctgggggtgtgggtggggagccggccgccgtgacccagcgcntggctctgcccgtaggagtggacagtgcaatgaaggaagaagtgcagaggctgcagtccagggttganctgctggaggagaagctgcagctggtgctggccccactgcacagnctggcctcaggcacttggagcatgggctcccgggaccccggcagcctcctggttgcactcctttccagcagttc

SEQ ID NO: 561217 - DNA, 201 bp, Homo sapiens
tgcaagccttgtcactcttggccactggcccgacattttaccgcgttattgctgtgcacctgtaatcccagctacttgggacgctgaggcaggagaatcctatgaacccgggaggcagagtttgcagtgtgctgagatcgcgccattgcactccagcgcattgtacaagtgcgagacgcttgtctcaatctttgaacaaac

SEQ ID NO: 561218 - DNA, 160 bp, Homo sapiens
cacaccctatagatagtgacatattgcccaaagcatcacagattcaatgtaattcttatcaaaataccacatcgttttccacagaattataaaattgagatgaggtcttgatgtgttgctcaggctggtcttgaactcctgggctcaagcgatccaccca

SEQ ID NO: 561219 - DNA, 536 bp, Homo sapiens
gctgagggctgcacccttaggaacacggacgcagtcgtcggcattgtcatctacgcaggacatgaaaccaaggctctgctgaacaacagtgggccccgctacaagcgcagcaagctggagaggcagatgaactgcgacgtgctctggtgtgtcctgctccttgtttgcatgtctctgttttcagcagtcggacatggactgtggatatggcggtatcaagagaagaagtcattattttatgtccccaagtctgatggaagctccttatccccagtcacagctgcagtttactcatttttaacaatgataatagttctgcaggttttgatcccaatttccttatacgtttccattgaaattgttaaagcatgccaagtgtacttcattaaccaggacatgcagttgtatgacgaagaaacagactcgcagctgcagtgccgagctctgaacatcacggaagacttaggacagatacagtacattttctcagataaaactggcactttgacagagaataagatggttttccgaagaaa

SEQ ID NO: 561220 - DNA, 369 bp, Homo sapiens
  misc_feature (3)..(3): n is a, c, g, or t
  misc_feature (19)..(19): n is a, c, g, or t
  misc_feature (52)..(52): n is a, c, g, or t
  misc_feature (89)..(89): n is a, c, g, or t
tantccaattccaattccnattcccattcccattgcaatggagttgattccnattcccattcccattccattccggattattcccattnccattgcattccattcccattccattcccctgcactcgtgttgattccattcccttccatttcattccattccattccattctattccgattaattccattccattccattccattccattccattccattgcaatcgagttgattccattccattcctttccattccagtccattgccttgcattccactcgggttgattccattcccttctttcaactccattacattcccttccattccactcggaatgattgattccattccattccattccattt

SEQ ID NO: 561221 - DNA, 204 bp, Homo sapiens
  misc_feature (104)..(104): n is a, c, g, or t
  misc_feature (111)..(111): n is a, c, g, or t
  misc_feature (141)..(141): n is a, c, g, or t
  misc_feature (173)..(173): n is a, c, g, or t
  misc_feature (184)..(184): n is a, c, g, or t
acctactcaggaggctgaggcaggagaatagcttgaacccaggaagcggaggttgcagtgagccgaggtcatgccactgcactccagcatgggcaatagagcgngactctntccccccggaaaaaaagaacaagggctaanttcaaatcaaattttccctgtaccctaagaanaataattaggncgggagatgtttgactaagt

SEQ ID NO: 561222 - DNA, 372 bp, Homo sapiens
ccgtatgtggcaggattgggcacatcttcactcgcctgcactcaagcggatgtggcatcaggcactgctgcgctcaggagatagagtgcgcatggaccccccctgcaccaacacaacagctgcttccacctacctcaacaacccgtacggttcgttggccgttgggccaacgcaccgtggctcacgcctgtaatcccagcactctgggatgccgaggcaggtggatcacctgaggtcaggagttcgagaccagcctggtcaacatggtgaaaccctgtctctactaataatactaaaatcagaggttgcttgcagtgagccaagatcataccattgcactgcagcctgggcaacagagcgagactctgtctc

SEQ ID NO: 561223 - DNA, 469 bp, Homo sapiens
aaaactggggatcccttagggaacgggttgcctcatacctgaacataagctgggctgctgaaattggatttttagctaatgaaaaaggggttgggctaggcctctaaaaatggtttaatgataaagttttggggccaaatagaaaaaaaaaaaatttgccttcccggccggattttggatattttttttgcctttaaaaatgctattctgggaaatttgggaaatcccggggcctttcatggatatcgggggctttaaaaggattccccaacccctgttgggtttggataaaaaatagacaaagatcatattttttggggggggataagctctggaaaaaagccatccccttatgaaggtgccgggatactccctttttaaccttcccctcccaaaaagccggcttttttttggccctaaacccgattttaaatattaatttggtggtaatttaataatagggctgcca

SEQ ID NO: 561224 - DNA, 225 bp, Homo sapiens
catatggataagccaaatgaccaagcaagattagacatacagaaaatccatgcaggtcccatacacaaagcatggtgcaatagattatgaagcaattgtgaagctaagggatggctttactggagcagatctgaaaaatgttggtaacatgaagcaggtatgtaacgcaatacagggctgcatccatacattttagtagtcctaggcaaagcactacatgcaaag

SEQ ID NO: 561225 - DNA, 133 bp, Homo sapiens
ggcagtttggtctcgaactcctgactcagatgatccacccactttggcctcccaaagtgctgggattacaggcgtgagccaccacgcctggccatttttgaggatttatcactgtatgcagacccctgtctcc

SEQ ID NO: 561226 - DNA, 405 bp, Homo sapiens
cacgagggcgacgatggcgccgcagcagaaggcgaacagcagcaccagcgcgggcgacaggccgtggtgctgacgggaagtgggtgtgttcatggtggtcctcacgatggttcggtgcggaccgtcgcccggggcaacgatctgtaaatgctctggcgtcaccagcgtcaggctggccggttcaggtgaagcaacggtacggcgcaaagcctcgccggagaatccgtcgggtacgcaacgcagcgttgcgcagaatcgaacgctgccgctcaggcttcggtgtccagcacctcacgcagaaaggcaatgaacgcggcgacccgtcgcgagccgcgctgattgggcatatacaccacgctgattgcaacgctcatcgcacccggtgccacctcgtattgcgccagc

SEQ ID NO: 561227 - DNA, 493 bp, Homo sapiens
  misc_feature (445)..(445): n is a, c, g, or t
  misc_feature (462)..(462): n is a, c, g, or t
tctcgtcttcatttctgtgtcctttgttcttagaggtccagcctgtgtggccctgtgacccgcagatattgggagatacacagctaagactccaggaccccctggaagcctagaaatggtgagagtgccgagtctgacatcccgagagagggggaggggctggtcggaaccgtgagaagtggccgtggcggacttaggtctcccggcagtcagctccacaatctgcgcccggaattctccttgcccagctcggcttcagtccccttcagccataagatggcgactgtgctgacagccgggccccggcgttcctgtcttccctccgcagtgactgtgcctgacgtgtagccctgtctggggagctctgcacgcgcaatttccgcagtctctcccagattgttgcaagaaccatggggaggggccttcagatgggagttttgctctnttcgcccaggttggaantgcatgggaacattttgggttaacagcaatt

SEQ ID NO: 561228 - DNA, 921 bp, Homo sapiens
ggcaaggaggcaaggaccccgatctctacccacggatggggagagggcaggaggagacccagccaagtgccttttcctcagcacatgagggagggggcttgatttcccattccctcccggcgacaagctccagggacagggctgtccctcatgggcgagccagacacttcactcagacacaacttcattcctgactgcatccagtcgatggggatcatcacttaccacacccccacaagattcaagacacaaagtctatccagacatgcaccccagtatcgtgtaatcccgtgatgataagcatggtagactggcgcatgatcatccgaggaaccgaagaagccctacagcctggatgtagtacatcccatgcacacctgtgaagaaataagccttaaagatactaaagatgactgaactatcaagaaaaaaaagaaaaggggcgagagcacgaaccaccaaagaatacccatgccaggaggaccacaaagaaaataccgcacgaattccccagaccattaccatgagacacaacacggggagccccataatacggtagagcacgtaattaataaagacaaggacaaagggacagcacagaatcaaccaaacgccaggaaacaggggacaaaccgagacaacaacaaggaaacaccaacgcgaagaaagcgaacccactaacacccatgcagagagcagacacaaatcagaccgccagacagcaccaaaaaacagaacaaataacaagcgaccactaacgcggtaccagacatacaacaaccactacaacagtgaaccccactcggcagttcaccacgcacccgcaacaaaaggccgagcgaggagtgacaacgcaatcaggacacaacgagcaactaagactcacaggcacacccaccagccaacagagacccaaaacga

SEQ ID NO: 561229 - DNA, 171 bp, Homo sapiens
  misc_feature (2)..(2): n is a, c, g, or t
antagcactgcaggcgtcaacaatttgctgaatacataaatggcgatttggccaggcacagtggctcacgcctgttatcccaggactttgggaggcagaggcgggcagatcacaatggtcaggagattgagaccatcctggctaacatggtaaaaccctgtctctactaca

SEQ ID NO: 561230 - DNA, 240 bp, Homo sapiens
tacagtatcccgacaagaaatttttgctttgcgaggatattatgctgtgcagataggcgggtgccttgcttagaagctatgctcttttaccaaggtcttgactaggacaacctctggcgaaacaggaccatgacctgaacagaaatgtctaagattcctcggatgctatgaggtgggtagcctggaaaaggagatgaggcagggagactagaaacccaacacataatggggtatcctaag

SEQ ID NO: 561231 - DNA, 202 bp, Homo sapiens
gcacctgaccgctgtaccctcccagggaaagcgataatggcatcatggatgcctgcagcctgagcagcagcctccacctcatcattcccagctgtgacacggccgtgacggatattgacgccgatggctgcattaaagaggacagcgtcttggggcacaactgcaatgtgagaccgcagagaggcctgacacacctgcgaaa

SEQ ID NO: 561232 - DNA, 412 bp, Homo sapiens
agccctgggccggctgtctcgctgcgatgctctgctggtcgcggacggaccctgcctccccagcttatcccaggccagaggctgcatgccactgtccccggcagcgccaacccctgcttggctgttatggtgctggtaataagcctcgcagcccaggtccagagcccccggcgagccggtcccataaccggccccctgcccctgcccctgctcctgctcctccccttcgggccccctcctcctgcaaaacccgctcccgaagcgcgctgccgtctgcagccacgcgggggcgcgcgggagctctgcgggcgctggaacctgcagacccggcctcggtcagctgggaggggcccgccccggcacaaagcacccatgggaataaaggccaagccgcgacagtcagcacggggaa

SEQ ID NO: 561233 - DNA, 881 bp, Homo sapiens
tctgggaggcggttcccccgcggcttagacccgtgttttccacccgggtgcagaccgccgtggtatggtgtgagaccccccttgcgcttcttgttgccccaagacgggcacccctcgtgggcccgcgattcaccaccggggttagtggctgcgtttccccggagagacatccggtggtgttcccccccgcgggtgagcgcccagcgtttatgctgttgccgccggagcagtggcgcgtgcttagagaccctcccccacgcatgtgttcccccccccctcctcttggaggggcggggcacctcttgtgctcctgtgtgtgtgcctccacccccccgggtgggcggagtcattttttcttccgtggtagtttctgcacccccgctgctgtttatctctggtgggcgcgggggcggacaatcacccatgcgggggggcggctcaatcctattggggcgaaaaaatggatcgatcccccccctccggtgggcgcccccactgcgtgggcccgctcctccacacataggcacccccccctgctgtgttctcttgtgtgaccccgctgttgcgcgatgtgacgggggtggacaccccatcagcaatcggtggggtgccgccgcgcccccctcgccccgaggatgggggccccccatcttttgctgcggcggtattttttttggcagaccgccccccgcgggccgccggtttttgtatatctccccctcggcggtctttcccccaacagcgcgcggggtgtctccctctgtcccacccggcgggcgacacgcatttggggtttcccccctccccttttttaaagcccccaaacaccccccatttttttttttttcccccccccccccaaaaaaaagtggggcccccca

SEQ ID NO: 561234 - DNA, 217 bp, Homo sapiens
atcatcattatagttagcagatattttctcctattctgtaggttctctacactcagctgattttttcctttgactgttcataaacttttcagttagatatactcccatttgtctaattttatgctatctgcttttggtcttatccaaaaaaaagtaattgcccaatatcgtgtcatgactctttcctgatgtgtttacttccaggagtatgatagta

SEQ ID NO: 561235 - DNA, 464 bp, Homo sapiens
  misc_feature (50)..(50): n is a, c, g, or t
  misc_feature (68)..(68): n is a, c, g, or t
cccaaaaaaacccccagtgttttaacaaacctgtttaggaatgtcctaanttttgtcaatcaaacccnggatgttattccttcccttccccaactcactgtgctccctaaaggcagcaacccattcatctttccctttgcctctggatacacccgaatgaccccaggtaacatcatcaggcccgggtgcagtggctccctataatccccaatattttgggaggccgaggagagaggatcacttaagcccaggagtctgagaccagcctgggcaacatagcaagacccccatctctgcaaaaaaataagaaaattagcttggcatggtggcacgtgcctgtagtcccagctacatgggaggctgaggtgggaggatcacttgagcccaggaagtccagaacgtagtgagccttgattataccactgcactccagcctgggtgacagagcgagactctgtctcaga

SEQ ID NO: 561236 - DNA, 786 bp, Homo sapiens
ggcgggggaccatgctgcgtgtggcaggctggcgccgaagagcccctgtgtggctgctggtggctgagcgaggtgcccgccgggggggctgctggcttgcgctttgggctccgggtatgcggccttactttcctcttgcgatctcggctgagcttgccggttgcttgcttcggccaggtggtaccgtaagcggggttctcagtcgtggcggtaagccccaacggcagggtccttccccgggcgggagagaactcccaggtcggggtgccccaggagggccccacaggttgctgccctgttcgccccttcccggtgggttggcttaggccccttccccgcgtggggcgcctgtattgcccccgccttgtggttcccgcgggtagctcccatgtcgcgtgagataggcccttttcacgctatacgtctcttgtggacattcctttggtcgggagggttacccccgcagggagcagtgggcgtccgcttgaggagagagctccccaagggtctttccacaagggttgttggcccccggggttagtgtgaaaagggacgcccgggcaccggggacccacgggtcaccgtgggtatatcaaccgctgatgcgtcgaaaaacccctcgttttggaaacgccggggcacgaggatttccacggcaaagaggccccgtgtgtgctcaaaagtaaaagacaagtcgcaaaagggaaccggcaaggtgacccgggccccaaaagataacgggaacgcactcgtgcatccggcagaccagcgagtgcgcgcacccga

SEQ ID NO: 561237 - DNA, 866 bp, Homo sapiens
gaggaggaagccagctctgtgcctggaggagactcgccgcatgtcaggtctctgggtgtgccaagggcccacggagaaaactgacgacccgtttctgaaatccttatgggagacaatcttgtgcctccgggagatccattctcccaccttgaaacgcacgggagggccatgccctccgaaaaagcgctgcactcctcgctccgggtggggattatccggaagaactcccaacggtggtagtgaccactctaccttcggatgctcctcctgattcagacggcctgaagtcgaacatactcactctggagaaggacggggaacctacaattttctccagacccgtaatgaccaggtccttggagtgactagcggtatttggcctccaatttttcccggtgggttggcatttcaatattaataggttcacccctggggtgacgaaaccgcatttggaacgaagttatgtctcactaaaggtgcatacaccttgcttggatggccttgggggtccttgaacctgaggaaggtgggtggcgttacacgggtgctcattgaattgtacatcggggcacggttatcgacttccatgaatttgtcggatcgacggtcctacagaagtgggggcgaagatcgggggtggtaaggaccttttggagatgaaggggcagtggccgtgggtatcagggtggaattagccaaagggaaaacaagtgtctggtgaggaggtatccggaggtaggcaaccatagtgactgttggggtgatgccggtttgtggtatagttaatttgctataagtgttgagggcccataaagttgttggaaaataagttataaaaaaaaggattgtagaggagagagggagat

SEQ ID NO: 561238 - DNA, 110 bp, Homo sapiens
atgccctgaaggggcgagagttatagccaaatcactgtaaaaagctgcattagaggatagcagtggcagctccgagttacaagaaattatgagaaaccgtcgaattcgag

SEQ ID NO: 561239 - DNA, 122 bp, Homo sapiens
ctgcgcggctatggtataatacgcctcacactcattctcaaccccctgacaaaacacattgtctccctctatcctgaactagctacatgaggccttatttttaccagccacagacacctacc

SEQ ID NO: 561240 - DNA, 316 bp, Homo sapiens
agaaggttcccagtaaccaaagaaataattagtgaatgttaaagtaaagggaataacatcctgattgtgggccccgcatcttcccttgaaggggggacctgccaacttcagggcctgtcccctcagaactccaaggactttggacaaatggtccgaaagatcccatatttggggttttggtcctgtgaagaattaggagaaactggaatatggcagctggcagatccccccatccttccttttacccatgggccaactggggggttcaactggagagaggccctgcttcaagaattaacccccccagtggacaaga

SEQ ID NO: 561241 - DNA, 562 bp, Homo sapiens
  misc_feature (13)..(13): n is a, c, g, or t
  misc_feature (36)..(36): n is a, c, g, or t
ggttccccccaanggaaggcccttcagcttaccagnggatctttctgcagcaccctacaagctagaatagagttggggccaatattcaacattcttaaagaattttcaacccagaatttcatatctagcctaaataagcttcataagtgaaggagaaataaaaccctttacagataagcaaatgctgagagattctgtcaccaccaggcctgccttataagagctactgaaggaagcactgaatatggaaggggaaactggtaccagccactgcaaaaacataccaaaatctaaagaccatcgacactttgaagaaactacatcaactaacaggcaaaataaccagctagcatcataatgacaggatcaaattcacagataacaatattaaccttaaatgtaaaggggctaaatgacccaattaaaagacacaggctggcaaattggataaagagtcaaaacccatcagtgtgctgtattcaggagacccatctcacatgcaaagacacacgtaggctcaaaataaagggatggaggaatatttactacgcaaatggatagc

SEQ ID NO: 561242 - DNA, 361 bp, Homo sapiens
ccaatttggggaaattttggcccccaaaataaaaatggcccatattttttggtaaaacccccaggtaccattttttagggcgggggcggggggtccccccctgtattcccacccttttggaggcccaggggggcgggttccaagggtcaggggttaaaaccccttttgggtaccccgggggaaccccgtttttttttaaaaaacaaaaaattaaccgggggccggggggggggcccggggttcccccttattgggggggttggggcgggaaaagggcttaaccccgggggggggggcttccgggggcccaaacagggcccctgccccccgggcgggggggaaaagccaagccccgttccca

SEQ ID NO: 561243 - DNA, 728 bp, Homo sapiens
  misc_feature (116)..(117): n is a, c, g, or t
  misc_feature (119)..(119): n is a, c, g, or t
  misc_feature (125)..(125): n is a, c, g, or t
  misc_feature (129)..(131): n is a, c, g, or t
  misc_feature (147)..(148): n is a, c, g, or t
  misc_feature (166)..(166): n is a, c, g, or t
  misc_feature (213)..(213): n is a, c, g, or t
  misc_feature (256)..(256): n is a, c, g, or t
tgtattggcggtgctgacggacagaaactacacggtcaccggggaggagccccacgtgcagctctaatcacacccctgccagccccacccagacacccctccttccagccacgctnncntctccnagcnnnagcctcctcgggaganncactagaccaaccacggncgtcaccccacaagccacatcagggctgcctcccacagccacactgngatcgacagccacaaaacccacagtgacccaggccacaaccanggccacggcatcgaccgccagcccagccacgacgtccacagctcagtccacaacacggaccacaatgacactaccaaccccagccacatcagggacaagccccacgctgccaaaatcgaccaatcaggaactgccaggaacaacggccacccagacgacaggcccacgtccaaccccagcaagcaccacaggcccaaccaccccacagccaggacaacccacgaggcccacatgccacagagaccactcaaacaagaacgactactgaatacacaacaccccaaagcccagacatcacacactccccgcctacggcggggagtcccgtcccttccacaggtcctgtcactgcaacatctttccatgccaccactacctatccaaccccagcacaccctgagaccacacttcccacctcacggtccacctttctccacctccttggtgacccaagtactcacgtgggggaagg

SEQ ID NO: 561244 - DNA, 1708 bp, Homo sapiens
  misc_feature (74)..(74): n is a, c, g, or t
  misc_feature (223)..(223): n is a, c, g, or t
  misc_feature (363)..(363): n is a, c, g, or t
  misc_feature (1639)..(1639): n is a, c, g, or t
  misc_feature (1708)..(1708): n is a, c, g, or t
gcagaaaatgtcgacattactgctgaagggacgcgcatggttatctgtgaatgggccccacggagggaagcccntgccggcaggggcacttcagagtcagcagtcaatgctgaggaacctcaggcctctgtcgtgtgggaagagacagagaagacacagcaggctccgggctgtgacaagatgcggctgggagtacacagcacaaggaacttggcgtactcgnttcgggagctacttctgataggtcgagtggtagcatgagagcactagagtcaatggagttgttaaccacgttgcgcgcgttaccggattaatcaaagacttgatgtgtcttgcttggtactcgactcaacgtgtccccantacagaccgttttggtttatccaatgcgatggaaagtggggggcttcattccttttggtttggaacatagtacgcggtaaaatggatactaattgtgagtttggcacaaagatagtcaacgaatacgccgacgaagggcgcttttcggggcagttgcacgaaacgcgaaggagctcgattgggtctctaggtgggccaagtttagtgctttcgaaatgatcccgaagcgacaacgtgatcgaacttgtgacactacccgttttggcagaaggcgacgagagttgggatccatatggtaggcgctctctcgatatgtgccaacgagaatgtgccaccgaacgcggctcttttgcactgtgcgagggcgacaacggaccaaactaacacctaagggtctcaaaaaggaaatccaaaacgcgggattcaagtttctaacgcgccaaaaaaagttcggtccaagggaggacgtcggtgaatacatgcgttgagttggattccttaccttgggaacaaccaagagaacggggaagacccctgggatattcaacacgttcggatggcggcccttggagattcggaacaaggttactaagcgaacttgccgtagacacggaagggtttaaagccccttgcggtccggtaaacccattggaagattaaggcaacacgcgaatttgactcaacggcaatttggaacaccaccctctataaaaaggggagaaccccctttgaaacggtgtttcggtttcggcagttcactttctcagaacaaatctccggaagtgttggcgcccaacttataaaaaaaaaaggaagcaccttgaatttcctgggagtgtcgatcttcgcgagcagaataagggagctcactttccagcacatttggcaaactgctgggacttacccatccccggtcgaacgaagagaccctcctgaagtgtgatctcgtgcaggcaatttttcggcgcgggccgaaaacaacccactgagggggcggtcacaaacgcgtgtgtaacgactgtgtcggacaacggccacactcgtcgtggccctacattatgagaagattggtgggcccaactttctcgtggttaaaaaacgccagaacacgtgttaattagaggtcttgttgagtcgcctgggagaaagcgctggccgtgtgaaaaacactttcctgtgtgcgcgaaggagtcaatcgcccgccttggtatatatttttgcgaacgacgacgcagacggagttcatctcacccttgtattccgaaagtgaaaaggntcccaggttggctacccccgctctagtaatagatcactgtgccgacagacataatcagccgagaagcan

SEQ ID NO: 561245 - DNA, 435 bp, Homo sapiens
cagaggcacaatgaggattaggaccggggaattgcagtcccagttgcagtggctcaaggcttgtaatgccagcaattggggagggcgaggcgggctgatcacttgaagtcaggagttggggaccagcctggccaacatggtgaaactccgtctccactgaaaatacaaaaattagccaggcatggtggtatgtgcctgtaatcccagctaattttttggtattttaagtagagacgggtttcactgtgtaagccaggatggtcttgatctcctgaccttgtgatccgcccgcctcggcctcccaaagtactggaattacaggcgtgagccactgtgcctggccctttttttttctcctaggacagggtctggcgtcaatggcccaggctgcagtccagtagtgtgatcatggctcactgcagcctcaacctccta

SEQ ID NO: 561246 - DNA, 445 bp, Homo sapiens
atgccgctgtagctgctgaacatttgctacattcagtagtcttaagaggctcacaagctggagaggcttagcctgtccaccttcccacccatgtgtggtctggaagaaggtgaccatctcgttcaagaaaaaaagatccttccaaagctgtatttcgcatatcctaataccactgctattgctgccactggccaggcccagatgccgaatgtcctgagcgagtttcggaggaagggagaacaatgtgtctgtccccgcaggagacacgcccgctcatgtccccgccccccgggcccagaaggataaaggccgtgcagtataggggaacatacggttcttctctttgttcaggccaaggccccaatatcggcctgttcggtgactgggctgatgggcacaggctctgccctttgaccctatctttaggctcgtcacattgaggccg

SEQ ID NO: 561247 - DNA, 785 bp, Homo sapiens
  misc_feature (513)..(513): n is a, c, g, or t
ccatgcccctccagaaggacctaggagagtaggtgagctttccaaagtgagagacgaatctttctttcttgttttctttaaaggggcaggatgggtatgcttggggtctttctccttctgtgtgccccggtagggagggagagactagagggcaagggcagaaggtgattgagtaacactgaacgcaggaatcctggaagatcagccctcagcggactggtctcagaagatgctcagtaacgaaatctcggttctcttcggatggaacatgatataattagtcgatactaaaggagctctaagaaatatggctaaggacacgccgttaatgttcgaagctttgaatagaggatctaggagcgatattgttactctttctcaagtcccacacatgtaagacgtcctcgtgtgattgagaatcttcatcgtggggtcaagagggctaagatgtccatcgattgtaggttgagtgaggacttagattgggtaccgagtaagatcgaggctgcctgngcgagggcgggttatcttcttatgccatcatgtgtggctttgctttccagtctggcctgtcctttccagctgccttttggtctgagcctgctagtggaggggccaagagttagtctgtgagtaagagcaggtgattcggggactagctgggtgtggcaggacaggagcggatggatctcttgggacaggttcccccggggtgtataacacaaggagcaggattgtgctggagcaggaaacagtagtgctgttgagttggcaaaaaggctggc

SEQ ID NO: 561248 - DNA, 378 bp, Homo sapiens
ccctgaggatcccttcgattggcggcacttacacgtgcaccagggacagagtggactgaagcatggaaaccggggcaagagacaagcactcaaatctgcctccactgacctggggacagcagatgttgtcctggggcgggtgctggaggtgacagatctccctgagggcatcacccgtactgaggcggacaaactcttcacgcagctcgccatgtctggcgccaagatccagtggctcaaggatgctcaggcgctgcctggagggggtgggggggacaacagcgggactgcctaagctgccccgcccccgaccccgcaccgcccccccacccccccccccccccccccaacccccccccaccccccgcccaccccccc

SEQ ID NO: 561249 - DNA, 988 bp, Homo sapiens
  misc_feature (988)..(988): n is a, c, g, or t
ggcggaactagcggcggcctgagcagccatgtcaggctgctatttgtgcggaggcaggacgagcagtgtccggagcccaggatccgtgctggtttctttccaagtgatgaaatcgcagttcaccaaccatggtattcatcatcttccgttctcttcttcagtgccaacatgtaagaaacgttcttcaatatggtggggaaattactgttagtagatccaacacacagtgtaccagacatggcatcgcatgattccaccaaccctaggactcaacctaagtggagcgattcgatctcgtgtcgggggttcccatgcaagcgacgcgaacctaaagggccgatgccacgatagtgaatggacgagacccaacttcgtcgttcccggtgcaaaaacctgctgcctgtttatcccatgacaattggcgccaatgtatcagcttttctacgtctattacagcgcacgccaaggcatgtgctcattgtctttcccgtcttgagtcaatactaagcacttactgaccatgatagaccactttgcatacaggcacgagaatttgtcccaaaagcttagaacttccatctactgtgaggacaccaaaggggcgacatggcacctccctttagggagctggaacttgcccttggaaacgggacaggcactggtaccttatttgcgcatgggcccctttacagcggtgtgcgcgtttggcacgttcaattggcccttgcattagcgccttggttagcacccaatttcgctcctttccacttggagcttcgacgggatcgactgaattcaccactttgttccccacttgccccatgtggcgtcctctagattgccgcaccccaccttggaggcacggcccttctttatactcttaccgcttacccgccgggtggctcttggcctcgtacctttgagggggacacgctttgcttcgattcgccccgagtggccgcctttttggggcttccgcagagtattn

SEQ ID NO: 561250 - DNA, 819 bp, Homo sapiens
gtttccgggagaccttgctgcccgtttttttggagccgcaatgagggcccagtgcacctaggcgtgggatgctctgggcgtgatcttctgcttcaactgcaagagaccccctttccggggtttaagcccatctcctgcctcaagccttcctcgagttcgctgggaacacggtctttgtattcattgatagactttctgtttgttttctgagaacagagtttcagctgtcacccccgagctgtgagatgtctctggggtggaatctcggcgtctacatgcaaacatttgggcatccccgggggtttacaaggagttttctccgcgctctaagcctcccctgaggtatcacctgggagtttatcacggggggctcccgcgcaccaatgcctggcgtaaatttattattttttttgaggacaggaagtctcgcgtcttgtctgcccgcaggcttggaagtgacacagtggtgcggtcttggctcaactgcaaaggtccgcctcccaggttcacgccacttttcctgcctcagcctcctgagtagctgggaactatcacggcgcccgccaccacgcccagctaatttttttgtaatttttagtagagagtggggtttcacctgtgttagccaaagagtggtctcgatctcctcacctcgtgagtccaacccgcctcggcctcctaaagatgctgggattacaggcgtgagtcattgcatccggcgaccttctccctttttgtttaagtgtttgccagaaagtcaccccagcagcagccggtatggtgcctgtacattatggagcttcaaaaaatgtcaaatga

SEQ ID NO: 561251 - DNA, 603 bp, Homo sapiens
  misc_feature (38)..(38): n is a, c, g, or t
  misc_feature (123)..(123): n is a, c, g, or t
  misc_feature (134)..(134): n is a, c, g, or t
gacggacgtgttgcgtcgtgctgttcaagaggatcccnttcagcacatttagtgatagttttaagtggtaagacaccccaccttcagctggtacctgaaagcttaatctcgttataaataatncacggtaattnaggggaagtatgtccggtggctaaaggatcctcaaaccggccatccccaaggaaaatcatgtataagtatggctaaatgagggtcggtatctccttggtttggaaggtggctagatgttggcggtaaactggaaggggagaataatatccttaaagtttacaccccctataagcctaaagccatttaaatggataaacggagagagactattagatttggctctagggtataaaatccattatcggatcatattcctggacctcccccggattccaattaaaggtgcggaatcagcacataaagtatcctaaagactggttccaggtagtccaccaatgatccgggtaagaccaatggctcacatacttacacacgcacacacatagatttcatgggtttaaaaaaaacccaatttggttcctttagaaaatggatggcggggctctccagcatatatccgcaagatct

SEQ ID NO: 561252 - DNA, 436 bp, Homo sapiens
  misc_feature (18)..(18): n is a, c, g, or t
  misc_feature (34)..(34): n is a, c, g, or t
  misc_feature (47)..(47): n is a, c, g, or t
  misc_feature (153)..(153): n is a, c, g, or t
cctttgggagaccagtgnccttgttgttcgcccncattccgtgaggnagatccacctatgatctcaggtcctcagaccaacccagcccaaggaacatcttgccaatttcaaatcggataggagtgtcaggcctctgagtccaagctaagccantcaaatcccctgtgacctgcacgtgaacatccagatgacctgaagcaactgaagatccacaaaagaagtgaaagtagccttaactgatgacattccaccattgtgatttgttcctgccccacgctaactgataccatatattcttcccccgcccttgagaatgtactttgtacacctatcccaaacctataagaactaatgataatcctaccaccctttgctgactctctttttggactcagcccgcctgcacccaggtgaaataaacagccctgttgctcac

SEQ ID NO: 561253 - DNA, 581 bp, Homo sapiens
cagtccttaataagctaggtgtctgaacatgatgatgtagtgttattaaaagacctttaatccgttctacttttcttgaagaaggaggaccgtaagggatataaaggtttcactgaatactaagagcctgaaaaactgcttggttgatttgactaataaaggctggtctgttatcagactgtaaagaggtgggaaggctaaactgaggaatagtgtctgacagaagggaagaaatgactgtggtggccttctcagaccctgtaggaaaggcctttactttattcagtgaaagtgtctatttaagactaagaggtatttaagtttcctgaatcagggcatgttgagtaaaggtaatttgccagtcctgggtggggcaaatcctccagcctgatgtgtagggaagggagggggcctgaataatccctgaggagtagtagaatagcagatggaaccactgaacagttatttccttgaggatagatttccacgatggaacggaaatgcaaggttctgagaggtgggctagtggcttgactatagcataacttgccttgctgtgtgtggcgattaagctggtggac

SEQ ID NO: 561254 - DNA, 442 bp, Homo sapiens
actagtgcaatggtttgggcacagtggctcatgcttgtaatcccagcactttcggaggctggggtgggagcatcgcttgaagccagaagtttgagacaagcctgggcaacatggtgagtccctgtctctatcaaaaaaaaaaaaaaaaatttacccgggcttggtggtgcttgcttacggccccagctccttggaaggtttgcggtgggacttatcatagacctaaggggaaaaaactaacaagcacaagataggttatgttagcccctaggaagttttgaccctaggatttccaggctgcagtgagccatgagttgtactactgcactcgaggtttgggtgacagattgagaccttgtctctggaaaaaaaaaaaaggcccaaaaaacttacatgtgacgggaatttccccgaaccccaacaagaaaaaaaatttttttgc

SEQ ID NO: 561255 - DNA, 772 bp, Homo sapiens
ccaaaggtataccggcatatgacatggatcccccttgggaaccagctgatctctttccagagggcactatccgaccagtgcatgatgatatcctcatcgctcaactgcggcctggccaagaaattgacctgctcatgcactgtgtcacagggccttggccaagatcatgcccagttttcacccagtggccaccaaccccagttacaggctcctgcccagacatccaccctgcttgagcccctggaaggggaggccaactgaggagttgagccggtgcttctcaccctggtgttattgaggtgcacggaagtcccaggtaaaaaggtggcccgagttgcccacccccggctggataccttcagccgagaaatcttcccgggatgagaagctaaagaagcgttgtgaggcttgcccgggttcgagatcacttatatcttctctgttgagtcaacgcggggtgttgcccccaccgatgtgctggtgagtgaagccactccaagtaactgatggggaaagtgcccgcgcttcttggatgaactagactgcggttcagatggactgagcttggatgcttctgaggccacgctgaagctttgggttctgactgacccaccctacaaggactgctgaaccgagagccccgtgtgactagggatcctgagttttctgggaccattccagctttaatccataccttttgttaaatgtgccataaaatgagactttttacgcctttataaggccttagatgtaaataaactcaccccaacca

SEQ ID NO: 561256 - DNA, 338 bp, Homo sapiens
catctaggacctggtaaacgccgtttgaatcaagctgaaaactacagccatcatttcctggcagaggcatcaggccatccatgtcaaattcttggctggaatcattcgcagatgttgctttgtgtcgcgcgaggagaggttagcatggctagcctctctccatgctggctctgggggtggcgggtagatctcccaatcttcgccgtctctaggattgtcatccgggccttgtgaagacagcgcgatatagcggcggcgcaaatcaacaatttttttggatgtttcttgtgatggcgcccactcagtcgtacgtgcggttccgtatcaagaagctattt

SEQ ID NO: 561257 - DNA, 445 bp, Homo sapiens
attcatgtccttatgtaattctctctctttgactgccaatgtgacctgtgactgacttctaaccaacagaatatgatggcagggcgtaatgtctcactcctataatcccagcactttgggaggccgaggcagacagatcacttaaactcaggagttcaggccagttgcaatagctcacatctgtaatctcagcactttgggaggccaaggcaggcagatcacgaggtcaagagatggagaccaccccggccaacctggtgaaaccccatctttactaaaaatacaaaaattagcccggcatggtggtgggcgccagtaatcccagctactcgggaggctgaggtaggagaatagcttgaacccaggaggcagaggttgcagtgagccaagaacgcgctactgcactccaggctggcaacagagcgagactccatctcaaaaaaaa

SEQ ID NO: 561258 - DNA, 415 bp, Homo sapiens
ccttaaaagggggaaggagacagaagaagatgaaggaagaggaggaagaacggaggaggacggacgaggaagaacgagaaggtgggaggaacgaggacggaggaagaggaggacggaagaggagggaggaggagacggacaggaaaagagggaggaagaggaggaagaagaggaggaggaggagagcaaggagaagagggaggacgtggcagtggcagtggcggccatggttgtgatggtggtggtagtggcagtggcagtggcggccgtggtagctgtgatggccgtggtggctgtggcagcaaaagcagtcggtctctccttccccatagggagcatgtccttatgatccgctgcagcaaagccaggtgtgcagactcaggatccgtcttgacttgggtctagtgccctttgg

SEQ ID NO: 561259 - DNA, 710 bp, Homo sapiens
  misc_feature (2)..(2): n is a, c, g, or t
  misc_feature (165)..(165): n is a, c, g, or t
  misc_feature (252)..(252): n is a, c, g, or t
  misc_feature (344)..(344): n is a, c, g, or t
  misc_feature (364)..(364): n is a, c, g, or t
  misc_feature (417)..(417): n is a, c, g, or t
  misc_feature (431)..(431): n is a, c, g, or t
  misc_feature (444)..(444): n is a, c, g, or t
  misc_feature (474)..(474): n is a, c, g, or t
  misc_feature (516)..(516): n is a, c, g, or t
  misc_feature (535)..(535): n is a, c, g, or t
  misc_feature (570)..(570): n is a, c, g, or t
  misc_feature (582)..(582): n is a, c, g, or t
  misc_feature (662)..(662): n is a, c, g, or t
tngggggcggagacccatcaccacgcagcctcgacccgccccctcctccagggctgcagccccgcccagtggctgaagaaagcaaacgccttgcagggcgaaggttcccaggatgcagtaagggggggtggccccaggctggcggggaggtggagtaagggggcnctttccgcggaagggtgagggactatgagaagctggggggcaggcgggcagccgcggtcttctccaccacgaagccgtagtaatacncctcctcaatgtccgccagaaacttgatggtacaggtccccaaaagcagaaaaggccagggggctgcagcccttgccctcaaatcgtgggtngagtgtaaagggaaccccancccatggctgaaatgccataaaggctggaggcctcgtagatggagtaattccnccccagagtggatncccgaaaccccanccttgaccgctgtccgccccaggagcgccnccccttacttggctggctggctgcatccagagagaggccctncatgtcccggctgagaccncggggcttgggcactggcctcggggccttggcctncttgcaccaganggcaaacccgcccatgtcccctatccgaaggtatccaggcactgtcttggtctccccactcaccgggacatcaaacacanccgtgtccgtcgctcccaggggcaacaccctcacacacatgcgtctct

SEQ ID NO: 561260 - DNA, 443 bp, Homo sapiens
  misc_feature (85)..(85): n is a, c, g, or t
  misc_feature (166)..(166): n is a, c, g, or t
  misc_feature (377)..(377): n is a, c, g, or t
  misc_feature (415)..(415): n is a, c, g, or t
attcgcggccgcgtcgacgtgaaaattgttttctgaaactctgtttgtcaaataactctctggagagaaagttcagagggtgagngcctgccaaagctgaccagcagcacacaggccaaatcgttctttcgtcattgtcctggtcacttccccacccctgttcgcnacccccaaacaccttttttcttctctctctctctctctgtgtgtgtctctctctctttcttttctttccttttttttctttttataacatatgaatattataagtaagtagctggagaaaataaaaaagcaaaacaaaacacaaagtaagcagatgatttcaacctgcaattatttgtcaggtcataaaaatgatgtgtctcagatttatntacctgatctcctcatctgttttccactggaagccttntgctcgcgtcacccttcttcatttgtcg

SEQ ID NO: 561261 - DNA, 190 bp, Homo sapiens
agtcgccgaacggcgggactcagctgtgccagctcgagcaccgtctcgcgcgggatcagcaggcagaaggtgtcctgcgtggcatggtaggtggcggtgaccgcccgctgccccagcagggcaccgaccggaaagacgtcgcccgcctcgtactggaagccggcagccgccatttccgccaggccggtta

SEQ ID NO: 561262 - DNA, 396 bp, Homo sapiens
tggctattctgggtcttttgtggtaccatatgaattttacatatattttacaaaatttatattaagtatttcactggcttctgagaccagctcggctgtggagaccctaacccagtggcgctagaggaattaaagacacacacacacaaatacagaggtgtgaagtgaggaatcgggtgcccagccttcagagctgagagccctgaacagagatttacccacatatttattaacagcaaaccagtcattagcattgtttctatagatattaaattaaccaaaagtatctcttatgggaaacgaagggataggacgaattaattgaataggttgggctagttaactgcagcaggaacactcccttaagacagatggctcaggcttctgtttgtgtct

SEQ ID NO: 561263 - DNA, 146 bp, Homo sapiens
  misc_feature (3)..(3): n is a, c, g, or t
tgncaggagggggtggctgggaggctcttcctccaagagcaggtgcagcacatatcaacaggcagagaagaccctcaatccaagaggtaggggcaggtcaggtggagtgctgcctccttcccctggtgcccacacaaagctccaag

SEQ ID NO: 561264 - DNA, 698 bp, Homo sapiens
ttttttggtaacccaatggtgtgattatttctggggaaaaaattattaaaaacggaggcctttatcccaataaaagggaaaaataccaagacggcaaataaacccgcgggttcacaggcttattcaaccacttcttatactcaggggccatttgttggttcacggtgttatccgagggctgcggaattacatatggcagactatttgcgcagtgttaaatacatcccgaaatccagttcggcccaatggttgcggccattcctataacatttgctgaaatataatatcactctacgaaatatacgtgttattattctaacaaactctttacagtctcgcacaagtgttctataggatcaaacccccaattttttcctatcaccatattatatgttccagccaagagtgaagtgtgggatcattctgttcttgccataaaatgtcccccatctataatatctttctttccgacaacacatcagtgggctctcgttcctgggcgtgttggggacattatgagcgtgccaaagaataaacctcccgcctaaaaaaaattcttaccctgtggggttttccccccccaagagaagaactctttcgttgaagcaaaaactaccatcttttaaccacgactttccccaggggcgttcttctaccaaagcgcggaagaataatctccctaacaacgttgctccgga

SEQ ID NO: 561265 - DNA, 339 bp, Homo sapiens
ttgtcatgaaatgtcccggtgtatatgcacagggatggaggttgtgcccatatacacgttaaccaaatagctctttctctatctcttatccccttatcgatatgagatttattgagctccacattgtagtatctaagttacaggatatcatggagaagagtcaacatcacccaagtgcactccttctctgggcgaaagggctagtgcgcttttggttttacataggatacttgtatcttgttaggtgcgaagcacaacctcattattatatccacttggagattaggaatggtttacagatatgtatttgggtgccaaattgacaaaaggtggacttgt

SEQ ID NO: 561266 - DNA, 339 bp, Homo sapiens
tccaagagcgagatgctggccccacctacctcatcatccagctcaacaccaactccatcattggcgacgggccgatcgtgcgcaaggagattgagtaccgcatggcgcgcgggccctgggctgaggtgcacgccgtcagcctgcagacctacaagctgtggcacctcgaccccgacacagagtatgagatcagcgtgctgctcacgcgtcccggagacggcggcactggccgccctgggccacccctcatcagccgcaccaaatgcgcagagcccatgagggccccaaaggcctggcttttgctgagatccaggcccgtcagcatctccgctttggaaa

SEQ ID NO: 561267 - DNA, 165 bp, Homo sapiens
gtagagatagagcgcggctctgagtgctgtctgccgtgatttctgttgtccccagagctttgctgcgtgtgaggagacccagcccaggcgcactactcctcgcagtcctgcagccctctgaaaccccctccctgtgccctgcccctcctggtcgctaaaccctcg

SEQ ID NO: 561268 - DNA, 381 bp, Homo sapiens
gctcttcaacccttagtaaacataagagacttcatactggagagaaaccctacaaatgtgaagaatgtggcaaagcttataaatgctcttcaagccttactagacataagagaattcatactggagagaaaccctacaaatgtgaagaatgtggcaaagctttttactgttcctcacaccttactagacataagagaattcatactggagagaaaccctacaaatttgaagaatgtggcaaagcttataactggtcttcaacctttgctaaacatgagaaatcatgctggaaagaaacccgacaaacatgaagaatgtggcaaagccttcaaccagtacttaactcttactaaataagaattcatttggaaaataaaccct

SEQ ID NO: 561269 - DNA, 219 bp, Homo sapiens
aatcgagccggcccagttcacagctcagatcaaagatacagggattaacttaatcttatcagtcttactatgtagagtccttcaacttcaccaaaagtccagagacattgatttaattatgcatttgatttatactacagttcaatgacaacagcttgcattattattgattactgaaaacgttttatgttttcttgcatttttcagctttgtaactgg

SEQ ID NO: 561270 - DNA, 497 bp, Homo sapiens
  misc_feature (50)..(50): n is a, c, g, or t
  misc_feature (428)..(428): n is a, c, g, or t
  misc_feature (433)..(433): n is a, c, g, or t
  misc_feature (439)..(439): n is a, c, g, or t
  misc_feature (441)..(441): n is a, c, g, or t
  misc_feature (447)..(447): n is a, c, g, or t
atggctcgctgcctgttcggtatgaaacctgtcatgactgggaacccctngtcgccttctctggatttgggggtctcgtggtcacctcaggctgggcacgtgcaggtcctgctcctgggttggaccgggctgtgccactgtggcgagctaggatgttgttgcttttcgcacagaacacgtgcctgtgacctagtcctgtcctctgaggacacagaccaagcctccccttcccaagcacctcccgtcaggccccctgtgagctgggcagggcttgcgccagtgggtgccgggcactgcgctgcgtcagtccactgggcaggagcagcagaggagatctatgttttatctgtaagtcacttagggagcaaacagagagctgagcaaagatggattgctatggaaactcttagaagcatcctgccgagggnatccngaaggntnctggangagtggcactaaaagcggcttggaagtatggagcttcgaggtgagtagct

SEQ ID NO: 561271 - DNA, 548 bp, Homo sapiens
  misc_feature (479)..(479): n is a, c, g, or t
  misc_feature (484)..(484): n is a, c, g, or t
  misc_feature (490)..(490): n is a, c, g, or t
  misc_feature (492)..(492): n is a, c, g, or t
  misc_feature (498)..(498): n is a, c, g, or t
gacagctggccccgccagtggcattggctgctgctaatggccgtgggtcaggagtcacggacattggacttgggaggacctcagaggtcagacgggctgtccctcccttctctggatttgggggtctcgtggtcacctcaggctgggcacgtgcaggtcctgctcctgggttggaccgggctgtgccactgtggcgagctaggatgttgttgcttttcgcacagaacacgtgcctgtgacctagtcctgtcctctgaggacacagaccaagcctccccttcccaagcacctcccgtcaggccccctgtgagctgggcagggcttgcgccagtgggtgccgggcactgcgctgcgtcagtccactgggcaggagcagcagaggagatctatgttttatctgtaagtcacttagggagcaaacagagagctgagcaaagatggattgctatggaaactcttagaagcatcctgccgagggnatccngaaggntnctggangagtggcactaaaagcggcttggaagtatggagcttcgaggtgagtagct

SEQ ID NO: 561272 - DNA, 847 bp, Homo sapiens
ccacgcgtccggataaggggaagagcagctcatcttctggccccctctaaagaggccagaggaggagtatagtaggacagaagatagacaagtatgtcatagaggcaggtcgacacacggagacggcaaaggacgatcgtcggcagactaggactacacaagtccgcagaacgccttaggcaccaggaacagcaggtgtacgaggtaagaactggggcccactgagacgagagcactgcgattcagaagagtgcaggacgtgggcttgcgctacagaaatgcacgagggcatcagcatacaaaatgcagcgagacagcttgggactaacgcacattgaaaggagcacgcttgggacctctactacaatgaggcgaacctccacctcagtgcgcctgcccttcccaagacttaaaacccgcacacaaaagtgagtctcacgacaagcacaagccaggaaacaagagatgcaagcacacacgcagcgccgacgggcacaggcgacaagaacgagctcaagacatggtgctgcacaggaccaagatgcgaacctcaccaaccgcgccgcactacacgaggcaaaaacgacgcatgctggttacaccaagagataagacgaagaaaaacgcacgacataggggacaccataacacaccttgcgcactccaactagccaattacgcccaagatcagacagcatcgatacgccccaccgtaacggcagatgcatccggcccgcccacacacggacacagagacataccacaccaacaaacagagatcaacgcgaaccaaccaaacagaggaaccgcaaccgatacaacactggcacacaacaagacgacagtg

SEQ ID NO: 561273 - DNA, 136 bp, Homo sapiens
aagaaacaacttcttcactcctgcactgtgattgccaccaacattctcttggttgatgagatcatgcgagcttgaatttctctctaaaggttgattaagcgtcctctctatctaatcttgacgacttcaaagtgag

SEQ ID NO: 561274 - DNA, 339 bp, Homo sapiens
agctttaaagttcctggcatcatcaaatgatctctggtcacctgctaagaaaagaatgatcggcttgttagagcctatagccagaactcagaaaatattcaaatgcacttatgctctcatactatggccattgcgttgcctctgatactgtctgaattgaataaaaacatcttgatgtgggctggcctagaaactggcgtctgctatggcgtaatctgaaaaggcgtacttcactgctaaatgatcatgacgcttgcttgtgaaacttgatgatacatcttcatttgtcaaataggaatcctaccttctaattcaataaaattcactgcaggatccacc

SEQ ID NO: 561275 - DNA, 353 bp, Homo sapiens
tttgagacagagtttcgttctattgcccaggctggagtgcagtggcgcggtcctggcttactgcaacctctgcctcctgggttcaagagattctcctgccttagcctcccaagtagctgggattacaggcacatgccaccgcgcccggttaatttttgtatttttagtagagacagggtttcaccatgttggccaggctggtctcgaactcctgacctcaggtgatccgcctgcctcggcctcccaaagtgctgggattacaggcttgagccaccgcgcccagcctgaaattcttataaaaccacaaataccccgagacttctttgtcttccataacgtagcccagtcgacgc

SEQ ID NO: 561276 - DNA, 895 bp, Homo sapiens
gtgaaatatctatacaataagaaccacaaaacactaatgaaagaaattgaaaaggtccacaaaccaatagaaagatattccatgctcatggattagaagaattaatattgttaaaatgaccatcctacccaaagtgatctacaggttcattttaatccctactaaaataccaatgacaatcctcacagaaatagaaaaaggaatgctaaaatttgtatggaaccacaaaagaccctgaataaccaaagcaatcctgagcaaaaagaacataactgaaagcatcacactatctgactttaaattattctacaaagttataataatcaaatcagcatggtattggtataaaaacgaacacagagaccaatggaacagaataaagaacccagaaacaaatccatgtgttaaatatttagagtcaactgatttttggcaaaggtgtcaagcacaaacactggggaaataacaccctgtttgataaatgatgctgggaaaactggacattcatatgacaacggaatgaaattagacccctatctctctccatatacaaaaatcaatccaaatggatttaaagacttaaatgtaagaccctggaattataaaaatactagagaaaaacataggggaaaacactccaggaccattggcctaggcaaaaattttattgccctgcgggctctaaaaattacagacaacaaaagcaaaaaatagaacaaataggaccatactagagttaaaaagcttctaacatgataaaggaaggccaatcaagagagcaaacaagctatgaatgagagaagatatccgccagctaaaccatttgggaggtgtcaatttccagaggcctacaagtaacccaaaaagtcagtggcgaagacttaacatccatcag

SEQ ID NO: 561277 - DNA, 520 bp, Homo sapiens
ttgaggatgtggctgtgtgcttcacccagaatgaatgggccagcctgcaccctacgcagagggccctatacagggaggtgatgctggagaattatgcaaatgtgacttccttgtcagcatttccattccccaaaccttttctgatattccagctggagcatggtgaggcagcatggggcccagatccctggacacttgctgggggagaggccctgagaggcatgtgcacaggtggtaaaaccaagactgagaatgaggaaaaaactgcacagctaaacatttctaaagaatcagagtcccacagactgatagtggagggactgctgatggacgttccccagcaccctgacttcaaggacaggttagagaagtcacagctacatgatacagggaataaaacaaagataggggattgcacagatttgacagtccaggatcatgaatcttccaccactgaaagggaggagatagccaggaaattggaagaaagtagtgtcagcacacatctcattacaaagca

SEQ ID NO: 561278 - DNA, 148 bp, Homo sapiens
ctcagctgggcaaggtggggtcagctggacaaggggggagctggacaagggagggctcagtggacaagggtggggcgggggggaatgcgaggaacattttattacacctcctgattttcactccttgagttttattttccccaccttg

SEQ ID NO: 561279 - DNA, 173 bp, Homo sapiens
  misc_feature (1)..(1): n is a, c, g, or t
ntgagggcactagaataccactgaaatagatacaccgcaccctggcatgcggccaggcagggggatagtgtggctgaagccctagtatggctcacatttcctaggctctcagttctgagaagacatacttacctgaaagtccacacagcattacttacccccaggcagctgta

SEQ ID NO: 561280 - DNA, 99 bp, Homo sapiens
catggacacacatgacacattgtgacataaccacactgtcaaatggacatgacacactggagacatcaccacattgacacacctgtctgggtacctgat

SEQ ID NO: 561281 - DNA, 145 bp, Homo sapiens
tggtgaccacacgcttcagcacaagtgatctcacgggcatgcggagcctcccggggaatcacggtgttgccgggatgcagccacccagagcctgtacagcatgacatccccatccttgaggtaagcaaaggccatggccggctaa

SEQ ID NO: 561282 - DNA, 470 bp, Homo sapiens
  misc_feature (67)..(67): n is a, c, g, or t
gatctagaggatctgcctgggtgcatgcatgtgtaggttgttatttaggtagactcatgtcacaggnatttgtgtacagattatttatcacccaggtactaagcctagtactacatgtttatgcttcctgcttctctcccttcttaaaaatttttcgggtaggccccagtgtctgtttttccccccctagagtccatgtgttcttatcatttagttcccacttacaagtgagaatatgcagtatttggttttctgttcctgcattagtttgctaaggataatggcctccaattccatccatggtcctgcaaagaacatggtctcattcttttatatggctacatagtatggcatgatgtatatgtaccaaattttctttattcaatctgccattgatgggcatttagattgattctatgtctttgctatcgtgaatagtgttacgataaacatacacaagcatgtgtctt

SEQ ID NO: 561283 - DNA, 720 bp, Homo sapiens
tccattcaacaagtgttaattgagccatctactacatgccaaacactattctaaaaccctgggaaaggaggggtaagggaacctgtggacctgctcccagctgttactctgtctcccaaaagtgaggctctgcagggaaacagggtctgggggctccctccttgccgtgggacaggaaaggctgagtgttataaaaagggtggaagccctctaaaaatgagaaggctggctgtgtggagactcattgcgtggtgcctctcccagacagaaggagagggcccagaggaggcagctcccgtggagcagagacggcacgcagagaagcgccctgtgcccggctatcactctcccttcttacagcaccgagattatgcagagatctttcttgaagggcgcccgatctggcaatgtggggctgtaccacatctaccccaggaaagaaggcaggcttagagtactgtgggtacaaagagccccgcaaatgtcgactggtaccagggcggctctggaaggggtacaagggggaaaggccggaatgcccaccccggaccggggcccggaaggctattcagccctccgcaaggaggcctcatcttgccgcgctccggtacaggcataacacaggcccaacggccacgtgtcaacgcgtaatacccaaggaaagaccccaaccgtgcgccgaaaacgggtggcgcccaggggaagcctccaagccatgaa

SEQ ID NO: 561284 - DNA, 803 bp, Homo sapiens
cagctgtttcctgtgactttaaccttaccttccccagacaattgagctgaacctgtatctgcgacctctgactatgtgaagatacggtgggaagatgactgaccgcaagacaggaagagagccctcaccgaggaaccaaattggccagtatcttgattttggatttctcaacctcaagaaccatgagaaatgaatgtctgctgttcaagccacccagtcaatgtccatgagagcaagcatctttgtccgtttggctcactgttggattccctgttttaaaaatatcacccggcccagcaaaaagtttggaaaccttcatctagaaagtggtctagcaaagtgtggtccatggatgagtttgatctgcaaactgcttgttattggttcatgacaaggtctaccaattgcattttgagagctcagataagcagagagcaatgcaatttgtcacagaaggatgattatgtatatgcactgtcatgtctatttccatgcctaactcaaaggagacacaaggagaaagtgagctcagcctggataaattggagattgtgatgacttctaggaagcctcaggaacagagaaacaaagacaacactggcctgctgctctctgcaatggtgggacccttgtgggataactgttttaggaatgaaggtgtctaccctctctagaaatgaaaatgcaagttaggctgtggttaagtattggatggaggcaaaaagaaactgacatatttcttctttcaattgtttgattcagcctgaagggcatggctgctttaattatatctccagagcata

SEQ ID NO: 561285 - DNA, 459 bp, Homo sapiens
gacgagtgaggttaatgagatccagctattgtggattactaaaccatctcccacagcttattagctacataaataatagcaagattcttaacttgatagaaccctaatctccttatgcatggagagaggataccacaggcacttctgggagccttgtctcatagattacatagagttggtgaaatttaactgcctagacatcccgtaggaattttatacatgctaggttctttctgctgtctcccaacattattaggaaagtggctatcattaaaaagtaccaataaggctagatagaacaatagacctaatgcaatcatgaactccctctcgtatataagagcactttggatgtgtcataatgtaagattaaacaatgcgtaattttatcctatccagttacctaatgtgaattaaatcattcagatgagtcttcaaatgccgatcaaaaatacttgc

SEQ ID NO: 561286 - DNA, 711 bp, Homo sapiens
ggacacgtgaaggtcggtgcggagtcgtctctgcaagcttggtcgccctgggatgtgattcctcctcctcttcctccgcggcgggtttgggtgcagtggacccgcagttgcagtattttttcgaggtagagactcaaaagcagcgcttccagcagctggtgcaccagatgactgaacttgtgtggggagacagtgcatggacaagcctgggccaaaagtgtggaccagtcgggctgaggcctgtttgtgtgaactgcgttgagcgcttcatgtgatcacaagccagttcatcttgaatcgacttggaacagaccccagaaaatccaagccagtttttctcagaaaggcctttctgactggatctcagcatttacctctttgtggaaaagggacaggtagtctcaagaacatgaacgagctgttgatgggatgatggaagaaaccagttatgagaggatgtggtcccatctttgtgtactcttggggaccatcctgtcactctgagacattgaacaaagaccaatttttgtgtgtgaagcttaagggtcatatgttgtgctggtatttttaatgcaatcttgtgacaaatatttgacagggaaagaaaactctattagatgctattactgtacatggactatgctttttcaaggccattagtgttctatattttgataggtggaccaatagtaaattaaaaaaaatacaacc

SEQ ID NO: 561287 - DNA, 111 bp, Homo sapiens
accttaggcatacctggacctgttccttcggctgggaagtcataggttagggagcacctcacactttcctcagtgagaagacacacgaagcctgaccctcagcctgtggga

SEQ ID NO: 561288 - DNA, 550 bp, Homo sapiens
ttggggctcattcagggtgggtggggtgcttggtaagggcggtcgggctttcacttctgtgttttggagctgatgggccagccagtccaggccttcgtacagcccgtccccgtgggtggcacaggtggcctgaatgtaccagttacggtgacgaagggaatgcaggcccagctggtctgtgatctcagcagggttcatagcattaggcagatccggttggttggcaaagacaaggagtacagcatcccggagctcgtcctccgccagcattctcatcagctcttcccgggcctcatttagtcgctcccgatcatggatgtcgaccacaaatatcaaggcctggggtgtccgggaagtcgtgtctccagaggggtcgaatctggtcctgtggccacccaaatcccacagggtaaagctgatgttcttatactccacggtctccagattgaacccaagtggcagggatgggggggacgatctcccccagtttcagcttgcataggagggtggcctttcctgcgggttccaggcccaccatcaggatgcgcat

SEQ ID NO: 561289 - DNA, 266 bp, Homo sapiens
  misc_feature (78)..(78): n is a, c, g, or t
  misc_feature (266)..(266): n is a, c, g, or t
cagatgcaattgtggcaagtgacctgccaataaagctactgcagctattgaagctggcataggtatatccttagaggngctttctccctgggctagtctttctgttggtattttccccctatattcagagctccttgagaagtgataaacaccttcagctttctaacatccttcccacaccatctcaccatatccatctcccagcatccatctgcattcagctaagggcgggaaactgacctagtgcctgtgttgcagaccatttn

SEQ ID NO: 561290 - DNA, 551 bp, Homo sapiens
cttaccgtttcccccacttttagggaggtgtccacccagcccgttacctaaaaggcgtaaaaagggcgaaacccccaacggcatcctccggggggttgggcgtgtttatttttttttttggcggtcaggtttttcggtttattaagtgggccgtgagtgctcccccaataaagtgagttagatttctcctttgccctccccggggcttgtgtttaactttcggcgtcgcatttttttggaaatggggctgaaccccatttcctccgggaaccgtatttgactattattttccccagctcaacatttatcccccctttaaggaaaagaagcgagaactcccccccggggggggcccctcaagaaaaagtggatccgcgcgggccccaggttaaaggtcctgcatttccctgggtttttgcccttcttttccccttcctcctttttctataaatggggggcagcttcccccctcttttttgtaaaagtccccccccagggggggggatccattttttagccaagccccgacaaaaatcatactttacccaaat

SEQ ID NO: 561291 - DNA, 744 bp, Homo sapiens
cgggaacgcgtgggtcgacccacgcgtctgccagtgcgtcctgggcggccccaaggagggagtggaatggccgcggcggttctgacgcagcagaggcgacgcgagatggtggagcttcagcggcgaggatctacagtgagctggtcgctgtcggataagcacgattggagctactcgtcgtccacctccaagctcgcggtaagggtggctgtgcgacttggggccatttgtgcggattggaaccagctgggagcaaagttgatcccccctgtgttgcggggccatggcacaagctgctctctagagattgctaacttggagggaaccaccaggagaagtctcaaaataccagttttggatgcctatctatggggagaggagtactcagcaggacaattctatgcaagggttcagtgcagcccatccataaaggcactttgcctgtaaagggcacgaattgccagtgttgctatgcctatgggaacccaaatggatgctgggaaaggaccgcaccacaaattgcttgggcatgcccaagagcaacctggggtgatcccccgcgggctctcatggaccctccttgcaagctcacaaggcgagggagggtgcccgagggccgccatgggcccttttctgtcaccatgtcttacctagagatctaccaggagaagggtataagacctcctggagccttgcttccggaagactggtaatccggaaaattgccggggaatatcctgattc

SEQ ID NO: 561292 - DNA, 678 bp, Homo sapiens
  misc_feature (22)..(22): n is a, c, g, or t
  misc_feature (64)..(64): n is a, c, g, or t
  misc_feature (82)..(82): n is a, c, g, or t
  misc_feature (96)..(96): n is a, c, g, or t
  misc_feature (122)..(122): n is a, c, g, or t
  misc_feature (129)..(129): n is a, c, g, or t
  misc_feature (132)..(132): n is a, c, g, or t
  misc_feature (155)..(155): n is a, c, g, or t
  misc_feature (164)..(164): n is a, c, g, or t
  misc_feature (189)..(189): n is a, c, g, or t
  misc_feature (237)..(237): n is a, c, g, or t
  misc_feature (241)..(241): n is a, c, g, or t
  misc_feature (249)..(249): n is a, c, g, or t
  misc_feature (259)..(260): n is a, c, g, or t
  misc_feature (262)..(262): n is a, c, g, or t
  misc_feature (266)..(267): n is a, c, g, or t
  misc_feature (276)..(276): n is a, c, g, or t
  misc_feature (289)..(289): n is a, c, g, or t
  misc_feature (296)..(296): n is a, c, g, or t
  misc_feature (312)..(312): n is a, c, g, or t
  misc_feature (338)..(338): n is a, c, g, or t
  misc_feature (454)..(454): n is a, c, g, or t
  misc_feature (490)..(490): n is a, c, g, or t
  misc_feature (499)..(499): n is a, c, g, or t
  misc_feature (584)..(584): n is a, c, g, or t
  misc_feature (660)..(660): n is a, c, g, or t
tgaagtggggtggcttttaggntggcaagggacttcctgtgacaacgcgtctcatagttgtggnatgactatcaaaaaaacnacaatgtgcaatcnaagtcctcgggcacattgtgaacttnggggggngcncgcgtgccaaccggcgtgctgtnaccttcacngttccagtttttaaatcctgagtcnagccaaaaaaaaaaaaaaaaaccaaaacaaaacaaaaaaaacaaatanggcngggggggngtgcgggcgnngntttnngcgcaagtnaggttttgtcaanaaagggngtaacgcaactaagtnatagtccgcctagaagcatttgcggnggacgatggaggggccggactcgtcatactcctgcttgctgatccacatctgctggaaggtggacagcgaggccaggatggagccgccgatccacacggagtacttgcgctcaggnggagcaatgatcttgatcttcattgtgctgggtgcnagggcagtnatctccttctgcatcctgtcggcaatgccagggtacatggtggtgccgccagaaagcactgtgttggcgtacaggtctttgcggntgtccacgtcacacttcatgatggagttgaaggtagtttcgtggatgccacaggactccatgcccaggaaggaggntggaagagtgcctcaggg

SEQ ID NO: 561293 - DNA, 183 bp, Homo sapiens
gactacaggcatccaccaccataccctgctaattttttttatttttagtagagatggcggttcgccatattggccaggctgttcttgaacgcctaggcctcaggagatctgtgtgccatatgatctatatacattgatttcttcctgacggactctgtcaaggatgaggatttgaagattatg

SEQ ID NO: 561294 - DNA, 315 bp, Homo sapiens
gtacccctgaaactccacttattatatgtgctacggcgggggtgaaatataacatttttaaaatgtattaagctcctactgtgtgctactcttattcactcaggtccgaccccttagtcctttaactacctggggcttccttttcttttctttcttttcttgtagcagtggaggaaaatgaggctggttaagtgaagtgagctctgagaccttgtgtgactttgtttccattgtatccatttgcattaagtgcagtgagctttggcgcaaaccaccctctgccccgtctgttggacccccccattcatcacaata

SEQ ID NO: 561295 - DNA, 154 bp, Homo sapiens
acttacaagtagactttctatttcagacgtttcatgttgtatattgtcggtgtctatacacacacgcctatataccattcctcgtttatggcacactgcgatgtacaaagcagtttcacatgtggagcgttctgggaggtctagagagggctac

SEQ ID NO: 561296 - DNA, 182 bp, Homo sapiens
gtgcacgatccttatccgtctgatagtctgtgagatctagttggtttactggtgttagcactatttccttacttatttatcctgtctgggttgtatctatcgcattatatgacgagggggtactggaagtctaccaggtattactgtatagaaatgtctacttctcccttcagttctgtcag

SEQ ID NO: 561297 - DNA, 89 bp, Homo sapiens
gggtcgacacggccgtgtattactgtactagaggtctccctctgggtggtgggtactggggccagggaaccctggtcaccgtctcctca

SEQ ID NO: 561298 - DNA, 369 bp, Homo sapiens
  misc_feature (369)..(369): n is a, c, g, or t
agctggccctacaggtgcgtgctaccacgcctggccaattttttaaattttagcacagatgaggtctcactatgttgcccggtctggtctcgaactcctgagctcaagggatcctcccgcctcagcctcacaaagtgctggtgtcacaggcataagccaccacgcctggcctgtgttgctattatatgcggcaggaacccagagtccagaacatttcatctatgatggggtagataatgtgtctagacgtatgcatgccaatttcagtagcctcagatattcaacctaggagatttttctacctctctactaccctgctgaagttgctcttcagcagaatatctatgaggtacacattccacactccgn

SEQ ID NO: 561299 - DNA, 825 bp, Homo sapiens
aattgcttaaacctgggaggtggaggctgcagtgagccaagatcgtgccactgcactccagcctgagtgacagagcaagactccgtcaaaaaaaaaaaaaaaaaaaaaaattgatttctggcccccccttaacattggagccccattcccttttcccatccggcccgaaattagggaggatggactgtgtcagggaatggcggggtggccttcttctcgcttgccagggccctttgtcagagcagccaggcttggacagacgggcctcccttccctcctccaatccttgaccgggcaccttgcctgcttcggggctttaggccaccgttcccttgtccccaagaggagatagccccagatggcacttggattgttgtggcttgagagcgcttgtgtgcgatggccccgctgtggtggttccccttcttcttgttcccttccattcgtgtattgttgtttctggtgttccctttgcattgttgttgcgttgttatagagttgagcgcgttattgcattcaactcattggggctctgggcttgcttcacagggcaaatttgtgactttggaaagacttttcattctccttggaaccaagaatttccgtgagttcccccttcacccttgggcccgtgtcccaccagggtatatctgcggctataggggaatggaaaccttggggggaagtgacctttttaacacgacgacacttattaagtttcctactacttgcactactgtccatttgtgcgattgcattaaccctgtgctatttacctggttgaacaacaacaagaaacacaacactttctatcacaacacaaaa

SEQ ID NO: 561300 - DNA, 867 bp, Homo sapiens
taccacaatgcagtgcggctgagcgcctcggagcccgtggggacgctgcggggggacccgtgctgaggcagtgcgtgctggcgacgtggagctgcgtgcgggcccgcggctgtcgggcggtgcggatgtcagggctgggcggacgaccgcggaaggcagagggcgacgcggcgcatctacgtggggaaccttccgaccgacggtgcgcgagcaaggactctggaggacctgttctacaagtacggcctgcatccgacgagatcgagctcaagaaccgggacacggagctcgtgccattccgacattcgtgcgcttacgaggaccccccgagatgccacgagtgatgctaatttatggcaacggacaacattggttatgattattgtgccaagtgtcagagctctcagatgatgagagtttccccaagggaactttagtgagagagtcagagagagtagagagttgagcacccgaggatagagtagagaacggagaaattggaggcactcacatacgaagacacgacatcttgactttcacacgacagtacattgataacacaaggaccttagcatacccggacaaggggccatgattgtggcaggtgacccatgaaaggcgaattcaacattgatcgagaacaggttggagggaatggtcttggtcattggctcgatttgtgtgacgacaaggcataggaaaatagagggaataggtccagaagtatctccaagaaacaaagaaagagccattgggaattattcgaccgctgtgtgtcaaagatgggatgacagacaaaatttcgcggtactcaatgaagaggtgaaaagttacataaaataccagaagttaattcctgaggcagaa

SEQ ID NO: 561301 - DNA, 400 bp, Homo sapiens
atggagtgatccgaggattcggtcgctcggacacagcagtagtgttcatgaatcttatgtgagggcaaagagacccctgcgaaacggggacaatttgacctcctcttttcctaagttgaatacactgtatttctttatcctgcctgatagccctggccagaacttccaaccctatgttgaataggagtgatgagagagggcatccctgtttgtgcccattttcaaagggaatccttccagtttttgcccattcagtatgatattggctgtgcgtttgtaacgaatagctcttattatttttagatatgtcgcatcaatacctaattcattgagagctttttagcgtgaagggctgttgaattttgtcgaaggccttttctgcggtgtattcagataatca

SEQ ID NO: 561302 - DNA, 177 bp, Homo sapiens
ctcttaggtgagctgttgctgtgtcgtgcacagtctccaggtgtcgtctgagaattcgaggacgtggtgctgtgggtgctgcgagtccccggggacgtgcaaggcgctgcaggtaagtggccgcctacaattatgtccagtgacagttgtccacgggacagggattgccttctattc

SEQ ID NO: 561303 - DNA, 439 bp, Homo sapiens
  misc_feature (5)..(5): n is a, c, g, or t
  misc_feature (12)..(12): n is a, c, g, or t
  misc_feature (63)..(63): n is a, c, g, or t
  misc_feature (434)..(435): n is a, c, g, or t
gttgnaacgggnataaacaatttccacaacggggaaaaacagcctatgaacatgaattaccgnaatttaaatacggacctcacctaataggggaaatttgggccctcgaggccccaagaaattcgggcacgaagctgcctcactgcaacctcagcctcctgagtagctaggattacaggcgtgtgcaccatgcctggctaatttttgtatttttagtagagatggggtttcaccatgttggtctggctgctctcgaactcctgaccttgtgatccgcccaccttggcctcccagagtgctgggattacagacatgagccactgcactcagccacttaaggcttttaaaaaatcaattaatttctaaatggttttggacttttgactccttataagtgttaagatattttggtatcacttttttccttccaaaannaaaa

SEQ ID NO: 561304 - DNA, 212 bp, Homo sapiens
aaataaacaggcatgtttatgaaagaaccttttgaaaaatgaagtattaaaacccgttgtaataacaagatatacttttgaaagtggttttggcccccaaatagcaatgatcagtgatacagaataaagaatattaatacagtttggggattgttttgtgtttccagctgcctaattttgaaaaaatataaatatatatcttttccccctta

SEQ ID NO: 561305 - DNA, 470 bp, Homo sapiens
aggcgagtcttgacatccccacgtcgactatacttatttcccacagcctgttctaggcttaacctgcggggggaaaatcagatacagcttggcgaacgatcttcataaatacaattatgatacgttgaattgagtacctgattactagattgtcagagcatccttaaaagggagtcctgaacacaatctttcctcaagagaatacctaaagatcataaatacgtgcctcactgactgaaggaatagactatatcaccctgtgtgccaagacctgttgatgaatgatcgggtcacccctgcggttgttagctgcgaatccaacaattcacaagtgtatttaaagcggactatgaaagttaccgtggatgcatcctataggctattccataacagatgccgaacttaggaccccttttccattgcctttcaatacttaaccatatatagattttatgcatccacccactttc

SEQ ID NO: 561306 - DNA, 394 bp, Homo sapiens
  misc_feature (389)..(390): n is a, c, g, or t
tctctctgtaccccagctggagtacagtggcacagtatcacagctagctgcggcatcaaattccagggctcatgccatccttccaccggacatgtagccgtgcacctcctgagtagctgggactgcagatgagctctgccacaccgggctacttatcgtattgccttagtagagacagggttttgccatgttggacagtctggtctggaacacctgacctccggtgatccgcccaccttggcctcccagagtgctgggattacagacatgagccactgcactcagccacttaaggcttttaaaaaatcaattaatttctaaatggttttggacttttgactccttataagtgttaagatattttggtatcacttttttccttccaaaannaaaa

SEQ ID NO: 561307 - DNA, 201 bp, Homo sapiens
agcaggggtggcgtggtgttcctgttgtggctcagtgtgtaatgaatcagactaggatccatgagggtgcaggttcaatccctggcccctctcattgggttaaggattgggcgttgatgtgagctgtggtgtaggtcacagatatggcttggatctggtgttgttggggctgtgatgtctgctgtgagctgtagctccact

SEQ ID NO: 561308 - DNA, 341 bp, Homo sapiens
cccgactagccgacaggagaagaaaactagagatcaggaaattagatgaatgaaataaggatgccaaaaaagaaagtgataaaattaaaagaaataatgtgtctggcagagagtggctagtgagatcacagctactgctctcacaagagggcgagttcacgtctcctacctgttcactcacctctggcacccatttaactttaagttgtatggtggccgggcgcggtggctcatgccctaactccagcactttgggaggccaaggccggtggatcacccgagtccaggagttccagaccagcctggccattatggtggagccctgtcgggctagtcggggg

SEQ ID NO: 561309 - DNA, 427 bp, Homo sapiens
ggcaaacattgtcttatgaaaacaaaatgaaacaaaattaaagtaacattgaagatcaaaatagtctggaagcacaggatatctgacaagaatcttcaagaaaagcaatgtttgaaaagtgaaagatgatctttggaggacaatagctaaatatccagagtattttatcttcaatctcatttaatttgtcatcatttgtggtgcataagacaatgtttcagatatgtaatggggcaaacactatagataatctgtggatagaaaacgtgacaatgttactaataagtttaaattgacccttcgttgatatcagtactgttgatacatttattagaatgtatgtctcagaagatggttactgtaacaaatttatggtcaagttacaaacaacgtgaattctacatcatggctcaccacaacctccaca

SEQ ID NO: 561310 - DNA, 112 bp, Homo sapiens
cagcaacggccacatcagcacaagacaactctccgcatacatgattcacgtggtggtcccacaagagtcactgtccccacgatctccttctccagtgtcagtctataaggtg

SEQ ID NO: 561311 - DNA, 689 bp, Homo sapiens
  misc_feature (243)..(243): n is a, c, g, or t
cgtggaagccagcaatacgagtttccccaggtcggaaccacccaccgggtgtttgattccaaaacatgagtgcttgcctgtgaccccgcccccggcggatactcaccgtggcgtgctgtcttccgtggtcggatgtccatgaaggagggtccatgacccgatgcttaacgtcagaacaagaacagcagctactttgttggatggatccccaacaatgtccagcaagccgtctgtgtcattccnccctcgtggcctcaagatggcagtcaccttcattggcaatagcacaaccatcccggagcttttccagcgcatcttggagcagttcccttccatgttcccccggaaggccttcctcccctggtacacaggcgagggcatggaccagatggagttcccccaggcttagagccacattaacgaccttgtcttttagtatcaaccgttcccggattccccccccaaaaaggaggaggatttcggttaggaggcccaaaaggaggccttaggcagagcccccctcccctcagggttttcagtttccttaaccgtttttctccactgcccccttcctctccccccgaatttgtgttttccgcccctatcttgttttttgtttttttttttggggggggtttaaaaccgtgcctggcccatagttggcgccccattaattcttgtttgtttta

SEQ ID NO: 561312 - DNA, 1388 bp, Homo sapiens
tcttgctcattctccgcgtatttggtcctcccttctctgcctgtctcttcctctttctggtcggtcgttgttcttgtctcctcctctggcctcttttcttcctctgccccttactccaccccctcctcttctcctccactctctcccctctctcctctttctctctcttgcttctttcttgttccccttctccgtctctttttcacggtcgctcctctctctatttacatattctctcagccacatactcgttctactctctcccttcgtttctctctgttcttctgtcatctctacccgtctctctacgccgtgcccttacatacaggctgctcgttgctgttcctccgctgccttgcttccgtgctgcctcgtcgccccattcgctgttgtccgcctgcctcgctcttctctggctcccgcctacgccctccgtttctcacggctgtctccgcacttttcttttgccaaaccgccactatgggggggccttttgcctcgtgttgcctcgacttggcaagttcccgcccactgcctctctccgttcatgtgccatttccgcctaccacacgggcgtttttgcctgggtccccattcctttgcctccccgttccctccgacggcccaccctgtgggccagcccacctcggtccctcctgccctttcttgctgggccacgagtcgacgcattgctgggattcgtgcgctcttttccgggcaccacgcatccctcgttctcttcctgtgcctcgtccttccctctatggccgcaatccatgccctaggggcttcccgccctgcccatgggacgtagagtcccgagatcctggccactatgccagttctgacttcgcatccccactatccctcgagcccatgcacgtctgggaacatgccgccttctctccagcctctgtgcctgttgttcctacggtggtctctaccactcctgtcctggctgggtctaggtggtcctgtccaggctcgatgcagcgcccccctcactttgacactggactaggatgcagcctcccttgcctgtgtccccttgagggtaccctgggtccgcctcatcaaggggcagaggcatgaaagagtcggggctggatggtccaggggcttctgggccacgacgcatatagtgcagccccatggggtctgtggtttgacatttgtctgcctaggtgcgaaatcaaggaatcattgccgtgttaaggtcgacaggccctccacaggcttccagacattgaaggaaaaggtttaagtaaagataactagaacctaacagttagtggagtcaaagcccagacactgtaaatagaaccccctccaccacccccgccgcccagcatcctactggactgagatgctacgagtgcctgcgggcc

SEQ ID NO: 561313 - DNA, 137 bp, Homo sapiens
tggacaccccaacaagaggcgttgcacaaggtccaccacctactcaggaaagcacaaggacacccaacaggaggcatccccctcctcctcaaggaaggcacaaggagcagcccaaacagggaggcatccccgtcctc

SEQ ID NO: 561314 - DNA, 152 bp, Homo sapiens
tttttttacttgaaaaacttttgttcaagaatttgggtgggggaaaagaaaattggttttcaagggtggtttgaaattttttgccgcctttaagctggcggttttttgggattggtttttattaaggaattttttaccttccctttccggga

SEQ ID NO: 561315 - DNA, 502 bp, Homo sapiens
ggtgatgatgtggtataggtctcctgtattagggcgtggcccacctgcgtgtggccgtgtctgcatgttaggaaaaaggtcttttgattttggctagaagctgatttagatgtagtgaggttatgttttattgaattggagaaagagaaaggtccagtatcatgggcccaccaagaatgtttccagaagccacagagatttgtagctgggatatggggagaagcctctgactcatgggtttgtatcgtctggtcccatactggctgtgtgattccggggtcgagctgggtagaacctagcacctgcatccacacgctgagtgccaccatccagacacttagctgcttgtggggactgaacgttgagatcttcgtgagtctgtagtctccacaggccaagctcctgcttgcaggtgcatccttgggggaacttcacgggttactctttcctcctccggctctaggcattgaagttgatatcgatgtggagcacggagggaaaa

SEQ ID NO: 561316 - DNA, 248 bp, Homo sapiens
  misc_feature (244)..(244): n is a, c, g, or t
tatggtcagatatttcccctgccccaagggctggtaacgtatatcagtgcaggcgaccgacggatgccctctggttgggctctcgtgatagaccaggttcccccgaccctggtcacccgcctggacgggccgccccccctccctcacacgcagccccggcgcgcgcggagaggggcgcgatgcccccgccggcgcagccgggtaccgggtgtccaggtgcggaagtgcccttcgttcctggganaacg

SEQ ID NO: 561317 - DNA, 944 bp, Homo sapiens
taaaaaaaataacctgaaaacacttctgactttctccactgtctcttaatatgttgctgataggcaaagtggtgcattgcacaccaaacactaagcatgtgtttgtggtaagggacaccaggaagtattcttcaaagccctaagaaccagtgtcttatagctttcttgtgactcataaacactttggtgtgggtgttctttccacccatttattccaggccgtgaagaggaggcgcagaggagtggcgtggcgtgactaacacaggtgcagcggcaaaacaaatcgaggcattagagacgttatttcccctttaccactgtgttcattcacagtggaaagtgcttcttacaaggcgccttcttcaagcccccacttacaatcgtggattatagaccaagtttcttcagaccgtgcgggcaaacacaggatacataacttataacctgattgtcgaggcttatacgcaactctataatcggtgcacatgcatctgaatctaccctttatctcctataaatattatttccgctaccacttaaacaaatgtgaacaacaagggtaaccacaagataccacttatcttacagcaatacaacgcgcacacgttagacacccacatgatagaggagctccaatatctcatattatccgtttcacagaattagtgcgcattactcataaatgaaagactcacaaacaacaccccatatggggagaataactggctcataacaagagccgatacataactcacttcaaattaaaatcttacacgtgaaataataacagggcactacaaatcccgtagctcatggacaccattatggacaggccatccccccattatccccataagcccaaacatcagcacgccacaatgagacaaccaaccctaaacatgcccagggatcaacacccattgaaaagcaccccactatttgac

SEQ ID NO: 561318 - DNA, 119 bp, Homo sapiens
cacgaggccggacggccctgaggatcgacagtcggcaaagtttggcacgaccacgaagtgggcacgtgctccggaaggtgtggaccagggcagactacaggagcacgatggctgtcgac

SEQ ID NO: 561319 - DNA, 237 bp, Homo sapiens
tctgtgttacagcagctaacctccctagttctaatcccagccattctttgctgccagatgctgatgggtcaaggcgtgaaacagggggcttgtcctcatccatgtctccagccttcacctccatcaggtcagctcccaagtgtctgagtgccttccaggtggttaagacaccactaggccgggcgcggtggctcatgcctgtaatcccagcactttgggacggcgagacgggcagat

SEQ ID NO: 561320 - DNA, 103 bp, Homo sapiens
atcacttatttccttctgctcgggccctggcgtgctgaccatggtgcgcccattggcaggtgtccaaagtgatcctccatcttaaagaagctcagacagagta

SEQ ID NO: 561321 - DNA, 498 bp, Homo sapiens
aaaagaatgaatcaactttaagcaggcatggagtttacagatacaaaggctacctaggacatgtatgaagatgagacagtcttcataactctgactatgattacagcttcttcaaggaacaggtgaaatcagaggtaggtatcattaaagcacaaagagtgtacagttattggcagaggcatcctatgatgtaacatcaacattacataaaaaagaaggtggattccatgcactaattccatagtgaggtatcaaaggtgcaggttactatataaagacatatactatctaaaacttgaagactcaaagaacatctactaaaaacatacgccactgtaccttgacacagagctgcataacaccataatagacattcagacatctataaatctgtgctctattacactcagacatagttcctctgccaaatgaatgactaaccagaagctaataaagaacaattgccacaactgacgcttatgacgaaagcctacaccg

SEQ ID NO: 561322 - DNA, 274 bp, Homo sapiens
gtgcgcggtcttctagaggtccccattcgacgggtactggtaatgacaggtagggggctcataagcacggctggataagggcaatataatgagatgagtctcccatatgggcctgcttactctcttaaagctgggctgggactcaatccataaggagattttttgaaacttaaaaatctgatgtgatcagcacacagtaactcgtgcagtaaatttcctaatggagaagcatgtatggctcagggcaatctcgaagggtaacagtcatccccgg

SEQ ID NO: 561323 - DNA, 153 bp, Homo sapiens
accattggaagcagcatagaatgggctgtcaactgtgtaaacactggtgaaacagtgtcaaaaaagtaaatgcttttcaaaatgttttgaaaaccctcaaaaaaaaacagcacttccttaaaaagaaaagtctaccaatgttgctgtgtgagt

SEQ ID NO: 561324 - DNA, 248 bp, Homo sapiens
  misc_feature (38)..(38): n is a, c, g, or t
  misc_feature (52)..(52): n is a, c, g, or t
  misc_feature (201)..(201): n is a, c, g, or t
gcagtggccattaaaatatagaaaaccttggaaatggntccctctaaaattnttactttaataaaaaacattttttggccgggcacggtggctcatgcctgtaataccaacactttggcaggccgagactgacagaactcctgaggtcaggagttcgagaccagcctggccaacatgacgaaaccccatctcaactaaaantacaaaatttagtagggcgtgatggtgcgtgcctgcagtcccagcta

SEQ ID NO: 561325 - DNA, 154 bp, Homo sapiens
  misc_feature (61)..(61): n is a, c, g, or t
  misc_feature (66)..(66): n is a, c, g, or t
  misc_feature (99)..(99): n is a, c, g, or t
agggtcttaactgcagttctgtttccggaacgcggtattttctttctagggattataggcntcccnggccgccccctgaggagctccgctagcagctanagagggcagccacgaagagcgcctgagcactctcgcagagactgtggggctcgcc

SEQ ID NO: 561326 - DNA, 816 bp, Homo sapiens
gcatatgatatgaccctggcagagagttatgcccagtatgtgcactaactctgcaactctctctccattaaagtcgaggaaagttgatgctatgccaatcaaaatcatagaagtgttgcagttgcagcgatcaatggaggaacaatgctcctggactcagtgcttaccgacctcattggagcgagtgagtttcaccaatcatgccaggtttgagtgcttatcggtccgctaggaaattctcattgggaagatagagtccaaagcaagtcgttcctgtagaggagatcaggactgtcagatcgagatggagcagcacgtgacacgaaggacttcagaggagacagagtctcaacaagctcgtatcacgaactggcataggaactgttggccaacgcttgaagatagctacctgttacggagccctttcaatgcgcagactaacgttggttcagtacttgaggtgccttagaaggatgagagaggcgtgtacttggggtaggttagacggtttcatcagggagacccaatcgcttaggattttccataaggtatcccaattaccctataggcagtaagtggtcctcgctcctctgtaggcttcggcttgttactttgacccaatttccttacccactttatccttatgaaggttaaatgctagtctaatcttccattctaaataagaacattctgctgcaccaatgttgttatagacccaactgactgaaaccggccagagcccggttctacatattgttcctcgaggggactgaaagttttccggtaaccacgtaattgtgacgaaatggaccccta

SEQ ID NO: 561327 - DNA, 108 bp, Homo sapiens
atatgctgatacctgcttattcagtttcccatctgtcttcttgccagtcatcgtagcctttcttttttaaacacatgatccctagtactcatctttgcatcataggca

SEQ ID NO: 561328 - DNA, 602 bp, Homo sapiens
  misc_feature (118)..(118): n is a, c, g, or t
  misc_feature (139)..(139): n is a, c, g, or t
  misc_feature (254)..(254): n is a, c, g, or t
agacagactcactctgtcacccaggatagagtgcagtggcatgatctcaattcaccgcagcccctgcctcctgggttcaagcaattcccccgcctcagcctcccgagtagctgggatnacagacgtccaccaccatgcncagctaatttttgtatttttagtagagacaggattcactacctgttgaccaggctggtctcgaactcctgacctcaggtgatccacccacctcagcctcccaaactgctgggatnacaggcgtgacccaccgcatccggcctagactgttgttgaagctggttttcttcttctttcctcagttcttttcttttacatcttccccccatcattgctctgcccatccgaaggctgtggctggcacaggacagaacagaacctcctagcctcaagttccaaacccacactctccaatagccaggctctcagatgggaaggtgaggcatgagaactgttttgtcccaggaggtagaggatgcaatgagccaagatcgcaacactgctctccagcctgggagacagagcaagactcttactcgtgggggaaaaaaaattttaaaatttagcctggcaaggcagcgcac

SEQ ID NO: 561329 - DNA, 612 bp, Homo sapiens
  misc_feature (118)..(118): n is a, c, g, or t
  misc_feature (139)..(139): n is a, c, g, or t
  misc_feature (254)..(254): n is a, c, g, or t
agacagactcactctgtcacccaggatagagtgcagtggcatgatctcaattcaccgcagcccctgcctcctgggttcaagcaattcccccgcctcagcctcccgagtagctgggatnacagacgtccaccaccatgcncagctaatttttgtatttttagtagagacaggattcactacctgttgaccaggctggtctcgaactcctgacctcaggtgatccacccacctcagcctcccaaactgctgggatnacaggcgtgacccaccgcatccggcctagactgttgttgaagctggttttcttcttctttcctcagttcttttcttttacatcttccccccatcattgctctgcccatccgaaggctgtggctggcacaggacagaacagaacctcctagcctcaagttccaaacccacactctccaatagccaggctctcagatgggaagcttcaaagccttgtgacagcctggctgaacctctccagcctgggccctccctccatttcctgccccggaaacaggcatctcctctggccacctcccaaagcctgtctggaagcctcaggcacccgctcctggaagcctgtacgattcacaaacagag

SEQ ID NO: 561330 - DNA, 372 bp, Homo sapiens
  misc_feature (299)..(299): n is a, c, g, or t
  misc_feature (343)..(343): n is a, c, g, or t
  misc_feature (353)..(353): n is a, c, g, or t
aaatacatttatgtttcttgaaatgtgttaagtggcctttgtcaaggtgtttataatagaagagtatataaaaatgaatttctctagagatgcagcatactctaaagatccatcattagataattaaaaatatgtaagtcatgctaacatttccatatataaatggagaacattaactctcctactgtttagttataaaataccaaattttgtaattatcctatcttgaattacactatactgcaaaaatgccagttactcacttttaaatttgacaatgtatgtgatgaattataaantttaatagcctacatcttttcctccttgtatccaaatttctccngaccttaatncttaaaccttttggttacc

SEQ ID NO: 561331 - DNA, 185 bp, Homo sapiens
ggggggttttttgggggggggcccccccctttttttggggttctcctggggggggccccggggggggggggggggccccccccccgggggggggggttttttttttggggggggtttttttttgggggggccccccttttttttgggggggtttttcctataatgggggcccttttttcccccca

SEQ ID NO: 561332 - DNA, 856 bp, Homo sapiens
tatgtgtacgtatataggtcacttgggggagaatagacatctttaccatatgagtattccagtccatgaacacagtatgtctatttatgtagctcttgtgatttttgaacaacatttgtaatttccagcatacagatcttttatacatgtttaatgggggtatacctaaagatttggtcttattagaactatggtaaattttttttaacttggatttggaatggcttacagaatctccacccaaatcaaagaatatacattttttccagcaccaaacaacctattccaaaatggaccacatagttggaagtaaagctgtcctcggcaaatgtaaaagaacagaaattataacaaagtgtctctcagaccacagtgcaatcaaatagaatcaggattaagaaatcactcaaaaatgtcacctaatggaaaatgaaaaactgctcctgaatgatactgggtacataagaaatgaaggcagaaataaagatgtcctttgaaaccaaggagaacaagaacaaataacagaatctctgggagcattccaagcagtgtgtagaggggaattatagcactaaatgccacaagagaaaggcaggcaaagatccaaatggcacctaacattcacattacaagactagaaaagcagagcaacacaattcaaagtagcgaggagaatactagtccgagcgcactgagaaattgagacaaaaccttcaaaatatgaccggggcggtttgaagaccaacatggtgacggcgacataaggcaggacacctcggaaaagtgggtccacggcaacaaatgggaaaacctgtaaaataaagttgcacccaagagttcaaggaacacaagcaga

SEQ ID NO: 561333 - DNA, 603 bp, Homo sapiens
  misc_feature (237)..(237): n is a, c, g, or t
gcccccacctctccgcggcctctgctcagcgtccccacctggccaaaattctccccgccctttccgaggactgagccggtgcactcgaggtcccctgagattgctggtcttcccggagaagtaatgctgtgaaaagggaatgtgttattaactaacaacctcttctccgcacgaccagaggttctctatagcgttcactggatacacgaacctatgctgcccttcaccccaagagancccgagaggagccctgtgtgtcctctgagcgcgccactcgtagatgtagaagagaaatcttgtgagcaccccaagcacgctgagatggtcacgctatgagtttctcacgaaattcccttaatctgaattggtggcctaaactatatggcttgccacatgaactccttccttcaggctgtcccctcccacgaaagcggagacctgaggagccccctggccctggccctcacaaacccacccccctttccttccaacctttctgtcatcatttccaccagcccccccctcccctgagcaccctaaccccctcatgccggccccccctgcccatagtaataaagccaagtccccttttttaaaaccaca

SEQ ID NO: 561334 - DNA, 710 bp, Homo sapiens
ggccagcacgccacagatgatcaatgagtgtttgctgacccgcatatgacaacacggattaaggaagacaaatctggtagcagcaggcaagaaagctgaaaagcaagacacaggatgcaggtctggagtgatcagggcctgaaccaggaagggataacattgagagagacatggaaaatgcgcttgaagtatatatatttttattgtaaagaatcatacacagataaggtagtattatatagagaatgattagttgaggatatttccagagtctttaagccagagaaatgtactaatttagacatttctggactcattgctcagtactgatgtcatgtttttaaggacactgacacacttggctaatcccagagacatgaagaggatggtgactagggtggtcacataattaaaggggctggggatatttaacctagaaagagaaacattttttgtgcacataatgactgtacacaaattctaacaaactttcatgtgaaagaggactggattagatgactttcttctgtgtagctttggagggaaaaactcaaacaatggggggaaagaacaggaagctggatttaggtttcctatgttatggaagtcatcacagtgggggatgataattgtaacaggaagatggagggtagtgaaagaaagttcaggatgaagtatgtgtatattggtcattaaaaatatcacattcc

SEQ ID NO: 561335 - DNA, 309 bp, Homo sapiens
gtccccattttttttaaattccctggtttccggttgcccaattccacccttttaaagcggttcttgggaccaaattccatccaaaagggcggttggggcgaagggaaccccccccttcctgggttcttggttttcccgggtggttggttggggaaaaacctggccccggttccccccccggtttggggcttgggacccccgccggctatttttggtttttaaatttgggtttggccggttatttgagcctttaaaggcctttttgaatgggttaattttaggtgggttattccctttttgcccttttga

SEQ ID NO: 561336 - DNA, 220 bp, Homo sapiens
  misc_feature (2)..(2): n is a, c, g, or t
  misc_feature (49)..(49): n is a, c, g, or t
  misc_feature (51)..(51): n is a, c, g, or t
  misc_feature (92)..(92): n is a, c, g, or t
  misc_feature (114)..(115): n is a, c, g, or t
  misc_feature (219)..(219): n is a, c, g, or t
tncaccaccagcatgttcattaccacttaaatatattgctacagcagtngnacaacagagccaaatgagactgtcaaagacaagacaacacntgtgctatttcctagagtctgnnaacagctcagacatacccacacacatggtaacctgtgagaccacaaactgtttccaagccaactcctaatagcctatcagagccttcattaatttatgttttana

SEQ ID NO: 561337 - DNA, 285 bp, Homo sapiens
cactcctatcatactggtacatagaaactccagcagatttagtatagggcatccatcatctaagtcaaacctctcacatgtacttcaaatcaatcagatatggggatactcaacatatttctagtgtcaataaaaggtgtggaattagtagatccgatgaagacctgtttttccatgccacatgggacttccagacgccattgggatggggtaaagaagatggggaaatatagaagacgtatcctgggcctgtgtctcttaagcagtagagatgccgaagagtag

SEQ ID NO: 561338 - DNA, 987 bp, Homo sapiens
  misc_feature (208)..(208): n is a, c, g, or t
  misc_feature (210)..(210): n is a, c, g, or t
agcggctgaggaacagggcggcgacgcgtggtggggactgacgtcggagcccggtgactggatgttggtgttggtattgggagatctgtctcagtcccaggaccggtggcgagaacagtttgccagactgagaaattcaacaaaaacgtcctggtctgcgcagagacaaagtatcagcatcattgtctctgctaccaggaatagcttngncacccaaaggagtagttagtgactactctcaagcatctctgggctggtagatgttcgatagtcgtgaggaggagcacgtgtcgaatgacgtaagtctagacatgtgatccacgatacgaagagagaagtggtgactagtccggacagcttcgaaaagtggggtcctgactccgagtggatcgaatcaggcttagttccagttggggatgataatggctcatgcctctacgcccattgtagcacgtaggctggatttagagttggtggactagttctttttattcttcggggactaccacagcaatcaaaatttgagagcgattctgacgcagtgacaaataagattcgtagcacttaactccacggtccctgccaactgcgcggcactactaatggccgttgggaaaacagcagcgatccacttccactcattgtgtgtacgatggatactccaggcttctaccagtaggtcacctatgatgtatacctggcttaactacggacgatggactgtggacaatgtaagaacgaaatcgaagatacaataaaagactggtaaagccagggcctggtctccgatgatcttcccgggtataacgcgcccactcggtcctggttggaacagtctagagtaagtttaaacattcctaagagcgctcaaaaagtcgtactcagcttttacgtgactcatgtgtgcacgtaacacctagtaataccccatcttcctccggtgtaatacactagtaggctccccagctttcctgttcaaccatagag

SEQ ID NO: 561339 - DNA, 102 bp, Homo sapiens
ccggtaaaaagtttcagattttggagtgtttcaaatttgggattttcagattaaagtcgctcagcctggttgaggcgtctttaatctgaaaatcccaaattt

SEQ ID NO: 561340 - DNA, 321 bp, Homo sapiens
ttataatcagcgagaatggaacaactttttcttgaagtttgaaaactctttgctctaatccttactaatagcagaaatcctaatttcctcatcctgggggcccgggaactggagactcctgggcatatcctcttaaatccttggtgggtttcctacgtcaaccaattaggggcctcttactcagtcaccgatccttgcagcagataaatcaccctcaagaaggctctacaattaatttcaggaatagggagatttaccttaaagttattggcatcaagggcatttcaaggtagtctagttttccaaaacccgaacccgatg

SEQ ID NO: 561341 - DNA, 387 bp, Homo sapiens
ttcacgtgaactttgctctcacggtttccctgtgctcgaaatgggactattgctcaaacttgatcacgactcagctagccgggcgcagtggctcatgcaatcccagcactttgggaggccgaggcgggcagatcacctgaggtcaggagtttgaggcaggcggatcacctgaggtcaggtgtttgagaccagcctgaccagtatgatgaaaccctatctccactaaaaatacaaaaattagctgagaatggtggcatgcgcctgtaatcccagctactcgggaggttgaggcaggagaatcgcttgaacctgggaggcggagattgcggtaagccgagatccggccattgcactccatcctgggcgacaagagtgaaactccatctc

SEQ ID NO: 561342 - DNA, 1254 bp, Homo sapiens
gagcgggacacgcggaggaggtaaggaagtgggtaggccctctccgtggatctctgtcccccagtcaccttcctgcgacccttcctggtgagtgggcgtcctggtgcggtggggtgaatgtgtggtgagtgggctgggctgtgttacctcatctgcctgcctccgtgtgagtgcccctgcatcgctcgctgccggcggcttgggtgctgtgctgactccatgtgctgctggaatgctgagacgaagggatagatggcacagagtgctcctgtggaggcagcgctgcccccccgtgcccctgaccgctgctgggacccgcgccgcgagagcgggcggcacttcggcgcctcgcgcgtccgccggacgcctgggtcggcgcctgcggggctggaaggcgggctgtctgaagcgccgttccgtgctctgcttctctctcggagcttcggcaccctgccccgagcctggtcgcgcgcccgccaccgtgtcttgccccactcgggctgtctggtctgcccatcccggccggcccagctccttgccctcggggccttgcccttctccgggtctcgggtgctccggagcgggcgaccgagaaatgcggcgactgtgagccccggttgggccccaccccggagaccacgggccccaagccaggcgacacgcaacgtgcaatagaggcgtccgccaacgggaaggcgcacagccacagaccaccacttgaaggggccttaacacaatacagctacggtgaaagtcgtaagcccactcgggccgaagcccaatggcagcggcggtaaaccctcgccgcaattttcagcccagtaacccaaaggacaccccacgacaaccattagcgaccacacaacctctcacaaatcaaatcccatcccaagcctcccctactaccacacgaactaactccccttgatttcgacctatctatgccccaactcacaccacacacacctccccctaaataacccaaacctcgtaatatagtattctctagacccatgatcacctatatacgcactttcaccaacttccagccaaccacaacaccaaccaacacacgcacctccgacatcaacccccagatatcaacccgccattagtattaccaaatctcaaacaccaccctacccatccaaaccacacccactccatccacaacccacccctatcatcctatttgtctctctagtatccatcatcacctactcttcatcccactcctcccatcaccccttcgtt

SEQ ID NO: 561343 - DNA, 398 bp, Homo sapiens
gaaatatgattaaggatagagtttattccagcgtaaggcttgagggtagcctctcaggagacaccagctccaaatggggttagcattccaaagtgaagaagttagggtttcgcctaggtggccagagacaaattttaacaggatttcatttcccctaagagaccagtgcatacttacagctatttggtaggttacagattactacattccaagaaaaagtactttgttactccatgagggggggtagtgatctcagggggttgtatctctggtatggtttggtcctcctattttaattatttatagaaacaaaaggcagacgttgcagatgcctgctgcttgactcaggctgtagccacattcctcccaaggctcggaataaagttccaacagcttta

SEQ ID NO: 561344 - DNA, 716 bp, Homo sapiens
ttctctcgagatagacatcacacatctaacagttacgtctcttgtgaagcaccgccagagcaccctctcttctccaactcaccacctgtccccactcttgttgatgtttacgccgacaacaaatatttagttttcccccctcggccaaaaattcacttcccatcctaccttcctcccccgccgtccttcctcgttggtggtccacccccatcttcctgctgtatctagaaaaatcatctgccgtgtataatataccaaaagaagactagagaggtctctcttcaataacaccccctctaatgttatttgaaagaacatattgattttacacagccccccacgcccggggagtggtctccaatatacacgctctctctcgtctcgtgagaagcctggtctgttgtctgcccgcgcgaggagacatgatgagacgcaccacgcgcacgcgagagattgtccctccttcttctcttcgtatagtggatagccccctcagtgattgccaccacttcctctcctctctcgcgatagagattatgtccgaagaaacaataattcctcccgccctgttcttcatgtttttggtgcgagagataataaactacattgtcttccgcggcaagatacatatatacatttggatacagtgacccacttcgacgtctgtgcccttgtgtaaaacagcgggtcacccccgacccacaattgtacaaaaa

SEQ ID NO: 561345 - DNA, 246 bp, Homo sapiens
aacggcccccagcgcggcggaacgcctgggccctccgattagggccccggttttaccgccacagtaaacagggcggcaatgaacagtcacatgcaggattctgcagaacgcccgatatgcctaagggtatatactcagtaaaaggaacgctgagccaaaaggcagaactggctacagttccctgaggagacaccataccacgtaccacaagggatgaaccaaactacactcccaccaacagtggat

SEQ ID NO: 561346 - DNA, 131 bp, Homo sapiens
gcggcccctactactactactactgctcgaattcaagcttctaacgatgtacggggacatggtcactgcctcagcccagccaggctgtgcctttgactttaaaataaaagtccacccagtgctgtgtgtgg

SEQ ID NO: 561347 - DNA, 396 bp, Homo sapiens
gcagtctacagagatatcgctggaagtacttgcatcctgcttggtcagaacctcagagagagtccccaaagaacgatgagtgagctgacttgtatttacgaacgactaatcatctatcctctgattcaatccactcttcacaggttccaagtgtttcttcctcacagggttgctttctgtattataactcctatttcacttgcctataattctttgttcatttctttacttagggttcctttactagaacattcagaaacagagtcccctgaactataatcccctaactgacagctctcaagaaacatcacaacctctgatgtggaaagtctatccagctcagaaaaagtacttatgtaaaaatcttgcagagctgacgtcaaataacctacctct

SEQ ID NO: 561348 - DNA, 116 bp, Homo sapiens
catggatttgctggtgcagtacaactaggcttaatagggacatgtcaagaaacattagtcttaggaattcttcaaaaaatggcatcccaatgaaaataaatttgatgactacaaaa

SEQ ID NO: 561349 - DNA, 455 bp, Homo sapiens
tccagagtatagatggactggactgaatgctggtttccccctcaaatcataggctgaaatcctaaccctaaatgtgatggtttcaggcagcaggaccttagggaggtgattaggtcatgagggtggagcctgcatgagtgggattagtgcccttataagagggaccccggagagctgcctgccccttctgccatgtgagcacacagggagaaaacagagctctatgaatccgaaagttagccctcaccagacaccaagttagctgactccttgaccttggacttcgcagcctccagactacgcgataaattcctattgtttataagccactcagtcaatggcatcttgtctatcaacctgcagggactaagataactatgatccatttctgatacttattttaatgcaaaattggttttcctaaacatgtgggagggaacaagaagtcagatctt

SEQ ID NO: 561350 - DNA, 355 bp, Homo sapiens
tgttatcctcgatgtgctgcttcctgacagtgttccttgccatcagaggccttcgaattgtaaatggacaaggccaggcgcagtggctcacacctgtaatcctggcacttggggaggccgaggtggggcagatcacctgaggtcaggagtttgagaccagcctcgccaacatggtgaaaccccgtctctactaaaaaatacaaaaattagccaggtgtggtagtgggcgccgggaattccagctacttgggaggccaaggcaggagaatcacttgaacctgggaggcacaggttgcagtgagccgagatcgtgccattgcactccagcctagacaacagagcgagactccgtctc

SEQ ID NO: 561351 - DNA, 337 bp, Homo sapiens
ccaaaagaaaaattaatagaaatcagaacactagtgtgtattaaaattttaaacacatatagaggcaatgaaattaggaaaattcaaccgttttcgtggtaagggttagtttatgtgtcaagatgtcaaaacaaagacttaccgacaaatttctgttaggatttaatattgaatcaaactgaatctaacatttcttaagttctcacttcaaatgaacgatgataaaattttcgtacactggaatatctagacattctacactctccacaacttattagaaattataatgtgtatttggtgtgattttacggaaaggtattcaatttctttggtaaaa

SEQ ID NO: 561352 - DNA, 261 bp, Homo sapiens
taaatctatgtgaggaatgagctacagttcaaggaggagaagcttgcagagcagctgaagcaagctgaggagctcaggtgaggggaccccatgggggcaggcaggggggcaggtgtgtaaatctttgaagtataacagctcggtggggagacttaagagctaagctgggccaggggaagggcaggaattgccatggcaggctcgctacacacaaatatttatcaaacagagaagaaggataataaaaatttatgggttgca

SEQ ID NO: 561353 - DNA, 757 bp, Homo sapiens
taagatgcctcgctgggtcgcccgccgctaggtcgctccccggcatgcgggcgctgcgggccggctgaccctgctgttgggcgcggggctgggtgcggtcgtcgagggctaggcgtgcggcgtgctgggagtgaccgcgctgggctggcgctgtggacttgcatgtggcctggctgcccggttgcttgccctgttggcgagcagtcagccgaatttagcccctcttgttgcccgcggggggaccccgtgtggccgcggggtgaatcttggccgaacggataacgggtggttagcccgggtggggctttgggctggcagggcttccaagtggacgcccgggagaaatgctcggtaagtggttgcttagttggctacgtaacccgctggtggccaatccccgaggggcgcgcgcgcgctactgtggggttacggttgccagcgaagttatgagaaccccgggaagcgtgttcttcacggggggggcaagagctgggggagacaccccgggagaggccgagatgtttacgagaactttatcccgaggggaaggaggaacggaaccttatcgagattgcagaacgggcggttaccccaccctctgtgtcgcaaggcacaaaaacggcgcgagaaaaaaccgcggagggggcacatgcggcattacacgaagacgcggggggagacaaccactggtaggacggagaccgggcacgggacaaaaacccgcaatcgatgttttgaaaccgaccaaaaaaattgg

SEQ ID NO: 561354 - DNA, 128 bp, Homo sapiens
ggctgatgccaccgttctattgtgcagaactcaagcaaaacgtcattttagtgttgattttgatgtaccagaacctaaattgcttagaaattaaaaacttgtttcagcagccaggtgtgtcagcacat

SEQ ID NO: 561355 - DNA, 160 bp, Homo sapiens
cctacggcatacaaatctgtttctgaatggcaggaagggggagatggggacacataccacgatgtctccttcatgaccctaacacattccctcccccatcactaccaggccatgcagagagcagcgtgctcttcgccgcaggtcacacggcgctctgggg

SEQ ID NO: 561356 - DNA, 185 bp, Homo sapiens
gcttcccaacaatattgcccgggccgtgccccaccccagcacgccccgatgttcccctctctttgcgaggcgccctagaccgctgccgtagagacactcccgctcccccctggtagaatttatttttttgatgggtaaaaaaccgcccgaagctggaaaaaaaaaggggtttggcccccaaaaaa

SEQ ID NO: 561357 - DNA, 141 bp, Homo sapiens
  misc_feature (34)..(34): n is a, c, g, or t
  misc_feature (123)..(124): n is a, c, g, or t
ttcaggagagagaactgattgtgcagcgtttagncctgtgcctgcccacagcctgtgtgggcatttggtgcccaagtgatgatctgcatccaagtggactctgcaaccacatgccatggtacnnttgatatttcctaatcc

SEQ ID NO: 561358 - DNA, 144 bp, Homo sapiens
ggtaccgcgtataattatgatgttgacatctactcatgtgctgtaggctattgcatggcgtgtttggagaaacgtctgttcaagggcttgcctttttttttggagacagagtcttactccgtggcccaggcgggagtgcggggg

SEQ ID NO: 561359 - DNA, 1065 bp, Homo sapiens
ggaagattttcctggcggtctaccggggaagatcgctgaagacagagcgactggtagttctggaggcctcgctccggggccgacccgaggccacagtgccgtccgcggtagatcggacgttgggtgacgggctccgggcatcccgagggatggaagggtctaagacgtccaacaatcagcacacatgcaggtgagcttcgttgtgccagcgctgtagcagacccttgaaactgggacacgaagtttcaagatccggggaacccgggatgcaccaatacagcgagaatctacagaggtccactaaacaatatacacacgccggacaccgaggcgggaaaagcacgggcgaaagcagaccacggtggcgtgagcgagaccaacgctacagggaagcaggcagcccagttgtactgggaaaacttccattacgacccacggggaatgggttgtccttctcgcaagacatttcaatccgaccccaagccagggcatggaatgttccacaagaaaaagttgcgcagaatcaaggcttaacatcatgactgggggcgcaggcattctgatgggcgggaacccaatgagaagaaaacgcatcatggcgcggacacgacgttgacaggggttcaacttgtgggcgacccctctgtcgttggaccacgtacagtggtacgggagcccaggacccatgcactggtggggattcacaccccaaattccttgtgcagggacatgggcaatgaatacctactatgtttagaacccaaggtatgtgacaaattcatcggctccaaaccgtttccgcgttggcacaacattgacagtatggtccaggaaaaactaacacacaaaccggccgggatgtatggggagcaactccttttaggacggcgaaccattggcaactggaacgggcttggcccaggcgggacagcaagcgtcacacggcaattggaggccttacagggcacgcttgggcacactacaacgggacggacgacgagtctgaatcccagggagcagagggacaccaccggtggcacacgaaaccgggcacacatacagtgg

SEQ ID NO: 561360 - DNA, 362 bp, Homo sapiens
  misc_feature (195)..(195): n is a, c, g, or t
  misc_feature (229)..(229): n is a, c, g, or t
  misc_feature (283)..(283): n is a, c, g, or t
cagtgcacctgcttcttgcaggtgactctgaggttccctattttcccatggggtgcgagtcagggaggcctttctccctcttgacagggttggagttggctctatcaccaccatggatttgtgggacatgtgatgtgttccctggtgacagaaccccattgaagcagagctgcaggatatgatcaatgaggtggntgcagatgggaacgggaccattgacttcccgganttcctgaccatgatggccagaaagatgaaggacacagacagtgaggaggagatncgagaggcgttccgtgtctttgacaaggatgggaatggctacatcagcgcccagagctgcgtcacgtaatgacgacctg

SEQ ID NO: 561361 - DNA, 207 bp, Homo sapiens
cctggtgtcgcatgggcgccgcccgcccgttgttaccggtattgtaagaacaagccgtacccaagtctcgcttctgccgaggtgtgcctgatgccacgattcgcatttttgacctgggcggaaaaaggcaaagtggatgagtttccgctttgtgcacatggtgtcagatgatatggcagtgtgctctgaagtttgagctgccgattg

SEQ ID NO: 561362 - DNA, 954 bp, Homo sapiens
gacgtgttgcgccagttattactagttgatgcgtgtgtacgattgtactgcgccctcgctgtccttttccaggagtgtatatcttgtggggtctacatttttgccaccacccacttttgatgggtctaccttgtgaaggggtctgttcccacaccggatgcttgacgggaaaaactttgcgagaccctttcggcgggtcgttgccccccggatggtctaagggtagataccaaaactgtgccgcctttcccgcatttcccccctccgggactgccatacacgcccttctgtgcgagccacttccttacccccctttagggctccccctcccttcagtctcctcccccctgggtcagaattttaaagagccccccccaatgtttctcacaccccccgtccacaacgcattcagacacaaacatgtcactgtatgaatatatattcgctaaccccttgtatccaccacctctctgaaagcatacacttattcataaaaaagggcgtattgtggtctctcccctcaaaaaatctatatcaagaatatgaggaccattacacctcaagtttcgtagataaacctctagcattctttagtacggttcactgaaaacaattgtattccccccctctatcggcacaatcccgaggggcttcgcaccacggttgtttgcggcccgcatttaatctactgcttccacgagttaaccaccggcgcataccctctccatgaggggggattctttctcccacctaagggttactctgccaatataaaagtagcctcaatatctgtttttgggatacattaagaggaacattctcacgacagatggaaagactcgaacggttcgaacaattgttcacccgccacaggtgaggcttttttaaaagaagctgtttctcccccttgttttactctgccccctccaccaaaaaggcccaacaaacaaaaca

SEQ ID NO: 561363 - DNA, 398 bp, Homo sapiens
  misc_feature (116)..(116): n is a, c, g, or t
  misc_feature (119)..(119): n is a, c, g, or t
  misc_feature (122)..(122): n is a, c, g, or t
  misc_feature (233)..(233): n is a, c, g, or t
  misc_feature (295)..(295): n is a, c, g, or t
  misc_feature (303)..(303): n is a, c, g, or t
  misc_feature (347)..(347): n is a, c, g, or t
  misc_feature (368)..(368): n is a, c, g, or t
  misc_feature (376)..(376): n is a, c, g, or t
  misc_feature (396)..(396): n is a, c, g, or t
ctgccgttctgcccttaggtcctggtagattgcaaacgacctgctttctttctgatcccgggctgcgttcggacccctgtcgtatagaaaatcccaagtaaggtacctgccgtcgnaantgntgagctttcttcttggacacctaatacccacagtcctccagacccctgtcggatagtaaatcccaagtaaggtaccttctgctggaagatctgagctttcttcttggacanctaaaacccacagtcctccagacccctgtcggatagtaaatcccaagtaaggcacctgcgtncggaaatncttgagctttcttcttgggacaccttaaaacccacagtcctccnagcagtgaaggatcccagttnagattttnccagggtttaacgggtcatnac

SEQ ID NO: 561364 - DNA, 406 bp, Homo sapiens
gcagacctgagcccaagggatactccacaaggagaagacatgctgaacgccatccgaaggggcgtgaaactgaagaagaccacgacaaaccatcggttagccccttgcttttcttaaggtcacaagaaatgcgcccgtggggaaagaactggttcattaatcctaaattggcttgatccattccactctattattaaaccaaagaatttggaggcgactcggaatatagctcttttgaaaggacttgacacctttagattagaatttaaacccacccatggtaccggccttaacctggacctttaaattggtaaatatggccaatttcctttcggcacatttaaatctatagttcccctttggatttttctgaaggtgccttccatttaacttttttcgtctttgt

SEQ ID NO: 561365 - DNA, 530 bp, Homo sapiens
  misc_feature (503)..(503): n is a, c, g, or t
  misc_feature (530)..(530): n is a, c, g, or t
tttaggattatgttcttgtattgtggttctccgtctgtgcccacggcctctgtctccccatggattttcttctggctggcgttcggtccgtttctgctccgccttgtggcatcccctctgttgtacggcatctggtctaggtgatgcggcaggcctccttcctgcccctcgacgacacctcttgggacgatgcattttccgtctggtctcacagggggtaggagtgaggctttgcaccccagccctctagccctaggccactgtgagggatgggtgctggctgagcccccgggggcagccaggagccaggcaggtgatgtctttgttctcggctccacatcagcaagagccaggtgagggggcgcatcgccagggccagacccagcgtggggcagcctgaaccgtgcttccccctgtggccggcatgcgccgatctgtcatacactggtgagcactgagagaggagggaggagggaacctggcgggggtgtctgaggccgcantaccgccgaggcgtcaaagctcacgan

SEQ ID NO: 561366 - DNA, 157 bp, Homo sapiens
  misc_feature (132)..(132): n is a, c, g, or t
tgatatgctgttcagctgaggtcatgtctgtgtgaagtggctcattctcccatctttatgggtcttctccaagtactccagtttcctcccatatcccaaagatgcacatgaatgcgatgtgtactacgcggnccacgtctgtagcagcgtggcgtgt

SEQ ID NO: 561367 - DNA, 338 bp, Homo sapiens
ccctagcacttcctgtacatgtgtacagcaatatgtcggcgctcaagagttaagtcaatcctacttgtgttgtgtgtcaggtcacttaggcagatgtaataacccctccttacccatttgcacacgtcacagtcgattcacacacaggactgggctggacagctggccacagagcccagcaagtccttcctgggagagaagagttagggctgatactgaaggtctctttcacatctgggcacacgtctgccttcaggctgtaagaatttcatttgtcgattgttaaataaaaccaggagaaagcaatgcaggtctctgggaatctcatcccttccgta

SEQ ID NO: 561368 - DNA, 129 bp, Homo sapiens
gcagaagagcatgcagctcctgcaggaaggagctctgcactggcagtggcactgacggttcaaggagctgcgagacacaaactacagaaagaatagaatcaattcttcctccttttaccttcaatcagg

SEQ ID NO: 561369 - DNA, 628 bp, Homo sapiens
  misc_feature (28)..(28): n is a, c, g, or t
  misc_feature (30)..(30): n is a, c, g, or t
  misc_feature (251)..(251): n is a, c, g, or t
  misc_feature (307)..(307): n is a, c, g, or t
  misc_feature (413)..(413): n is a, c, g, or t
  misc_feature (422)..(422): n is a, c, g, or t
  misc_feature (426)..(426): n is a, c, g, or t
  misc_feature (430)..(430): n is a, c, g, or t
  misc_feature (437)..(437): n is a, c, g, or t
  misc_feature (442)..(442): n is a, c, g, or t
  misc_feature (447)..(447): n is a, c, g, or t
  misc_feature (452)..(452): n is a, c, g, or t
ggtggtgttcaagtggcctaaaattcantnatgatattttctttcactcaattacgtagcaaagaatgaggtttgaaacagggtgccataattagtttgaatgagggtactatgctgaaaaaatatatgtctatatacacacacgtatctacatgcgtgggtgtgtatataaaatcttaccgaattgtacatgaggagccttctcagtttcagttatttgtaacattatctattatcattaaatattattnacttgacaaatacttatttaaggactagtggaaagactgtaggcaggggtgtcttncagaagaaattggtatttaaactgatacctagagggtaagaaaagttattagagcaaccaaaaggggaaagggtagttcaagcaagaaaaaaaaaaaaaatgttangttgctgancatngtancacatgnctgtngccanaaatncatgtgatcttagggttacgtactaagaaccccagatgcctaggaggggaggcttatgtaacccaattccttgcgcctaaatgtagactgttaaatctctttataccatttttctaaaactgaaatgggtatacaaataaggtcgttattgaataattatttcagggggacactcc

SEQ ID NO: 561370 - DNA, 627 bp, Homo sapiens
  misc_feature (28)..(28): n is a, c, g, or t
  misc_feature (30)..(30): n is a, c, g, or t
  misc_feature (251)..(251): n is a, c, g, or t
  misc_feature (307)..(307): n is a, c, g, or t
  misc_feature (413)..(413): n is a, c, g, or t
  misc_feature (422)..(422): n is a, c, g, or t
  misc_feature (426)..(426): n is a, c, g, or t
  misc_feature (430)..(430): n is a, c, g, or t
  misc_feature (437)..(437): n is a, c, g, or t
  misc_feature (442)..(442): n is a, c, g, or t
  misc_feature (447)..(447): n is a, c, g, or t
  misc_feature (452)..(452): n is a, c, g, or t
ggtggtgttcaagtggcctaaaattcantnatgatattttctttcactcaattacgtagcaaagaatgaggtttgaaacagggtgccataattagtttgaatgagggtactatgctgaaaaaatatatgtctatatacacacacgtatctacatgcgtgggtgtgtatataaaatcttaccgaattgtacatgaggagccttctcagtttcagttatttgtaacattatctattatcattaaatattattnacttgacaaatacttatttaaggactagtggaaagactgtaggcaggggtgtcttncagaagaaattggtatttaaactgatacctagagggtaagaaaagttattagagcaaccaaaaggggaaagggtagttcaagcaagaaaaaaaaaaaaaatgttangttgctgancatngtancacatgnctgtngccanaaatncatttttttataggctctagttcgatgatcccttgatcccatgaaggggaagcttatctacccatatttatgttccttgaattgtgactttgcaaactattgttataccttttttataatctattatggggtacatataatgtttcctagttcaaaatttttatgtggtcagccc

SEQ ID NO: 561371 - DNA, 687 bp, Homo sapiens
tcaacgcttatattcctagttctagtcttcatatttagaccacctcatttgcggtaactaggaaaatttgatgctaaaatccagagtctcgggctcaaataattccatatactgggaaatcagagtcccatcttggatatattttcgctgtgacatttcccaaagtgggttccatggaatgctagtcacatgagatatattgacaaaaagagtgctgtggttagtaaggttgggaaacactgcctgctgccatatccttctggagctgcataatgaatacaagcatatttacagactctgataagtcacacagtaaagaaattgatacttggtagagatgtattttggctcagtttcccaaacttagttggcgatagcacactcttattcaccaatacctctgaacacttttcgggaaatgctattctagggagataactgatcttggttaggaccgtcttaaaaatgaaaggaagaggctgggtgcagtggctcatgcctgtaatcccagcactttgggagggcgaggtgggtggatcacttgaggtcaggagttcgagaccagcctggctaacatggagaaaccctgtctctactaaaaatacaaaaattagcctggtgtggtggcgggtgctataatcccacactgggagctgacacagggaatcattgaaccaggaggcgagt

SEQ ID NO: 561372 - DNA, 178 bp, Homo sapiens
gtaccttccagcaagctaacactcctgcagtgagagcccaagtgtcgtacacactcctgcaggagagccctagcactgtacacactcctgcaggaagagcctcccagtcaccacgccacactcctgcatggatgagccccccagtcgactgtacactctcctgcacgggaggaggggg

SEQ ID NO: 561373 - DNA, 1078 bp, Homo sapiens
tacaaaaaaaaaaaaaaaaaacccctaaggccaaaacttggaaataggttctggacttgcaatttgggaactgaaattaaaacacgggggtgtttttccccctgttctgaaaattacacagtttcccagaaatttcaaagaagtgggccaagattaccttccaaataggggattgggcttatttctccagtaaacacaaacttccctttgcagtcatttttctaggggagaatgagggctcactctgttataaggccaatagtcattagactttccaaagcaattcccagattaaggatccgtgttggtagcaaccaattcttagctaaaccttaggcattaaagaatttctttcgagggaattttaagaatccaaagggaacgcttaaaagaaacccaaacctcgggaaatagaaacacttaaagcctccccgaagaaaatttttttagacggcagaaattggctcaataaacttcttggcttaataatcccctcagtggcttttaaattataaccactccgggctgtgcttttaaagatgtgccccatttcaagaattttaatgtgccgtggcaccggttgagtttgttgccaaccccttagggttccagaaaatattaccccccgtggccgagtctctttgagaagcccttttggagaaaggatcatctcttaacgaggaacattacactttttcgggtctttaacactgaaattttgagagggcacaagaaccagctggggctgataaccaggatttcccccttcaaggagaccttaaccgttgttgacaaggggacgaggggctacgttacctccaacgggggagaacaacacacgcagactagagaagctgcacaagaaccatggttgttgggccccgctctgcgcgaccaagaagaaaagttttttaaaacaacaattagtagtggggcgcgccgcgcccccagtagttatagagcacaacagtgccaacagtcttgttgccaacaggaacagtcctggcgacagaccatggtgtggcgatcacacaaaataaaaacacgcgggggaaccccagggggttgtaaccactcg

SEQ ID NO: 561374 - DNA, 292 bp, Homo sapiens
  misc_feature (34)..(34): n is a, c, g, or t
  misc_feature (77)..(77): n is a, c, g, or t
  misc_feature (80)..(80): n is a, c, g, or t
  misc_feature (85)..(85): n is a, c, g, or t
  misc_feature (281)..(281): n is a, c, g, or t
ggtggtggagaggccttagctgtcctgactggtnccctcccaggctccttttcaccctgccccctggctagagcccntgntgtcnaagcctccccctggctcttcagttctctagcccttggtttgctgggtttcctgactgtagccacatctctcccgctccctaagggtaacctagccaatggaagctgccctttgggtaggtgctgggctcctgggagggcccagatgatggggtgaggcatgtctttccagaactttccctgggcagggaggggatngcagaaactta

SEQ ID NO: 561375 - DNA, 280 bp, Homo sapiens
  misc_feature (276)..(276): n is a, c, g, or t
tacactgagctcaactcctgggccaagtatcctctcacctcagctcccaaggaggtgggactacaggtgtatgccaccacactcagctatttttttattcatttttgtagagactgagtctcatcatcttgcccaggctggtctcaaactcctgaactctagtgatcctcctgccttggcctcccaaagtgctggaattacagatctgagccaccgtgcccagccttgcctgatgttgaatgtcatatctacatgtggtttgtaagcttgtaactnaacg

SEQ ID NO: 561376 - DNA, 1016 bp, Homo sapiens
aaaaacaaaaacagcagctatttgttgagtggatccccaacaatgtgaaaacgggctagtcatgtgactatcccaccatcgtggggcttaatacaatgtccagtcaccttcatgggcaacagcacggccatccatggagctgtacaagcgcatctcctgagcagttcaatggcctatgttccggctgcaaggccttcctgcactggtacacgggcgagggcatggacgagatggagttcaccgaggccgagagcaacatgaatgacctgtgtgtccgagtaccagtagtaccaggatgccacagtccgagtgacggagggctgagttcgaccgagcgaggctgatggagtgacggtcggctatgaagctcttcagtcactggggtaaatgcagggaagcagtgtgaactcttatatttcactcccaagccttgtacctgttggtctgttccactgtgtgcatcttgcatgtattccctgtcgcatcattcatgactgtacagacacgcaaccaatataaaaggcaacttcgccaatagccaaaaacaagaaacagctaccaggggagtacacataaagagcatccaaaagtcggggggagcctgcgcccaccccggagaaagcacgccgtggacgcagcagactagtgcagagcgcgacgaagggtgcaccgccgaggggagatgacagacaacagcggctacacaagggcggaccaccaaagacagaacaaccactcggcaaccaaagagaaaaacaaggacacgcggcgaccattcaacacaacacaaaaaagacgaccgacggtgaggagaccaatacggcactattgcggaagaaaacacgacgagagagatagcgacaggaggacaaaaaagggagaatgaaaaacacaggaaggtcagagcgcagaagcgaaaacacaagatgaggcgccgccgcaggggaaacgaacgcgaagaagagaaagaaggaaagagacaggcggaacaaagcgacaccaaccacgagaaacaa

SEQ ID NO: 561377 - DNA, 137 bp, Homo sapiens
ggcgacgcagagtaaatctggtggaggtccgtagcggccctcgccagcagccacatcaccacccccgttccagcatccgttatgcagcctttcagcaaccccagtgctgtgtatcttcctccaggctcctttcacgg

SEQ ID NO: 561378 - DNA, 606 bp, Homo sapiens
ctcccgctccacctcgcttcttctctcccggccgaggcccgggggaccagagcgagaagcgggaccatgtccgacgcaagtgtgacggctctcgagtaccacaaccccgccggtttcaactgcaaaggatgaaacagaatttagaaagcttcatcgtgtggcttgaagaccagaaaatcaggcacctacaagattgacagaccagaggggcacctttaaagaaacaatccacatgcagccgacttgggcccccaaaaggtttccttttgggaaacaaggctattctccagagaatgttaaacctgtcctttcaagattcaagatcgacaagaagctattgactggcttctgtggttaagctgttagacttgaatatggagataatggctgaaaaataccaggatttagtaccctgatatttcaaaaactggctgacaatgcaactaaaaatgcagaaccattgatcaattgtggattgtaaataatccctgatttttaaggctgggttgtgaatgggcttgtggcttaaccttgtttcaagaattcagccgtcattgatgattacctgggtaaatgcttaaggcaaattcggatttgcggttcaag

SEQ ID NO: 561379 - DNA, 734 bp, Homo sapiens
ggaacagtgagcactccctgtacggtcagtccaggatgaagtgtttcgggtggaattcctcattcttccatcgagcaaccgcctactattgatccattatcacctctgacttagtggcagaggatcccagtgagaagccggagagttgggtttcaaaacaacttcgcgtgtaagtcacggaccatcagaagctacagcaactttgagcaacattgagtgcgctatgctagtggcgcctcactcacctgagacctcgaattactgctttcagtggttggaaaccgcattctctctctgcgcttagtaggtcagtgcctgattcttaatagtagcttagtgcttgtgtagtgggcttaatataacatggatatggacagaatctttctagaatttaggcgttcctctggagaacatagatccatacttgacagaggaaggagccagatttatgctatttccaaggtttcttacttatgggactgcaaataggtctggttaggaagccctcaacattgctgagcattgtacttgtgatctccagttaaataacaaagtgctgttgaaatggcttattttctatataggtttcgttcagaagaacagaggcagaaagcttgggagaatagaacgatttcatgtacaagctatgaatggcagctcagcatcggcaattcaaaagtatcacgtctatatgaatcaggggtcatgatatctgggagaaacgttcctgagta

SEQ ID NO: 561380 - DNA, 291 bp, Homo sapiens
cccccggggccccccccgggggggggccctttgtcaggcccccccaaaccccctccccaaacaaatttttcctggggcccctttttgggtccccccccccctggggggggggggcccccttttaagcccttccctttcaaaagggggtttggggaaaaaccccttttcaaatgcccccccccccccctttttggggggccctggggccgggggtttttcccctccccccggggggttttttgggggggggggggggttttcctaaaagttgggcccctttttttcccggga

SEQ ID NO: 561381 - DNA, 350 bp, Homo sapiens
  misc_feature (19)..(19): n is a, c, g, or t
  misc_feature (39)..(39): n is a, c, g, or t
  misc_feature (101)..(101): n is a, c, g, or t
  misc_feature (174)..(174): n is a, c, g, or t
  misc_feature (211)..(211): n is a, c, g, or t
  misc_feature (223)..(223): n is a, c, g, or t
  misc_feature (280)..(280): n is a, c, g, or t
  misc_feature (292)..(292): n is a, c, g, or t
aggcgggacttgaaacagnaacacattcagccgaagccnaaagggaagcttgagaatagtttgtttggaaaacagagctttaacttgaaagctgattgccnagaaagggattcaagagaagccccaggaactccttgagcattaaattgcaggccccgggaggccctggtgagnccaggcttagccccttcttccacagcaaatctggggnagttgcagcttnttcaagcccaaggagcttgaggagagctgccagagttcccaggcaggtggggagccntgcacccaaggntttgcccatggtgatagcccacttccagttccagaagaagcagcctctagaagcaccc

SEQ ID NO: 561382 - DNA, 705 bp, Homo sapiens
tcggcgagtgtatgtactagcaccgttttcggcagcgccagccctacactcgcacgcgcaatgacctctgaaacagagctgacatgaattaatcggccctcattatgatcgacgatgaggtgacagtaacggaagaaaagattaaaaatgtaattaaagcagtagaagaaaatgttgtaataatttagcaagctttgaatgcaaaagccatgaaaaacgtattcaatagcagacttaaatgaactaaagggacagattgaacttgaatcaataatttatgcttataatgcaaggagtttataatttaattaaaattaaaaaattctgaatttaacaaaaaatgattaatttcaatagtagatttctatttaaatcttataaagatatatatatcgaacattaaataacttaaatttctctaaactgatttaattggactttacctaaaaacttaaaaacacaaatcttaataaatatttatatctctaaatactaaaacttatatacaatcttaaaaaattaataaacataaaaaaattttaaaattttattctaatatttacacttattataacaataatatcacaattatttctgtatcttattaaaaaatactctcaataatattaataatataaaacctatttaataattatttaaataataaataaattttcacaaaattatattctttatctactactc

SEQ ID NO: 561383 - DNA, 181 bp, Homo sapiens
accggctctactaatgatatacacgcacttcgcgcagtgcgtggtggtgcgcacctatatccctgcacctcgggccgctgacgccaggagaatcgcttgaacccgggaggcggaggttgccgtgagccgagatcacaccactgcactccagcctgggcaacagagcaagactctctctctc

SEQ ID NO: 561384 - DNA, 183 bp, Homo sapiens
ggaagactgcccgggggtctgggaatagcgccgtcgaatcgctgagacgtgtatcgtttatggtcggaactacgagggtatcgtgctcgtcttctgaaagctccgagttccgttcttgattaatgagaacattcttggtaaatgctttcgttctggtccgtcttgcgccggtccaagaattca

SEQ ID NO: 561385 - DNA, 1754 bp, Homo sapiens
  misc_feature (173)..(173): n is a, c, g, or t
  misc_feature (349)..(349): n is a, c, g, or t
  misc_feature (495)..(495): n is a, c, g, or t
gcattagggtactcgcagcacggagtaaggtacaagaattcaagttaggaaacgagttgatcccagcgctagtattttgtacagcgcgcaatgatgtcggattactcttcccaagtgatgagacgcggtgtgaatgcaatcgattggaagatgtgtaagtgatgtggtctgancctgaagcgtctatggtcgactcaggccatcgcattgttcatgagtccgagagaattccactagcggaggtgacttggtatgtacatacagcgccatggcgctggcgtccatcgcgagcgcttgctgcgtactgttcgtgccttatgttatgctccgtgcgtcttattattctcgncatgcatctcccgtgcgcctatgtcgcgtgtggacgcctcacatttagcataggcgtgctatgatacggacttctcgaagaagagaagttaatccgacgaactggcgcaaggtgagaaaaagacgaatatacgcccattctggggngcaaagctatagacctagaccggtcgacacatctgcttgacagagcggcttgtatacagagagccttcaccgcgtttacaccgtacagaacctaggataacgggcttggcaaaggggtcgcgtgtctgtgcttggagttggcgctgtgtcccggtaccgtgtgagaactgacacgcagggcatgttcccctgagaagtggaaaggtgagtggttttcctgggaaaaatatgttggtcttaataggagaggccccttttgttgcgagctcttacaaggtccctcggacgtgggcttgcgcggatggatttcccttgtgggaaccccccacgggctgatttaattcacccgggcaagttaagtaaagaaacaatcactacgggggcgttgcttttcaaagcaattcttccaccggcaattgggttcccccacgcggaaagggggtaaaatttttccgtgcgaaggccggttatatggccctttggaacaggtgtatttgactcagcttacaggaacaaagcaacattcgtttgtgggcgcatgcacaaacttttcctaggtcaaacttttcaagcgcggttacactcgccggttagaacacaagggtgaaacgaatgcactttcccaccgtccgagaggggcgggccatgttataaagttcggaacaggtccacgccgaaggggtaaaccttcacccaaggggcagctaacataaggggcgaggaagttggtagtaccccctattgagttggctagggtgcgggagatcaagcctctcagcgtgcagccgcgaagaacccccccagggaaaaaggctgagcacaactcatcccccaggggatagaaacgcccgccataattatctaggcgggcgctgtgggcggcacccacacatctatggggggcggacagatagaccaagacgtttgacgggagggggggtacttagttaacacccagcacccacccgtgtgattggggggttggctacgtactccaccgggggtaagcgacccccagtacacaagagcgttgttgttattggcgaaaacaagtggtgttctagttatgagaaacgtcagcgtgctgtgcgtgtctttccaccccgaagaaggtgaacattgagtgagtatagacatgtgctcgtcgcagagctgacatgagagctcttactttacatagatcgcatgtagtgtgtgccttatcatcgagcgagcatcggatcgacagcggtgaggtattatggtaacaggaggcagct

SEQ ID NO: 561386 - DNA, 129 bp, Homo sapiens
ctgtgagctggttttctctggaagccaggcccatgacagctttgtactctgaagaccacaggcattcctggtacagccctagaccctgtcccttaaactagccagcagtaggcaagaaggctgacagta

SEQ ID NO: 561387 - DNA, 422 bp, Homo sapiens
tctagccgatccctgattgcctttgtctccagaaaacctcctgagtacgaaggcttatcacggcctcaaagccacccagtcaaagtaggcactttaggcacaggaggagcagagggaaggagaagagctcaggtttacgcgactggaatcattcctacatgattcctggcggcagaaacatgacaaggtgtgtctcagacgactagaagtaaaacctcacaccttggaatcgccagataaacattccttggactttgttgtacgcgtcgaaaggattgatggtgtgagtttacgggtgcggagagccattgcaagacttaaacctaaaaatgcagcgtatagtatgtaaccttatgtgacctggggatttccaaatctgaagtctgtccagacactcatttcgaaacgtagacgacgggaca

SEQ ID NO: 561388 - DNA, 239 bp, Homo sapiens
aagaaaggaatgcgcaaaaattaatatgacatcagctggtgcctaccgtgaagaaaaagaagctgattttaaaaatgaaaggctagatagatatttctccaaagaggacataccaatggccaacacgtatgtatgtgaaaaaaggatgtaaaaaattttcaacatcactaatcatcagggaaatgcaaatcataactacaatgagatagcacttcatacctgttaggatagctattagc

SEQ ID NO: 561389 - DNA, 955 bp, Homo sapiens
cagcgcgctgctttgccgcctggtgccgcctccgtggtccccgtctatctccccgtagtctctctgcgttccccctgcttttttcccccgggcttgtctgtagtgttgtggtaaggcaccggggataacacgggcgctgtgtgtttaaaccccttgggaacttccagattctcggtgttcccctctggaagccgctgtttctcccccaaagacgggggggattttccccgatgggcctgggcagtgggaccactaaggttgcccaccggttttcgttgtcaagaggggcaaccgtctttccccatcaggtggattggccacctctgaaaatgctcccagccctgaggcccctcaaaattcttgcgacaaaagccaacccaccttttttttccccgcgtcactctcattagatgttctccaaaagccgcccccctggctaagaaggataaaacattccgggtaatatggggccacccttcattaatactacgtggcctcctcccaacttctgaggttttcaaaagagattctatgcccactcttctctgaaattgcaacgcaatattagtaacattgagcgtcctttttcaagaccgcgttctttatataccccccttaccttatattctcttgtcttctccccgatgttggaccttccttagaacacaatggtaacaacagtctttgttgcgtgtagaaaacacctatttctattctcttaatcttctacaacaatgtgctgtgtataagagatatcaaacctcccagactagactagtcctttttagtaacaactagttaaaattttttttctgtctttcagaagcccttcttgagctgtttcataaatcacaaaagggtctgttctcgtctttaaaacccatttaaaaaatgttttgaattaaaaaaaaccttgaattcccacccacaaaacaaaaaaaacagaaaataaaaa

SEQ ID NO: 561390 - DNA, 859 bp, Homo sapiens
  misc_feature (358)..(358): n is a, c, g, or t
agcgggcctgtgacatcaggggcaggacagagtggagcgaaacctcaactatagccaggcgtcgacccagtaaaaaggcaggtaacacagaaaactgcaccctcgacaacaacaacaaactaagtctggtaatcaggatctagaaaacacaaagacggatagatcagaaaataaaagaacagacaataaacagtaacctaccaggaaagcattatcaagaccaaaaaccccgaacaacacaaaacaatgaaaaaatcgaaaaaaaaaaacaccgccaaatcaaacgaaatccataattgatcaacgaaaagaggatgaataaacaagacattaagcagaggctcaaacctctaaggangcgggtaagtagaaatagaaagatacaaataaaacaaaaaaagcaaccgaaaaaatagcccaaagaccgaacgtagataatagccgataatataaagcacaaaccgcgagaaggacttaatctcaaacagctcataagtatcattaatactttaatcctatcttatctatttacaaactaaaatacatccaactattaattcaaaacaaccaagtaataatcagatcaacagatgactcgatacaaccaagggaatacctaccaatggcctaaccaactcataattatgaacaaacttctatgcgaccaactatgcaactaataaacctgaaatacgttacttaaaaatcccctaggcttatggtatatcacataagccgaaccgaccctattaatgaagaaactaagaaatataagaataaaaattaattattaaaaattttaatttaattactcttacgactgctaccaaacctgggtcactcactataaagaaaataa

SEQ ID NO: 561391 - DNA, 461 bp, Homo sapiens
  misc_feature (113)..(113): n is a, c, g, or t
  misc_feature (204)..(204): n is a, c, g, or t
aaacacttgtttttattcacagaggtaaagtgtcttttcaatattaacccagcaatttaggtggccatcttataaaaataaaaaatttcttactgtggacatccccttttccnaacttttctacataatggcttagttctgactactaagaaatgttaagaaataggccaaagtgcggggtgtcacgcctataatcctatcacntttgggaggcctaggcaggcagatcacctgaggtcaggagttcaagaccagcctggccaacatgaggaaaccccatctctactaaaaagacaaaaaattagctgggcatggtggcatatacctgtaaccccaactacttgggtggctgaggcaggagaattgtttgaacctgggaggcggaggctgcagtgagctgggattacaccattgcattccagcctgggcaacagagcaagactgtctcaaaaaacaaaacg

SEQ ID NO: 561392 - DNA, 264 bp, Homo sapiens
agccgaaactcacttccataaacctgtctcccagtcatcttcaatatgtggacgaccttcttctttgcagcccctctctaaaagactctcaaactcacacggccactgctctcttaaactttctcgctatcaaagggtatagggtctccccctccaaggcccaactctccatctccatgatgacttacttaggaattcaactttcccctggggcccaggctatgactccagccagggcagcattaatagaaaatctacccccaa

SEQ ID NO: 561393 - DNA, 175 bp, Homo sapiens
tgtctctgtgtccttaccccaatcatctcaaactgtaatccccacatgtcgagggaggggccgggctggagatgatgcatcatgggggcggtttcccccatgcgcttctggtgtaagtgagtgagttctcacaagatctggtgggttaaaagtgtttggcagccgggtgtggcgg

SEQ ID NO: 561394 - DNA, 349 bp, Homo sapiens
cgcggtgtggcggccgatgccgctataaaggcttgttttgctgcagggctcatgctcgggagcgtggttgagcggctggcgcggttgtcctgaagcaggggcgcagaaattttgaggggaaacaaacagctgggaagcctggaaccctccattaaaagaaaagaaaggatttcgccttaggaaaagagtatatcatccccagtcctgggtatagaagtgtgagggagagaaccagcacttctgggacgcacagagaccgtgaagattccaagttcaggagaactcgaccgttggaatgccaagatgccttggaaacagcagcccgagccgagggcctctctcttgatgc

SEQ ID NO: 561395 - DNA, 174 bp, Homo sapiens
ggggatatctggccccctccgcgagtggatgcgtcggcgtgcagggtgacgtcgtgacttgaacgcagagcccgcatgttctcctcgacacagtgcgccctccttgtggcccactggaagccggccaccacactgtccttaatctcgttgaggtactgcacacccttagtgctg

SEQ ID NO: 561396 - DNA, 1284 bp, Homo sapiens
  misc_feature (325)..(325): n is a, c, g, or t
gcgaagaaggaagctcctgccccattcgctagaagctgaagccaaagcgaaggctattaagaggccaagaaggcagtgttgaaaggtgtccacgagccacgaaaagaagaagatccgcacgttcacccacctttccgagtcgtgcgcgaagacacatgcagacgtcgcgtgagacatgtcccatccatatcctcggaagagcgctcaacaggagaaacaaggcgttgacacacatatgctagtcatctaatgtttccgcgtgaccactgagtctgcctatgaagaagatagtatagacgaatcaaacctatcacttgtgattcanttggtgtgcatggttatcaatgcactaaacaagacactcatgagttaaaactagggctgtgaagaaagctgtatgacattgagtgtgggcgctaaggtctaaggtattcctgattctggccgtgatggaggagaagaaggcatatgttcgactggacgtcctgattagcgatgcgtgttggatgttgcgcaacaaaattgggatcatctaaagatgagtccagctgcctaattctgaatatatatatatatatatcttttgaccataaaaaagacacaggatacataaatgctcgcaggccactcgttttcgcgggttgctgcgaccaaacgaacttgactcaccagtggtcctcgggtgccatgacacggtgttcactctggacccaaatttctgtgtgtccacaaagtgaggaaaaccattggcaggacacacgcttattatagcagaaaaccgagtttgagaatgcacgaaatagaagcccagttttggcccgccggcattctattcaacggtgtcgacaaaacacggaacagcgaatggacttaattggtggcgtcggatcaactcaaaaacaacaacgagacaaaacagagagggcactcaacaaacactatgctcaagcgctacatgaaacatagaaacatagggaaaaaggaaaaagtagacaacaaagcgtcgaaagaaacgaaacgagaacaagtgacagtacacacgagatgacagacgtgaaaaacaagaacaacggacacagagaactacatacgacggatgaatccaccgaccatacgaaggagaggacacgaaaccaaagaagaccgagaataaaaacaacgagtagatgaccgacaccgacacaactaaaatagaaaaacacgagcacagaggcgccaacacagcaagacagcccccagacacacaacagcaaaggaaaacaaacgaagagaaagaccagggac

SEQ ID NO: 561397 - DNA, 340 bp, Homo sapiens
  misc_feature (321)..(321): n is a, c, g, or t
gacgtaggactgattgaactcaggaggttgaggttgcagtgagctgagatatgccactatactccagcctgggcaaaaagggtgaaactccgtctcaaaaaaaaaaagaaaactcagtttacccaaacggcccccactcttcatattattaacaacagtcattattatcaattatggcactctggcttcagaagccaggggcttaactcatgggtttctaactctttacaacaggccccaacaggggcaagtatatagtttacctaacttttcaagaggcttagacagggttaacgctaacttccccacgggtcctaggtnctggataggacactcttgg

SEQ ID NO: 561398 - DNA, 93 bp, Homo sapiens
agaggtctacatgtgggtggggacccagactagccaggtggagatcaagctgagcctgaaggcctgccaggtatatatccagcacatgcggtc

SEQ ID NO: 561399 - DNA, 588 bp, Homo sapiens
  misc_feature (549)..(549): n is a, c, g, or t
ctgttgggttccatctttatacttgacatggaaggaaaccaggacccagagctgctgaacaatttgcccagtcgttcagcagctcagtagcaaaccaggattcctctgctgctcagggatagtgggaggtggaggctcagcgtggaagatccacagccccgcacgccctctttgtgcctcctcctgctgtctccatgttgggtgttagcaagatgaaacatgttgggtgtcttcttcccccgcaagccccagccccagatccactctccacccctctcctttcttctctgggcctccagaggctaaccttgatgggtttcatcagcaaggacttttctttgctttggccaagtagaggaactggtaggagataggaaggtgggaagagatgagatgaggtttccatgggttggctgtgtctgtacccctagcaaggccacagctgctgtggggctgcctctcccgtggctgcagctactgtctccgtggtccaggaacaacactccctccccttcaggccccaggtggtgacagtcctggctgtggcanccctggtgcatagactcccttgttagtttcctataaaga

SEQ ID NO: 561400 - DNA, 347 bp, Homo sapiens
cacatgtgaaatacagcatgagcgagaccacactcaggttctgccctctctgacccagtttacctatggcctttgtcacattgctgcagggtctgccatcattcactcacctgttcaatgtccccacctcatcctagcacagcagatataatccatcgactctactcccgaaacatgcccttctcataaccacataatcgccacagccctggtccaagccaccgagaggctctgacctggaacctggtgacagatgcctggcttggtcttgctgacccaaagtcaccccctacagactgtacttttgcttatgatttcctggcctcttcgaatctgggaggaagata

SEQ ID NO: 561401 - DNA, 353 bp, Homo sapiens
ccccatggaatcccattcagcactgtaaagaaatacgctatcaagtcataaaaagacagggaggaaacttaaatgcatattactaagcaaaagaagctagtctgaaaaggctacatactttatggttccaactatatgacatgtcaaaaaaaaaaagcaaaactatggggacaataaaatgatcaagggttgcctgagaattacggggaaggaggggatgaataggtggggcatagatttttaagggtagtgaaactactctgtatgatattataatggtagatcattgtaaattggcctaaactcacagaatatacaacattctatgatttacccctaatgtaagctatgaa

SEQ ID NO: 561402 - DNA, 1031 bp, Homo sapiens
  misc_feature (72)..(73): n is a, c, g, or t
  misc_feature (79)..(79): n is a, c, g, or t
  misc_feature (225)..(225): n is a, c, g, or t
  misc_feature (238)..(238): n is a, c, g, or t
  misc_feature (285)..(285): n is a, c, g, or t
  misc_feature (334)..(334): n is a, c, g, or t
  misc_feature (382)..(382): n is a, c, g, or t
  misc_feature (384)..(384): n is a, c, g, or t
  misc_feature (390)..(390): n is a, c, g, or t
  misc_feature (401)..(401): n is a, c, g, or t
  misc_feature (407)..(407): n is a, c, g, or t
  misc_feature (416)..(416): n is a, c, g, or t
  misc_feature (436)..(436): n is a, c, g, or t
  misc_feature (457)..(457): n is a, c, g, or t
  misc_feature (464)..(464): n is a, c, g, or t
  misc_feature (468)..(468): n is a, c, g, or t
  misc_feature (472)..(472): n is a, c, g, or t
  misc_feature (490)..(490): n is a, c, g, or t
  misc_feature (523)..(523): n is a, c, g, or t
  misc_feature (531)..(531): n is a, c, g, or t
  misc_feature (534)..(534): n is a, c, g, or t
gcatgctgagctggttactgccatggaggggagctgagatgtgtgtggctgctctctgtgagaggcccaggnntgccancagtaccgcaaggaccccaaagagtgctgcaagttcatgtgtctggacccagacgatgatgcttttgagcctgtggaggtcagctgccagcccctggggatggtgggagtgaaggtgcattactccggcgcctggagcagctctgnccactgcgggggnctctctggcagacctggaagactctgccgacagcagcagcgccctgntcgtgcccctgaccctgccagagcgggagcaccccagctgcagaggcanttgcagggggtggcgcacagcgagtccctcaatactgtggtgtagacngnctggcntgtaccccaancggtcntgggagcanctgtctgttgtagaaaacancggtccctggggagacttganaggcccntgtnccangctggacgccagcactgncgcacgtcactggcgggctcgcgtgtgtacatngagaccanagnccgccttctgccagaagaagtgatggcctgcaccgagcttccttgagggcttcagaaacatgcatagcttggatcactgtcttctaccttataaaatggcgcaagagtgacaaattcattcagaccgccaatgttagacgcagggaatgacgaaggtactgtgggccatggcaacctgatgcgtatggtgggtaacttggtgagatgttctgtcagagagaacgttgtgaccaagttgggaacgtgacctgtgggagtgcacggtgcctttgagggcgctatgaggtgctttgaacggaggtttggtagagtggattgtacggagggcctctcattgtgaacggctgagttgatgtccgagggtgtgatataggtgacgtgcgtgggatccgtgtttactacttaagagtagagggtagaagagtgataggaggaaggaggtacggggcaatgagaataatggggcataaggaactaagacgtaggggtgtttttct

SEQ ID NO: 561403 - DNA, 328 bp, Homo sapiens
ctggtgctctagacggatctttgtacgaatactccatgagatccctttttagatgccacgtgcatgaatgtaggatgcccagctttttactgagtgcttcttcggtacggaggtctgagctgatagtggggacggggattgcgaggaagaatgaggtatgttcctcaagggaactgactgtctccctgggaggtgaagacatctgtccacggaaccacagaactattcgaagctgtaaccaagtgtagggggctgatgccgacagagcccctgaggggacacttttagagtgagcccttcatgggcagcatctgcaggccgcgaaggc

SEQ ID NO: 561404 - DNA, 150 bp, Homo sapiens
gggccccccaggtcagcttaatttttttgttttgtttcttaagacagagttttgcttttttgcccaggttggagggccgggtcgcaatttcagctcactgcaatttttccctccgggattcaagcatttttccttgcctcagcccctcca

SEQ ID NO: 561405 - DNA, 398 bp, Homo sapiens
  misc_feature (28)..(28): n is a, c, g, or t
  misc_feature (64)..(64): n is a, c, g, or t
  misc_feature (253)..(253): n is a, c, g, or t
  misc_feature (280)..(280): n is a, c, g, or t
  misc_feature (286)..(286): n is a, c, g, or t
  misc_feature (299)..(299): n is a, c, g, or t
  misc_feature (305)..(305): n is a, c, g, or t
  misc_feature (375)..(375): n is a, c, g, or t
  misc_feature (385)..(385): n is a, c, g, or t
cccacaataagttaataaatttaaattnaaggcccattaatataatatgagtgatgttttgttnccgtttttgctgaaactaaattggctgtcaaaaaatggacatgtcccagagaggcaaatccacagacagagagagaatagatccgtggcttcccaggggctggggaaggaaagaggcatgacgggctaatgggtatcaggtttctttttggggcgatgaaaatgttctggaattagacagtggcaatgngtgaatctacttaaaaatcaagggcanggtgcnaagcgtcacgccntgtaancccaacactttgggaggccaaggtgggtggaatgcttgagctcagaagtttgagatcagcctggggaacnatggtgaaancccaacccttaca

SEQ ID NO: 561406 - DNA, 601 bp, Homo sapiens
ctgtgtgggcccgtgggttcggtgttgggctgcgggtgctcgtctttcgtgtgggttttgcgccctcggttgtgggcccgattgcttgcgtttggttgctccgcgtggcgttgcaaggatgtctttgttgtgtgttctctggtgaatatgcctctcctttgggagttggttacaagttggtaacatttatgggagatttttttcccccctcgcttccaaccccttttgaacagagttatataaacggtgtacagatcacccgttgtttaaaattatgtgcgctcgagctgtgatatctgccctctctcgatggtttttctcgtagcacgattttagcctgccagattcatacgtttattttattcttgggcgagtgtccgttctgtaaccgccccccttcttaatcactcctccactgcgctagaagaatgtcggtgcgatattctctttttgtgcgagaactagggagcgcctattatcccacactgtctaaagagagtattacaatggcgcgagagagaacacccccacgttttagaagttataggacggtggcaccacacacagtgcatacaacaaacataatcattatacaaaacat

SEQ ID NO: 561407 - DNA, 154 bp, Homo sapiens
caatgtgtgttaagtcccttgtttttttttccaaatgtgccccctcaagttttaagctggccgggcccactcttggctccttggtttgtcccggcccttttttggcttgggtttcagcccccctcttagttggtgccccccccccccgagatta

SEQ ID NO: 561408 - DNA, 1353 bp, Homo sapiens
ggcgcgtggacagcgcccgcccgagcctgccccggtgtgctgccccgctggcttgtgccccgctcggacccagtgtctgtgccgttccactccccgtgctggagtgccccgtgctggactgcctagatgctggtgtctgcaacttgaggcgttatcctgctgggcctggccgtggggaaggtggcggggaggaagaagaggctggtcgggactgctgtgacatgtgagcattctgggaatgattcttactggtgccctttcactgctggtgcctatgtgacggagaaatgccgcgcgaaaataaaaaccatcccccagaagtaagtttgtggccggaactaagtcttaaactagtggcgtgtacggacttgagggacaagctctgaatactgtttcgctagtcctgtaagggccgacaagtgccactgacagacagacaccttggactgaaggaaggatcccgaagatacatgatgacatggggcttacatcttgtgaactgagtcgactttccaaatggctacaggcagaagaaccaggaaagtggtcaaacgacctgttatgcaacgcacaacctagaaccttagacaaaaagcacgatgcaaacgaaagattgcagcacaagagggtagaaagcacggtccataactggcccattgtcctcacccggtcctgtacgctgcaccgacgccgtcggccttcctcgcactgttcgcacccacgcgccactctgccccggtactaaccacgatggcacgcgctcccgcgtgtgcattgcgccgccgcgcgtgcgcgcctcccgcggccagcggcgcccctgcacccacccccaaacgcgtgtccacccgccacacggaactcggtacgccgccctgcccgtcgccccccaaggcccaccgccaacacaccgcgcgagtccacggagcccgaccaaatacaccctcccccacacacccgagagcacccctgagacccaccgcgcagagcacacagaccggcgacatgcccacacgactacgcccgggccggatcaacaggcgccggagcccgccaggcacggccaacaccaggcggcgcaccgcccccggcgccgaggagcgggaccccccacgacgcaccgaggaagaggtccacccgcacgcgcacagacgagacaggcgggaagggggcagtaggatgagtaggagagcgatattactcaggagatacacagaggggtactcaagtgtgagcaaggcacagggtgcaggagccgcggacaggtaagataagaggagtgtgcacaggcagtacatagtgacagagtagtagtcgaggtaatatagcaaattctgtcagggtatgatctttggg

SEQ ID NO: 561409 - DNA, 203 bp, Homo sapiens
tgaaacagaagagaagagatgtatactattatgacacaaacacgaggtaaagagggcaaactagacatgtaatgcataagatgcaggaaaaagtgcagagcataaactataacccttttgaccagaaactttatgtctataaccgatggttaccttctgaacttatgactctttctggtctcgcaggaagccccaggtaagct

SEQ ID NO: 561410 - DNA, 843 bp, Homo sapiens
ctgttttcagaacttccccagctggataggttattaccagccctcttttctgaactcgatgttaattgtcccaatgatctattttgtgaccacatattcttaacacccgttacacttcccgccctggccccctttatagggatggaattttgattggaccaggggcccacgataaggtgtagcaggaagagccacttcttcaaagttcaggcttcttggtcccgacatttccaaagttgtctatgagggacattttaaaagtgaaattttatttttagaccattgccttaaatgtttatttatattgactatggggacttttggggcccccctaaattttgcacttgaaatgggatccccacctgtgtcaccccatagtcccgcctggttttaggatgcgggattgaggccaaggcatcaggccagtatatgaagccaaggtttattttttggtgtcccgattatccatagctccgtcatgaaatctatgtctttctatttttctcccttctgccatagtccctgcctcggctcatcagcccatttagctcctagaaagctggggtcatctcgtattccccagcaagtaccccagcaccagtgccggttcagagcaggtgctccacacacattcctgggatgagaccagcaccagaaatggctctcgggagcctcggatgctgctgggagtaagtgatcccggaccttaccgctaagaggagaaactttttttcaaagcatttattaatactccctccacccctcactccaccaatggggtgatcaacacttactgcttgctcttgttctgctaatgattaaaaccactttattttaatttga

SEQ ID NO: 561411 - DNA, 824 bp, Homo sapiens
  misc_feature (32)..(33): n is a, c, g, or t
  misc_feature (303)..(303): n is a, c, g, or t
  misc_feature (425)..(425): n is a, c, g, or t
atataaaaggcgccccctcaaaaaaagagaanntttttttttttaaaaaaaaggggggggggggggggggggggttaaaaattaactccccacccaaaaccttctttaacccagcaaaacttttttttttttttggggcggaaaaaaaaaaaaaaattttttttttttttctaaaaaaaccccccgccaaagaaaaaagaaagcgcccttttcttattgaaggaaagaaaaagcccccctctcccggcgaggagggggtgtttcccctccccccgccggctgaaaaaaaaaaaaaggcatttnggttttttttggtgcctccccccccccctttttataaaaaaaattttttaagggggcccccccccctttttttttttaagggggcgccaaaaaaatatatctcaaaaaaaaaaaaaaaaagngggggtttgtttctttataaaaaaacacaatattatgggtgggagagagaaagagggggggggaaacacaaacaccccacccccccgccaaaaaaaaaaagggggggttttctcccccccccccaaaaaaaaggggggggggaatattttttttggggaaaaattttttcaaaaaaaaaagggcgccccaaaagcggttttttgtgggaaattttcccccccccaaaaagaaataaaatcttatatggtggggggcaaaaaaaagtttttttttttcttaaaaaattccccccccaaaaaactttttttcccaattcggaagggatatgggaaaacaatttcaagcccattccatcagtggattggccacgtggaactcttatttttttctggggccga

SEQ ID NO: 561412 - DNA, 110 bp, Homo sapiens
tatgtactgtcacgtgggacgttgacggacctggactaccggcttacccaccactcctatccactttctaacgactttttctaccacgtactgacgttactcttactgtt

SEQ ID NO: 561413 - DNA, 179 bp, Homo sapiens
tcttaacaaccagctctttgcacctggatggcgactgagctggggcaagggcagcagcggagtgctcatgagccaagccctcagacgcagcatcagaagctgctcacccagcaaccagaactttgaatcgcttctcagcccttcaacaagcagtacccacagaaagcacagataataga

SEQ ID NO: 561414 - DNA, 854 bp, Homo sapiens
cccccctgtgggtgcccttctgccacccgcgggtcgagttctccagttttccgcggctggggggcggcgttaccccgggccaattgtagccgcgggctctctaaaaccaactctttttggtctttctattttcgtccccggttatattggctttggaaaggcgctgacgccccttttcccccggaatggcccgagggagtaaggcgcgcgaggtgtcatcacgcgtttttcctcggagagtgccgcaaccacggcgcttggcggccgccgcttcttttcccgggagacatccaagagaaccgccccgcgctggagtaatggaagttgggggttagaaccccctcccgaccgcgcccgggttacagacgtgccccatgggccccctggaagagaaaaaacgctgtgacaccacggcgcccctttggaattcttctactgcccctggggtcgtgccccgcgcccggacgagccccccatcttctctggtgacagcttctcctggagacaccctacactttctcctatgagtgaaggagaatgtaaacgctttattccagaaaaatgggagaaaccacccccgagcccaccctcataaccacagtggtgggtggccccgagggctgtggctgggcgagataatctcttcgagaaagcgtcacactctcaggccccgagcttagaggccctctgagaggcccacagccgagactttttggaaagggccccctgccaaatatataagggcttctgcctaaagcctctccctccacaccccacatatggcacgcttttttaaactatcccaacacaaccctgggcccaaagggaaaaaaactttttgaaaccaaaaaaaa

SEQ ID NO: 561415 - DNA, 129 bp, Homo sapiens
cgcttggagttctagcactccattgtacaagctctagacagctatgatgcagtcccacaacgcgccagcatccccagcgtctgggattccttgtttctgctcctgtggcctccacgagcccgcgaagag

SEQ ID NO: 561416 - DNA, 312 bp, Homo sapiens
  misc_feature (3)..(3): n is a, c, g, or t
  misc_feature (10)..(10): n is a, c, g, or t
  misc_feature (19)..(19): n is a, c, g, or t
  misc_feature (36)..(36): n is a, c, g, or t
  misc_feature (63)..(63): n is a, c, g, or t
  misc_feature (65)..(65): n is a, c, g, or t
  misc_feature (80)..(80): n is a, c, g, or t
  misc_feature (159)..(159): n is a, c, g, or t
  misc_feature (163)..(163): n is a, c, g, or t
  misc_feature (166)..(166): n is a, c, g, or t
  misc_feature (173)..(173): n is a, c, g, or t
  misc_feature (189)..(189): n is a, c, g, or t
  misc_feature (192)..(192): n is a, c, g, or t
  misc_feature (195)..(195): n is a, c, g, or t
  misc_feature (212)..(212): n is a, c, g, or t
  misc_feature (216)..(216): n is a, c, g, or t
  misc_feature (264)..(264): n is a, c, g, or t
  misc_feature (267)..(267): n is a, c, g, or t
  misc_feature (285)..(285): n is a, c, g, or t
ggnagaggcncttaatctntaaccccccaagggggnaataactaagagattcttcctaggggnanctggtggttgtgccntttgtaggctggtccctttgccttaaacctgaagatgtccccccaagcctgtgggcagcatgcccagattcccagaccntaanacnctgtganagttgtccctgttggnccnctntgtttagttgcaaggantttnccatgtgtggtggtgttttttgttactgttttaaagggtgcccatttntgntcagcattgtgacttggngataataaaatttagactataaacttg

SEQ ID NO: 561417 - DNA, 244 bp, Homo sapiens
  misc_feature (13)..(13): n is a, c, g, or t
  misc_feature (35)..(35): n is a, c, g, or t
  misc_feature (87)..(87): n is a, c, g, or t
  misc_feature (207)..(207): n is a, c, g, or t
tcccctttctcgngaggctccccaagaccctggcnatgggatggggctgggattcttctcttgtgaatccatcccctggctaccccncaaccctgggctaccccaaacggcatccccaaggcccaggtgggggccctcaagctgaggggaaggtacgaaagctccctgctgggaggcctgggacccaatggcacaaaggccaggcanggcccggaggctgtgggtggggccctcaaagtggggg

SEQ ID NO: 561418 - DNA, 158 bp, Homo sapiens
tcaattgttggataatatttaatagccaatgcaactaatccagatagaagaccttactctctggattagttgcattggctattaaatatttatccaacaattccagcaccgtgatgcaggatggatctcagctcggactccactttctcccgatagtc

SEQ ID NO: 561419 - DNA, 352 bp, Homo sapiens
tgaccacctgtgttagttgtgctgataccacatacggaccaattctaggatacttagtacgagactgttacactactacttatggtcttaccttgggattgattctttaccttgatgtatatttaatgggatggagtctcgctatgttgcccaggctggccttgaactcctgggctcgtggcaatccttctgcctcagccttcccagtagctgggtcactgtgatgcatttgacattgacattctgtgcatgtgtcacagcacgcagccagcctgcacgagccaagcaccagcatggggcagcttttgttctgcagacacattcgtgcccttcactgaacttgggtctggct

SEQ ID NO: 561420 - DNA, 112 bp, Homo sapiens
gcgaagaggagatggcggagtcgttgaggtctccgcgccgctctctgtacaaactagtgggctcgcgccttgaaagaggctttccgcagagatgtctgagagattgagaaca

SEQ ID NO: 561421 - DNA, 514 bp, Homo sapiens
  misc_feature (1)..(2): n is a, c, g, or t
nncatgagaaaaattgattcttccaagaaaactggacaccaagggaggggtggtttggaaacagaataggtgcccctgcctttccttgaaaaacagtgtgtagagatggctgagtgcaatggctcacacttgtaatcccaacactttggaaggctgaggcgggaggatcagtatatcggtacgtctgagcccaagagttcaagatcagcctgggcagtatagcaagaccccatctccattttttttttaatgattttttaatttaaaaaagaacaacaggatagagctgttgggtggcacagtggcccaaaagcagcttagagaaaattccttggtctatgacccctgttaaactcaaaatacagtcggacttgatacatcatttgtaacaattgagaaaagaaaaaagtttggttgggaaaacgatttggatttgggtaaaaaaaaggaccaagctttttgtctgtaaacatgggtgaaccgggggttgtggaaaaggggacactggagagca

SEQ ID NO: 561422 - DNA, 263 bp, Homo sapiens
gttctgtctgacggcatagaatagaatagctagagtagaatagaacacagtagaatattttagaacagattagaatatattagaatagaacagaacagaacagaatataacagaatagactgaacagaatagaacagaatatcctagaatagaatagaatagaacagacgagaacacaagacaacacaacacaatactccagactatatagaatagatcagaagcgaatagaacagaatcagaacgtaagacattaccgcggg

SEQ ID NO: 561423 - DNA, 329 bp, Homo sapiens
tcggccctctctgactcccagattcccgagtggatgggactgcaggcgccgccaccacgcccggctaattttttgtatttttttagtggagatcgggtttcaccgtgttggccaggatggtctcgatctcctgacctcgtgatccacctgcctcggcctcccggagtggtgggattacaggcgtgagccaccacacccggccaaaacttggcatgtttaattgctggcaggggggagacaggagaaagaggctgaagactgagtaggtatggcaggggatgtgcagcggcttgggggagagctgaacataggtcgaggggtctcagata

SEQ ID NO: 561424 - DNA, 141 bp, Homo sapiens
tgcagtccaaagcataacatcatgagccactggttttcccgataagcacacagaaatatcctaacaagtaccaccattcaacacagaacacggaggttacctcacggtacagagagcaggcacagtctgagccctgtaggt

SEQ ID NO: 561425 - DNA, 411 bp, Homo sapiens
  misc_feature (16)..(16): n is a, c, g, or t
  misc_feature (39)..(39): n is a, c, g, or t
  misc_feature (118)..(118): n is a, c, g, or t
  misc_feature (333)..(333): n is a, c, g, or t
  misc_feature (389)..(389): n is a, c, g, or t
ccgaccacccacctcntcctggctcagctcggtgatgantaagtgctgatggtcttggtcccagccagggtcgtgggggcggccactctctccaaagcatagtcataggtgtcatganaaaataccaaatgtaagagaacctccaagtcagggcgcagtggctcacccctgtaatctcagcactttgggtggccaaggcgggcagatgacttgaggtcaggagttcgagaccagcctggccaacatggtgaaaccccgtctctactaaaaatacaaaaattagtcaggtgtggtggacgcctgtgatctcaatctcagctactcgggaggctnaggcaggagaatcacttgaacccaggaggtgttgcagtgaaccaagatcacaccantgcactccagcctaggcaacag

SEQ ID NO: 561426 - DNA, 245 bp, Homo sapiens
ggtatgatctgggggccacaccctgtgccggtggcctctgggctgcctccgtggtgtgaggcgggcttgtgctcatggcacttcctccttgctccaaccctgcagcaggaaggctttcctgaaacaccagtttatgtaaatattcttgcaagttgttacttaggagcctgggaggcaggggtcccaatgctccagacttgttgtccgagtgtatataaatcgtggggaatgccgcctcggatgct

SEQ ID NO: 561427 - DNA, 131 bp, Homo sapiens
acaggctgacgggtccccaggtgttcctggtgattctcagggtcgaaggtcgacggctgaccagctctgacagatttctaccactccaaacgccggctgatcttctcgcaagaggaagctctaatccgccc

SEQ ID NO: 561428 - DNA, 125 bp, Homo sapiens
ggactcctcaagcagtagtagtgagtcttattacaattcactgtaagacaatatacagaattgaatactgtagaattctgtttctttaacagtagcagggaaatgtaaactacaggtgacaaaaa

SEQ ID NO: 561429 - DNA, 164 bp, Homo sapiens
gccatgcaacaagatggaactatgagcatctccccattatcatgcaggcaatcaccacatttgttggcatcccaacgatgccaaatggatagacctcacctttcatatcgccctcctccacaatcttcctaggaacaacatatgacgcactctcccctgaactc

SEQ ID NO: 561430 - DNA, 702 bp, Homo sapiens
  misc_feature (640)..(640): n is a, c, g, or t
tttggctcgatttattgatacttaagggccggggaacacgggttcagtaaaagggaagccctattctccctaatctgtatttgtgggcgcttgcggttgggcaggctagtctaaggaggacgataagtataaagatccatcttgtcatggtggtggtataaagagaaaaggataaatttatccttcaaaaatcatatgtcaatctatagggggagggggacttggcgggggcggggcggaggggaagatagaaatgagcaaccttattcttctcccctcaccgctcgggcgcgcgcgggggggcgcgcggggcgggtcgctatcattggggcgctggcggttttcagcataaatataaggtcacccagcggtttcgcgttcctcggcgaatttttttctacctcaaaaacccaaatccactccttcaatgtccgctatgtcagttgcgcggtttgtgagcgtatgagagaatagatggcatcgcgttcaagagcctggaccgtctgtttcctcactccttacctctcggtaatcagggccgggatggggatgtattagagtcagaggaaggagttaaggagatcaataaggtgtactaggagcctaagagagtgttgtgcatcagcggtgaagggaggcnagggagatacgtatattgaggcttatgtatgctcgaagcaaggagacgagccgagggagcag

SEQ ID NO: 561431 - DNA, 1340 bp, Homo sapiens
ggggcggggcgagaaaaacaaagcatagtagctcattcctgtaatcccagcactttggaaggccgaggcaggaggatcactggagtccaggagttcaaggctagcctgggcaagcactaagacactgccctttacaaaccaaaaacaccaacacaaattttctcccaggcctctgcgcgggctccagtgccgcgcgggcccctaagctacctctgcggcagactgtggggccccggcccttctctggcccttgcagcccccctcgcacgcgttccaccccccttgcccgtcgagccctttgcaccgtggtgcccactggcctgctctcccgcccgtggcgcccttcccccgccctcgccccccttgcccctcgcttccccacaccccgctgagcttccccccacccgctgcccacttgacttccccattagcgcccccccaccccccccaccccccgtcagcgccgccccccctcccgccccaccccccccgcgccctccactcgcccccactcccgcggccaccaccaatgcccacctcttctcaacattctcactacctccccccggtctcacccccccttcactatggcactcctctccacgtcacccgctctcccgcactcccctctataacgggggcgcatgcccccccccgtccgcggcgccaccgcggcccccttccgcgccccccggggctgctttgcctaccggccttccccgttcgcgcgcgggtttctcttctccccccccgcctccctcttctgtgccgtccctctccgcgcgcccccgtcttcctgtgccgccctcccctcgggcgcccccgcccgtccccgcccgaatcttccacggcttctcttttctcccctcccgcacccccccccccccccccaccagtggcgtccctccctctcgtccccccaccctttcccccaccggcccctctctctcccaccaacccctatcacctcaccagaactccacctccactacctccacccctcccccaaccccctctttccccctccactatcatacctcatcccttccacataaaccacaacgaaactaaaccactcccccatactaaccatccacaccgcacctttcccccccccccacaacccaccatacaccaacatcaccatacaacactcactactcatccttccctcccccacccccccacccaccatgcctccaccccccactccccctctctcccctcccaacactatataactccacactacctctccaccacaccacctcaatcggactccaaaccatcatcgaacccaccccactacacacacacaaccatcctccccctaccgtcaa

SEQ ID NO: 561432 - DNA, 2081 bp, Homo sapiens
  misc_feature (2081)..(2081): n is a, c, g, or t
gtgtgaagcttgaaacctgtgagcctggtcctgctgtgtgctgtgctgtgtgactgccgtgtggtgcctgtgatgtgtgtgctgctgctgctgtgctgtgctgtgcactcccaatgactagtttaagtgctgctgtgatgtgcatgctcatgtgctgtgtgcacactatctgatctctgtgagtgatgctgtgatgtacagcttggtacttggtgtgagctgtgtttgaagtctgtgcatgtgatgtgctgtgattgtgctgcatagacacttgtcaatgtgtgcctattgccatgtgcacaaccttgtgatggagatttgattactcattgagattggctgtgaagaccatcatgatatgacacacagagaacaccctggatgaggtgaaccgttacattggttgacataccctgacaggttacatcaaaagaccggaaagacttctagcctggcttgatcattcctcagcctaccaacttccaacatacgaaagactactagacaactggcttgtagccacactttgagatgacactcataggacatgtggtttggcaccatacgcatggttactatgcaccatcatggtaccacggaaatgtactttcccaatggcccccttgatgctgtggttttgaataggcccacgccgttttcagcacgatagaagacatttccactatgaagaacataagagtaggagagaattcacaaaacggacgaagaggttattataatgaagtatcctacccgaaattgtgtggcgaccatatatggcaatttataataagcctgtttgtggactagttattcattaacacaaacaaaaatttagcagagacaataaaatctatgttggggaagcaagaactagttacaacaaaagacagcatatatggaacatatacaggaaaaacagccaaatgggtatatgaaccgccaaagagagataccgcgacaatggagatcaaactggtgtagcattagcagagattgagggcaaacggattaggacattttccctttaccaaatggatggcccccaggtcgcaatggtgaccatgtgagccatgtgatggaaaagcgtttcaattttggtataagacagagaaacggccaccaccgattaccatgttattgggacagccgttatgcgtcaaacacatctatggcggtccgacatcagtttcgacttatgaactcagcgacaaatcgagcacgcagtttcacccccccgagacaagaggaaacagagatcagtggaccgcaccactctacatgtgttgagacatgaacgcacgattccaccgtgggcgaacaacaaagaggcacccgatttggataagagagcagggcccagcggatatggccggatcatcgggcacactgtaggcagcacagaatgaggcgagagcaacaggcctggacacacagagcgacaactgacacaggacagcgtgagcattaaggagcacgaccgaagagagtacgaacaagtagtagaaagggttaccaggaagaaaacggtaacgtacgcaacgcgtatggccaacttcctcagcgatgctacaggactacgctgaagagtactccaatcacaaaattctactacaataacgataaacacacacaaaatggagtattgacatatcccacacaccagatcaacactaactccaacaactactagagtatctattaaaacataataaccaactaattctgcgacacgcaacaagatctcagcccaaaactaccacacttaataatcattaataactagacttcacccgaatcacatcataaaacatatcacactaacaaatagtactaccaacatatatatatcaaatagacataactccaagcaatcaacaaaaacaacactatatacagatcatccacaagattacacatacccactcatcaatactcaacaattaagacaatatacatagtaaaatacaaacataattacatcaaatcaatccatagaacaatgttacaactaatacaatacgaaacaacacaacataccacacgacatctctatcatcaacatatccccaaaaatcatn

SEQ ID NO: 561433 - DNA, 252 bp, Homo sapiens
gctgctacagagcgaaactacgaacgcatgctgccatgggtattccctcgccgagcgattggcgtaatccaaagaaaaagccagccacaaccgctgatgctgaccgtctataccacgtcaacccctccttcgtagacctactgccgtgggtagattacctgcctgcagaaaaagccatgctgttggaagacggcgtgtctcgtgctgccttttttgagctgacaccgatgggtactggcgattagggttagt

SEQ ID NO: 561434 - DNA, 1447 bp, Homo sapiens
  misc_feature (1447)..(1447): n is a, c, g, or t
ggttcgtgcgggctggttggcattgagcgggaccgtgagctgaggcaggaagagcctggcgccatggtggagaagtgaggaggctggcggcggcattagcgaggagtgaggcggcacagtatgaccgtgcagatccgcctgtggggacttggaggcccagaaacggctgcgggcctctacgaggtgcttctatgtctgttgcttagaacaggacttgtgggctgaaattgccaagaatctacatactatggcaggagtgaaaggactgaccatgctggatcacgaacaggtaactccagaagatcccggagctcagtatctagcttacgtactgcgtctgttggccgacatagggctgaagcctcttatggagcgagctcagaatctcaaccccatggtggactgtgacggtggacactgcaggatatacgagaagacaccagagctcatctcatcactacaatacacagcatgacatgtcgatgctcatgacctcatgctcgcatccaaggggaatagtcactacaactcacacgatagaccaggactcgtggaccaccgaagtacctccggaatacacggatctcaacacagcacgaacactgactaatggatagccactgcactaccaacaactaatgaccacaaaccataacgacaagccagttccatactctagcatccatgaacacaccaacctaaaaaacatagccacacagtcacaccaccaacgaacaatactaaaacaaactgaccgacaccaccacacaaataactcaccaaacatgtaaaacatacataaagaaaacacaaaatacacccaccaattaaagccgactgcctccaacaaataccacctcgataatacatagaacacaccccatactcaaacctatgacacttagtacatcaacagcacacacacaaccacaacacgcaaccacacgcaacaccagcaactccgacatcacaacacactcagcatacaccacacaacagacagtactcatcatgagtcaccccgaactaacaacaactaaaaacacataaatcataatcatgcataccgactacaaggcagaccaacagatcaggaaaacaatacgacacatttcggcaatgacatatcgaaacagtagcacacacgaaggatgactcagactcgatcaccgaccgcacccagcaccgctagacacgtatccaccgagaccgcgaaaacgccgcataaatacgagatgagaagactactaacagatgaaagtaacaaacacagtcaacaaacgacagtaaaacagaaccacatagactcacatatccagaagaaacgcgaaagctcacagccgcctcacaacccgacacgcgccaactcaagcaacgactgaaaaacaacagcacacagaaacgctcacaagacgaagcatactgtcactactatccaacaacccgn

SEQ ID NO: 561435 - DNA, 682 bp, Homo sapiens
aagacgtcacagccatcatggtggcaggccctaaattaatcacgaaacatctgaagattgaaagttgtaaaaaaaaaaaggggcaaagaaataaatatcaccaaagaaaaaagataaattgtagcttaaatataaaactaaatcaccagtaaataaaactatacagatctaatacaaaccaaaaccagcctgaaagacccaaccttaaaaaatggctaaaaaataaggcataaatctgcataatattgagttttatttccattctctcctttcccctctactatgtatgctttacctgatctgcctctaggggcttacaagaaaacggtttccggtatccgtcttcaatttgacctcaaatgtcctgagcaaagtttttgttattctgctgagggttcttatgttggtaagctttagaacatcattatttctactaattcagtagttttgatcgtagcgccaaatttaaattcttccactggttcttctggaaggaattaaaacttttacagtgccttgcctgcacagtattctgtttttaaaagagaaaacccaagcaaaatctattgcttaaagaggttcttattttttaaacaaacagaataaccttgacaatttaaaacctgggagaaccgtcattagaactcatttcttaccggaagaataatactaaactgtctga

SEQ ID NO: 561436 - DNA, 591 bp, Homo sapiens
  misc_feature (564)..(564): n is a, c, g, or t
  misc_feature (575)..(575): n is a, c, g, or t
aattcgcggccgcgtcgacgtcgacgcgaaccacgcataccaaccgtaaatattcgcggcaaagaaaaacacctgtaatagcaggctggcatacagctgaatctgaaagaaaataatgccaaacaaggtgacgttgatcaggccaaagaagtagttgctgatcttctccagactggcaaggccaatacacagcaacccggcgatcgtgcctaccgcttcgatccatgagagatcataaccgcctgcccctattggtatatgtaccaggatattctgcacactaaatccatctttcccccaaagcgtaacgttacgccttattatcgttatccacgtatgtagccgcaaatccagcatacgattgagcggcaccagcgccctcttctcgcagcctttcatcaacatgaacctcgtgattgcttccttcctgttctaatgcctctgcgatggcctgaaggcattcatggccatccaggacaatgcgcgcagtgcggcaggttgcaacctcaactgcggttggtgctccagtaactcttatctggcaacgctggctgcatttgtagntaacccgattngttgccacatgctctg

SEQ ID NO: 561437 - DNA, 1810 bp, Homo sapiens
ctgtgtgtgtggtctggccgtatgtctatctggcggtcgtgttgtgttgtcctccgtcgtcgcccgcccggttgttagctacgcggcgcggttgtgtctttgttgtgggggcggaattatagtggtgtgatagtgtcttcggtgttgctgtttgttgataagagagctgtgtggtgcgcccccgccgcgttgttgggtagaggtctcgctggtgttaagtaagataggttggtttgtttgtcactctagggtgtgctcgtgcgccactgcctcgtgtggtaattgaatagggggggtcacgcccatcttctctctcccgtggggtgtatatagatagtaagtaaatagcggggtggttgttcatcacccgcggggagataaaaataggagttgatgtccgcactcgatgatgtatccgcccccctccagtaggtgtcttgggtgattaatcccgtgaaaatatagtgatgatgggacgaggagtaagaaaaatgggccgagggggtcgatgtgtcccgccaccccgcgtgggtttgctgcctcgcgtatgagtgaagagaggagagagaatatggtggaaagatcgtataatcattatgttggtatgtctccatcagatgcagcactctgtttgtggtcgttgtttctctttgtagaggtccgccccccaaaagtgggctgccaccacagggggaggcggccccccgtgttgttgtggtggtgttcaagacctcctggtggtggcgctcccctacgtggtagttgtacgcccccctgcgtgtgggttgtggtggtgttttgtgctggagagtttgggtagtatttgtttgttgtttatgcgcgtcgcgcacatctaggttggtggtcggcgtcccccacacgtttgggtagtgggaggatgtctcacgcctactccgtgcgtgctggttctgctggttgttggtggccgcatgcgtcgtgggcgccccagtaagagtaggtgtgttgttgttgtgagggtgtagtagcgcaccaaccttcttgtggtggaagtagttataatagtgggagcatcccgcggcgctgtctggtggttgtcgccccccactgcactggttgtggtggttgaaatcttgcctgccaccagcaagtagttagtagttgttgctgctgctggttgtggcccaccctgcggaagtagtaatagaaactacctgctccacactgtgtccacggtagactcttctgctgcaatagtgagagcctgtcgccacagtagtgttctcacttgtcactccttcgggtgagtatattgttgtgtcgcctccggccgagatctctgtggacacacacaggctcggaagagagaagatagatatatggcctctctgtgctggcccctagtgtgtgtcgactactcctctgtgttgtggaagacccctacgcacactgttagcacagctgccgcacactgtgtctgtgtgagattctcgggggtgtctttccgcagaggccacacagagagcttgggcctcttgtcccctggaagtgtccacacatatgggggcacggtgtggaactatcgcaggttcacaagacacacactcggcgcgagaaactggaatcctcggcacgccgatggaaacccacgaacgcctggtttcgaagaagtaactttttcctggtgaagggggcctttcccgcacatttgggccaaaccttccaattccgggcaagaatttttcaatgttacattttttgccctcccctaactgcctgcccctgcccttcagggaaatgggggtcctttaaggaaactgaaacccagtgg

SEQ ID NO: 561438 - DNA, 156 bp, Homo sapiens
tggcatctagcaccaagtaacatcctttccataaaagttttccaataatcattattgccccagacatcccatccagcaggacatcactcatctaatgagccagtttgtaggccattcatacaacatgtcatccttttcaaatcacactccaacaca

SEQ ID NO: 561439 - DNA, 156 bp, Homo sapiens
ttaccaaaatggttggtgtggtcgctttaaagtttgttttcattttttttctatttttaattcttacgggtatatagaaggtgtatatatttatggggtacatgagatgtgttgaaacaggcatgcaatgtgaaataaataagcccatcatggaga

SEQ ID NO: 561440 - DNA, 517 bp, Homo sapiens
  misc_feature (36)..(36): n is a, c, g, or t
  misc_feature (89)..(89): n is a, c, g, or t
  misc_feature (114)..(115): n is a, c, g, or t
  misc_feature (165)..(165): n is a, c, g, or t
  misc_feature (209)..(209): n is a, c, g, or t
  misc_feature (220)..(220): n is a, c, g, or t
  misc_feature (248)..(248): n is a, c, g, or t
  misc_feature (272)..(272): n is a, c, g, or t
  misc_feature (281)..(281): n is a, c, g, or t
  misc_feature (301)..(302): n is a, c, g, or t
  misc_feature (358)..(358): n is a, c, g, or t
  misc_feature (499)..(499): n is a, c, g, or t
actccttcctttcagacccagtgtccactgggctangagggggtggagccgggaccagccccctaggaaaaggtgtaggaatagaaggnaatggcattggcgctatagtccaannagaggaggtgcccgaagtgcctggaccctaggatggccccacccagagangaggagtgcctcaacttcatcagggtgaagctggagaagaagtnctgggcctggntctctctgccctgggtcagcgccaaaanaaaaccttccttcagccgctcccngctcttccncccagcgcccacgcccaggnnggggagtcccatcttgccctggcacccgcccgggtcactctcgggcaaccctgctncgctgtgtctgcccagcctctccccagccttcctgggggtctggggggggggggggtctccctgctgggccccttctgcctttttccggcccgcccccgccgccctgcctttttccccgtccctatacaggtgagtcagtntccctagccgatctggca

SEQ ID NO: 561441 - DNA, 306 bp, Homo sapiens
cagtgtgagaacattgtacacacatcctggaataccttcagtgactgaacaggcacatcttatgtgcaggtcagagttacatggtcaaatcacacaccagtcacccagttgtctcagccagcccacagtatccaaaagagtctctagtactgaattcagcatgtcatagcttgatgcatcgttcagcaagcaattctgacaagcggatttagatgaactgaggacaaaatcttgactagtttcagatggcatcactaagtgaaagtaaagttattgccacgattccgtcctcagttcatctagggt

SEQ ID NO: 561442 - DNA, 186 bp, Homo sapiens
ggtcgttactagaggatcccgacgctctctctggtggtgggacgcttcttccagagtgcagtgactgccaccctggccagtccgaccctcacagctcagtctgcaccttgctcggctctgcagcctccagccctcccttgctcctctccggggccattttcttcacttgccccacagagagagcgt

SEQ ID NO: 561443 - DNA, 187 bp, Homo sapiens
tacttttccatcaggcacacacatgagggctcgccttcctcccaccagagctgcgacgttctgatccacattgcctggaggctctggagcacaggctttagccgttggtctatttttatttagagatgggggtctcactatgttgtccaggctggtctcgaactcctgtgcccaagtgatcctctcg

SEQ ID NO: 561444 - DNA, 938 bp, Homo sapiens
  misc_feature (8)..(8): n is a, c, g, or t
  misc_feature (18)..(19): n is a, c, g, or t
  misc_feature (23)..(23): n is a, c, g, or t
  misc_feature (46)..(46): n is a, c, g, or t
  misc_feature (58)..(58): n is a, c, g, or t
  misc_feature (73)..(73): n is a, c, g, or t
  misc_feature (95)..(95): n is a, c, g, or t
  misc_feature (128)..(128): n is a, c, g, or t
  misc_feature (133)..(133): n is a, c, g, or t
  misc_feature (137)..(137): n is a, c, g, or t
  misc_feature (206)..(206): n is a, c, g, or t
  misc_feature (285)..(285): n is a, c, g, or t
  misc_feature (308)..(309): n is a, c, g, or t
  misc_feature (339)..(339): n is a, c, g, or t
  misc_feature (348)..(348): n is a, c, g, or t
  misc_feature (364)..(364): n is a, c, g, or t
  misc_feature (382)..(382): n is a, c, g, or t
  misc_feature (390)..(390): n is a, c, g, or t
  misc_feature (396)..(396): n is a, c, g, or t
  misc_feature (419)..(419): n is a, c, g, or t
  misc_feature (453)..(453): n is a, c, g, or t
  misc_feature (472)..(472): n is a, c, g, or t
  misc_feature (497)..(497): n is a, c, g, or t
  misc_feature (546)..(546): n is a, c, g, or t
  misc_feature (555)..(555): n is a, c, g, or t
  misc_feature (563)..(563): n is a, c, g, or t
  misc_feature (624)..(624): n is a, c, g, or t
  misc_feature (636)..(636): n is a, c, g, or t
  misc_feature (641)..(641): n is a, c, g, or t
  misc_feature (749)..(749): n is a, c, g, or t
  misc_feature (759)..(759): n is a, c, g, or t
  misc_feature (786)..(786): n is a, c, g, or t
  misc_feature (802)..(802): n is a, c, g, or t
  misc_feature (831)..(831): n is a, c, g, or t
  misc_feature (863)..(863): n is a, c, g, or t
  misc_feature (889)..(889): n is a, c, g, or t
tggaaaanaacgtaaatnnattnaaactggttttggggcaggggangggtggacagcngggggttttccaaanaaaactgagggaggagccagcncccggccaggtgggagcgggtgcctggccacanacccnatcncaggcccagcttcttcttttccttctgcttcttgcggaccacgtccaaattccggtccttccacatgcncttgcgaacttgaaggggcgcgaccaacaaacttcccattcatctcacgcatggcgcgcacgtagtcgctggggtcctngaagctgacgaagccgtagcccnnagtcttgcctgtacgcttgtaacggatcancttggcctnaaggaaggatgggaancggctaaaggcgcgtccnaaaaagtnaacgtncacctcaatgcccaaaaccccanaaaaaaaccggaagtaatctgcatcccactccancaggctggggtcctcccancagcaccctgccgctgtgcaattcncgtttcaatttctctggcttccccttcttcttgtcttcacccaggggcnctgggaccncaaaaacnaagaggcctgggggtggctctggccgagggggccggggccgaggacgcagggacaggagtncaggaatgcgcnggggnggcaggaggccgcggacgacctccaacgggaggggcaggggctcaggctcgggcaatggcatggccagggccagcggcaggctgggcccaatgactgcggggccagcnggggcacctnctgcccccacggccacagcgcgctacnttcctccagcccagcngccgccgccacccctgcctcttccttctntttcaggcccaaccccaggcctaggcccagcnctcgggggtgctgctggctcttccanagggggcctcagttcagccatggagcccagcgggggccctggagcccga

SEQ ID NO: 561445 - DNA, 346 bp, Homo sapiens
cctcaataatggcatcacggacccagtcatcacaagcagtatgtggcatagtgtgagctcagcgattcatatgggtgtgaactccatcagactctgtggatttctgcaagctatttgagcgtgcatcactcgtgacttcgtctgtaggttactagacctctaccttcgttgcaccttcatgacatcatactagagtggtacgcattgtccgtcacctcacattagaaccttatagtagcatagacccgtacctgtagaatggtgaaataaatgtggagtcagcactatagccgaggtctgtacggcctataagcacacctctcataatcgcggcatccaacctcac

SEQ ID NO: 561446 - DNA, 265 bp, Homo sapiens
cctgggaggacagagtgaatcagagaggcagcagtgtcattcatgcaaagcaaggtcttgagcttcacgaggatgtgcaggaaatgaatgccgtgaggaaagaggttgctgaaacctcagcaggccccagatgtgcttagtgtgaaaaccgatggaggggataccaggagaactgctgaagaacttccaggacattatgcaaaagcaaagaccagaaagattgtctcatcttcttcaaggatacaccttgccaaacatctgtacc

SEQ ID NO: 561447 - DNA, 270 bp, Homo sapiens
tcattcttatagctatacaactatacctcagctaagaaaaacatctctggtgaacactcaacctgggctactaaaaataaaacggaatatttaatgtcgtaaacaagtatagtaaacaccatgtggatttactgtagttaatgaagacatgatacattcaaacaagtatgtatttattaaaaagaacacaaccaaaaaattttctagaaagagacttcacaagaaaaaaatgagcccaaggttcatccctcaatcagaaatcggtcttag

SEQ ID NO: 561448 - DNA, 167 bp, Homo sapiens
atgcgaacctggtgctggttttctgcctcccgccggggctggttcatgaggtagcggcacaactcaccaatgttctgctcaatcgtgcagctgtacttgatacaacagtcccacaaccgggggggtgagaacatctttctaataaccaccgccatgccatgcagcag

SEQ ID NO: 561449 - DNA, 214 bp, Homo sapiens
ggggaacagtcactttgttgagttctcgctgagctcactcaagatgtggttgtttaaaagagtgtggcacgtcctcccccaactctccctctcactcccgctctcaccatgtgacacacctgctcccccttcaccttccaccatgattggaagcttcctgaagcccttaccagaagcagatgccagccccacacttcctgtaccacctgcagaa

SEQ ID NO: 561450 - DNA, 395 bp, Homo sapiens
atctggatagagatacggtgcgttctcagagaatcacacatggtagaagggacagaagtgctccctcaagcctgttttataaggtgctaagcccattcatgatctccaccctcatgacctaaccagctcccacaggccccacatctttattattttctggagatggagtctcgcgtctgtcagccaggctggagtgcagtggcacgatctcggctcactgaaatctccacctactgtgttcaagctattctcctgtctcaggctcccgagtagctgggactacaggcgcgtaccagcatggccagctaatttgtttgtatttttagtagagacggggtttccccatgttgggcaggatggtgtcgatctcctgacataatccagctgccccgccc

SEQ ID NO: 561451 - DNA, 170 bp, Homo sapiens
caaggttttttgttgttgtagttgttttaagtattcttgtaagctctgcttaccacagttatgggaacaaagcactaaagactgatggcaaagtagcaaaagcagtcagccttatgtaaaatcatgtcaacgtctagtttttaaactttttttttttttttttttttttt

SEQ ID NO: 561452 - DNA, 913 bp, Homo sapiens
  misc_feature (913)..(913): n is a, c, g, or t
tacatatagggctaaattcgatcctcattactcaacccttggatgatgatacagagaatgccatgagtagattgataaccactgaaggttgaagtgccttgtgtcatgtaagaacatctatgtgaacacgaagtaggtgcaaatatgacatctgtcacgtgccattcactgccttgcgttgcatcgtgctgtaataatctatggatgaagatataagggctgggaaatagagatgggttccccacaagatgagggacagaacaatttgactattctaaggtgtaaagagtcaagatataagttgacctatcaagaaatgctctgtaaaagagcatatgtatgattatttttactctttgtatgcgcccttaagcatttaaaagtagaatcctaagagtaggaggcataggacgcaaatctggacatcaatacttgaataatttagttttatcataccttggagagctacgcgtcttcatcattgaacagctcgctactagatagaaacttgtccaaacggtatgtagcttgacatgggacttccgtggcaagatggagaacataactgaatcgtgggttcgggtgacgttgccctccagctgggcgtggggaacactaagtcagccagctttatatcccacagaaggccagtggccagtgactgcttgaaacaagaaattcaggccacaggggtgagaatgagcctttcaaacgtaactattttaacacttggaaacatagtgcccaaatttaagtcgggaagagcgaatttcatttgccacgcctttttataaaataaccacattctttacccaaaatttgccctttgttttgtgcccccacgggacattaccggaggggttcgccctccccattttgctcccacattgggtcgccattcctatttgacagn

SEQ ID NO: 561453 - DNA, 169 bp, Homo sapiens
gcgcgaattccaggctgatcaagatgacggcggagaagggacgagatattccagttcgctctccatcgatgtggcgggcaacttggactacaaggagcacagttacgtgatcagctcacggggaggagaaggaggagtgatgacccagcctgggtcaataaacctgtga

SEQ ID NO: 561454 - DNA, 273 bp, Homo sapiens
  misc_feature (25)..(25): n is a, c, g, or t
  misc_feature (230)..(230): n is a, c, g, or t
  misc_feature (232)..(232): n is a, c, g, or t
  misc_feature (241)..(241): n is a, c, g, or t
  misc_feature (248)..(248): n is a, c, g, or t
agagctgcatgtttccttgatttgnagcttgaagttcagagctgtttacccaaaaagggagccaatagagatcttcccaatgaacctcaatacacgatcgtaatactcgcacaatgaaatgttaagtatgattctagacttcactgactatcacaatgatattttctcgatcgcactagtgcacaacaaaatacgatgagtgcaatgtgaaacatctcaaagtaaatcananactgttttnttaaatncatagaaatttgatttgtaataaaa

SEQ ID NO: 561455 - DNA, 682 bp, Homo sapiens
  misc_feature (432)..(432): n is a, c, g, or t
gtctttaaaccctgcgtggtaatgcctgacgcaccgcctagatgcccagcgaagacagggcgacctgctaagtacaactacttgcttaagatcatccaactattggatgatcatccgaaatgtttcattgcgggagcagacaatgtggtcttgaagcagatgcaccagatgcgcatgtcccttcacaggatggctgtggtgctgatgagcattaacaccatgatgcgcagggtcatacgagggcacctggaaaacaccccagctctggagaaactgctgcctcatatccgggggaatgtgggctctgcgttcaccaaggaggacctcactgagatcagggacatgttactggccaataaggtgccatctgctgcccttgctggtgccatagccccatgtgaagtcactgtgccaggccataacactggtctnggtcccgagaagacctcctttttacaagctttaggtatcaccactactatctccagaggcaccattgaaatcctgagtgatgtgcagctgatcaagactggagacgcgggagcctgcgaatccacgctgatgatcatgctcaacatctcccgcttttacttagggctggtctccagcatgtgtacgacaatggcagcgtgtacaaccctgtaatgcttgatatcacgtgggaatcgcctacgccctgttg

SEQ ID NO: 561456 - DNA, 341 bp, Homo sapiens
  misc_feature (132)..(132): n is a, c, g, or t
gcacacacctgtaatcccagctacttgaggctgaggcaggagaattgcctaaaccagggaggcagaggttgctgtgagccaagatggcgccactgcactccagcctgggcgacagagtgagactccgtactncatctcaaaaagtaactttatctttgaaaggtacaacattctgagagtgaggcagatctaagagatcctaatttaagccagataggccaggaaattattaagaaggattcaacctaaggtgtaaggtgttaagcatgtgcctgtcatgtagcaaaggcatgagtgatggttgttgggttttggggcttttttaaggttttattacttct

SEQ ID NO: 561457 - DNA, 227 bp, Homo sapiens
acatacatcttctacctactcattagtttgaaaaccttggatgatttgatgaggagtgatgaaaatcctggctggctgagcaagactggcacttgttccagccattagtgagttgaagccaaagccctataggtgactcactgagtaccatggttcatgtactcctctggagatcttgcacgtatctgttttcctcccccagtgaactagaaaaccacttattccca

SEQ ID NO: 561458 - DNA, 841 bp, Homo sapiens
  misc_feature (72)..(72): n is a, c, g, or t
  misc_feature (120)..(120): n is a, c, g, or t
  misc_feature (123)..(123): n is a, c, g, or t
  misc_feature (129)..(129): n is a, c, g, or t
  misc_feature (160)..(160): n is a, c, g, or t
  misc_feature (179)..(180): n is a, c, g, or t
  misc_feature (208)..(208): n is a, c, g, or t
  misc_feature (238)..(238): n is a, c, g, or t
  misc_feature (250)..(250): n is a, c, g, or t
  misc_feature (261)..(261): n is a, c, g, or t
  misc_feature (264)..(264): n is a, c, g, or t
  misc_feature (294)..(294): n is a, c, g, or t
  misc_feature (303)..(303): n is a, c, g, or t
  misc_feature (352)..(352): n is a, c, g, or t
  misc_feature (358)..(358): n is a, c, g, or t
  misc_feature (383)..(383): n is a, c, g, or t
  misc_feature (386)..(386): n is a, c, g, or t
  misc_feature (398)..(398): n is a, c, g, or t
  misc_feature (401)..(401): n is a, c, g, or t
  misc_feature (419)..(419): n is a, c, g, or t
agcaggcccttgtgtcccgcacgagccttgcgtactaagtgacctgaaccttgctccgagagggagtcctcncggacgtcagccaagattccagaatgactatcttgacttacccctttnaanatcttnccactgcatcaaaatgggccctcagattttncataagacctctgagctgnncctcccagctacgagctgccccagctgnccagaccaaaacgaagaagacgttagccanacccaatataangaatgttgtgntgntggatggtgttcgcactccatttttgctgnctggcactncatataaagacctgatgccacatgatttggctagagcagcgcttacggntttgtngcatcggaccagtgtccctaaggangtngttgattatatnatntttggtacagttattcangaagtgcaaaacaagcaatgtggctagagagggttgccttggaaccgggcttctcgtgacaagactcctgctcacactgtcaccatggctgagtatctctgccaaccaagccatgaccacaggtgtcggcttgattgcttctggccagtgtgatgtgatcgtggcaggtggtgtggagtcgatgtccgatgtccctattcgtcactcaaggagagaatgagacacactgatgcgttgatctcacataaagcgcaaatctatgggccagcgactgtccttcaatctctaaattcccgattcaatttcctaagcacctggagctccctgcggtttctgaagttctccagcagtgagaccatggcccactctgcagaccgaactggccgtgccttagcctgttctcgggtggcacccggatgcat

SEQ ID NO: 561459 - DNA, 146 bp, Homo sapiens
atttccctgctgcgcttgcccggagaccaagacggcgcgcgatgcagtgtcatcatcgcagaacaggcagaagaacaacttgtgtgacctcttaattgcaggcccacaagtgaatgcactgcagagcccttaggcatttcaacaat

SEQ ID NO: 561460 - DNA, 127 bp, Homo sapiens
tatgactttgtctcggggctgtatgacgagactggcggtccactcatgaggtattctacacctccgtgtccggccggcgcgggagccccgttcatctcagtgggctacgtggacgacacccagttcg

SEQ ID NO: 561461 - DNA, 137 bp, Homo sapiens
ccagctgccactcttcctgaggctgtggcagcctacttgggactctggagcagggagcttggtgattcattttattatgggggagggcgggactaataaataaattactaacaataataaaacaatcactaacattt

SEQ ID NO: 561462 - DNA, 295 bp, Homo sapiens
  misc_feature (26)..(26): n is a, c, g, or t
  misc_feature (35)..(35): n is a, c, g, or t
tgaggttctgccggggggggcgcgangaaacaaanacggccgcatcgggttttatttggggagcaagaatttcagtttggggcatacacacagactgggtggtcttcattatgtccaaagagcaaagagaaggttgtaggtttcataaaaatgagaaatgttatggattgttaggaaagcaagttcattaacactagcaacgttttggggatccggcaagctctgattggtgagtgggtgaaactagtcttagatttccgcaagttgtttctgtagctatgagatcaaaccgtgt

SEQ ID NO: 561463 - DNA, 154 bp, Homo sapiens
tgtgtcgaggtcctggcgcagcagcgtcatctggctcgcgcgactcgcggagcagctccacgagcttctcgttgccgccgcgcccaacgtgcggtttcttctgctgcagcatcacggatggtgtcggccggggtggtggctcgggcggccccgt

SEQ ID NO: 561464 - DNA, 165 bp, Homo sapiens
aaacccggtttttgggggaacttttttgttttccccaaagggggtaaaatttcaaatttttgaaaacccccttttttttttttgggggggaaggggaaacaacccccccccccttttttttttggttaaagggaaaaccccttcaaaaaagttttttaattttca

SEQ ID NO: 561465 - DNA, 129 bp, Homo sapiens
acggatcgtccagaggacacgaggtcacatctctgatagatgcgatccagaggagactgggaggaggagagggtggcgtcctcgccctccagcaggcggcggtaggtggcgaatattcctggtcccagc

SEQ ID NO: 561466 - DNA, 174 bp, Homo sapiens
cccgtcaaacgcaaagaagacaagcgcaacaagtagggttaggagaggaggagtcggcggcggcggcggaaagcgagagcgggtcgtcggaaggaaccgccctcgtcgtcggagatgacgggcaaggcgaagccgaagaagcacacggccaaggagatcgcggcgaagatcgac

SEQ ID NO: 561467 - DNA, 401 bp, Homo sapiens
tgcatagctgttagtggccacgaaatcaaaattgtgtgtgctccatggaatactatgcagccacaaaaacgaacagaaccctgtcttttgcgggaatgtggatggagctggaggctattatcctcagcaaactaacaggaacagaaaaccaaatactgcatgttctcacttgtaagtgggagctaaatgatgagaacttatggacacaaagaagggaacaagagacactgaggtctacttgagggtggaggtaggaggagggagacgagcagaaaagatcactattgggtactggacttaattcctgggtgatgaaataatctgtacaacaaacccctgtgaatatgagtttacctatgtaacaagtttacctatgtcacctgcacatgtcccccagacct

SEQ ID NO: 561468 - DNA, 154 bp, Homo sapiens
  misc_feature (4)..(4): n is a, c, g, or t
  misc_feature (129)..(129): n is a, c, g, or t
ctanggtcctggtcactgctcacctgtcactgctccacctcatgctgtgaggagctgcgttcaaccatggaaaagggacaggcagatcgaattctgtcttctaccaagccagctggagctcctgagggnctcctgagtagctgggattacaggt

SEQ ID NO: 561469 - DNA, 151 bp, Homo sapiens
ccggggtgatctagcaggatccctttggtcgatttcattagtggcagtttagggctaagcataggggggtatctaatcccagttggggtcttagctatggggggtgcagatatgttaaagccactttcgtagtctatttggggtcaatggg

SEQ ID NO: 561470 - DNA, 270 bp, Homo sapiens
caaagcagcaccgccggtacccgagtggatcggggacggagagagcacgagcccatcagacaatagtggtgaagaaagggaagatggacaatgaagatcaccaaaacgttcttatgaagatgctggcatgtagaatataaacatggctggtggaagaaagagaaatgtgctcaagtgagaattgagcagacagcatgcagacgacagtaaacagcttaacctataaccgtgggatcctactaagagtacgacctagcagtgcatagccat

SEQ ID NO: 561471 - DNA, 303 bp, Homo sapiens
  misc_feature (17)..(17): n is a, c, g, or t
atttctaataacacagngttttgctctgaagcgtgataagactgctagtggattccatgaagcgtggccctatggtacccgattgaatgcactggttgcaatgaagcatgattgaatgcagtggattccatgcagcatggagaaattgaaccctattaaatgcaggggattttatgcagcatgattgaatgcagtggattccatgcagcatgattgaatgcagtagattccatgcagtgaggcccaatgcatcccgattaaatgaggtggattttatgcagcgacgcccaaagtatcccgatt

SEQ ID NO: 561472 - DNA, 542 bp, Homo sapiens
  misc_feature (239)..(239): n is a, c, g, or t
agaggatcgtttctgctcctcttcacacgactcctggtagagtcatggacaggtcagtgtcacatcacgtcgtctggcctgagtgtcttggcgtccttggtgaactgtctttcagttggctacagtgaactcagctctcgaattctttgctccctagctttgatatctctttctgctgctggagagcagtctgacctgtgccagtcctcggttcttccagacaaactctccctccaggnccgagacctgctgtatcaggctggagatgctgcctggatccaccctggcaaggcccaggctttcctcagttaccctgatgccaatgcttctcatgtccacctctacaggtggcgggggtggaatctcgctgatattgagctcgatttcttccaggaggagctcattctcagggatgggtgatggcagaggtggcgggcttggcgtaggggagccaggggtgaacgacacctctgcttctctggcattgtgttcatcttccttgtcctctagaactacaagcacattctggcatgagacaggag

SEQ ID NO: 561473 - DNA, 419 bp, Homo sapiens
  misc_feature (1)..(1): n is a, c, g, or t
  misc_feature (157)..(157): n is a, c, g, or t
  misc_feature (165)..(166): n is a, c, g, or t
  misc_feature (172)..(172): n is a, c, g, or t
  misc_feature (213)..(213): n is a, c, g, or t
  misc_feature (228)..(228): n is a, c, g, or t
  misc_feature (249)..(249): n is a, c, g, or t
  misc_feature (251)..(254): n is a, c, g, or t
  misc_feature (363)..(364): n is a, c, g, or t
  misc_feature (366)..(366): n is a, c, g, or t
  misc_feature (378)..(378): n is a, c, g, or t
  misc_feature (382)..(382): n is a, c, g, or t
  misc_feature (391)..(391): n is a, c, g, or t
  misc_feature (396)..(396): n is a, c, g, or t
  misc_feature (408)..(408): n is a, c, g, or t
natgacagtgggggggcacagtttgccaaactttgccttggaggacatgcagaggcaccctcagaattcagtgaaaacctgctcccatattgctaagactcatgaagtataatctctcatcttctttctctttcccctgcccaagccctaagttaanaaaaaaanncatatnaacaaagacttctggtccggtggcctttgctctctctgcgnttccctgcccatgcncgaaaaaaaaaaaaaataatnannnnaaaaaaaaaaaaaaaaaaaataaaaaaaaaaaaaaaaaataaaaaaaaaaaaaaatagaaaaaaaaaaaaaaaaaaaaaaaaaaaaaaataaaaaaaaaaaataaaaannantaataaaaaaanaaanaaatagaantaaanaaaatagaaagnaaaaataacta

SEQ ID NO: 561474 - DNA, 456 bp, Homo sapiens
gctgtgagcatgactgcgaggcctcaagaaacttacagacatggcagaagggcgaagggaaagcaagcaccttcttcagatggcagagggagagagcaagcaaaaggggaagtgctacacacttaaccagatctcatgagaactcactgtcatgagaacagcaagggggaaatctgcccccatgatccaatcacctcccaccaggctctacctccaagactcaggatcacaattcaacatgagatttgggtggggggacacagccaaaccatatcattccaccctggcccctcccaaatctcatgtcctcgcatttcaaaacacaatcatgccttcccaatagccccctaaagtcttaactcattccagcattaactcatatgtccaagtcaagtctcatctgagaccagccaagtcccttcctcctgtgagcctgtaaaatcaaaaacaagtcag

SEQ ID NO: 561475 - DNA, 226 bp, Homo sapiens
tcagctcggacccactttccgagtagaacttgtattgatcattgggacccactttgttccagggctctgggttatttctgtcccaacaaacatctggatgaacaatgccccacgcacgagatacagtgttgctccactagctccacttccaataaatacaaaaagggggatcaagctccgatgcttcttggcctgaccgatgatctggcggagcatgttttcggca

SEQ ID NO: 561476 - DNA, 1925 bp, Homo sapiens
atgcctgctgtcatcttgtctctccggtgttgttgcttgtgccatttaagttcgcggggtggtgggtggtgtggacacacaacccgttgggtgcccgtgcgtgatgtgtctccgtgataggtggcactcaccatatatggcgtctggtttttgtgtggttcatattgatctaacgcgtagtggtggtctgtgtggaattgtgtggggccaccgtttcttctgtgttgtttcacaacaacagcgggtttggatcggttgggctgttttgttgctatgtgtgtgtgctgtgtgagttcactaagcaatattctgttggggagggagtgtgtattttagttttgtttggggcggcacaagcacacatgtaatttatttgtttggttgattgctttgtagtccaagcagcgtggtattgttatcgttttttggcgtgcttcgttttggctcggcggctggtcttatatgggtgagtgttggttttgtggttgggtgtgtgggtgttgtgtgtggccgccgccgccctcgggggtggtgtggttgctgccctccatacttcttcttgttttgtggttgtgttgttgtgctcttgctttctcttccctctcgctcagtggtctgtgttgtgtatgttgtagtggtcagtgggccttttctgtagtactgttccgggtgggtgttgtttgatcaaagtaagaggggtggggtgtgtgtgtgctctcttcttggttgctgtggggtgtggttggtaagactggttgtttgttttgtctctgtttcagccctcctccctgctcttgtgttgttttggtgggtgtcggttcgcccacctcctgttgttgtgttgagtaggttatgtagggctttgttgtggtagtaggcactccgttctgttcggatcacatctgctgtgttggtgtgtggggtggttctggttggctggctgggctcctcctcttcccctccgggggcttgggtttatgtgtgtctctggttgcccgtcgtgctgcgcctcagcaggtgggggggggtgcgcacagaccttttgtgtggctcgcgcgcggtgtcttattctctcttcgcggggtgggtctttgtgtgtgtcgctcctgcttttttgtgtgttttctctctctcacactctgcgttctgtgtgtttttgtgtgtgtgggagtgtgtgtgtgtgtggtggagatgataaatagaaatatagatagagtagaggctcacacagcgatgtgtgttttggtgtgtgtgtctctctcatcccaaagagatgtgggagaagggaaatgagcatagagagaggtgaggtgagagtagagagagcagactgtgttgtgttgtgtctctctcctcgtctctctgctcttctgtgagtgtgtgtgtgtgctccctctgatggtcccacacacacagcgcgcggtgttgatgtgtgtgttgagatagctctctcactacgctagagagtgtgttttctctctctctataattgtctgctgctctgacatcacacacacacacacaccacacgcgcgaatgtcactccgcgacttgttcgtgtgtgtatatatatatagatagatagtgtgggggaaacaacaccgcgcgggagggagactgccaatccactctgtggtggtggtatgttgtttgttgttgtgatgacacgcggtttgtattatataatatcccctaacaagcgaacttgttgataaatagattgatgcccgacgcgctggaggaggatgagttgtgtgaatgtgcgcgcgcgaataaaataagtcgtggtgggatttttgttgtttgtataatataaaaagatatatgagtgacggccaggtgtgtggtgtgtgtggaaaacacaccaccaccttctgtttatgaatataatataaaaaaataataaataaaataaaataataaat

SEQ ID NO: 561477 - DNA, 602 bp, Homo sapiens
  misc_feature (376)..(376): n is a, c, g, or t
ccctaacctgggcgtatgtgacttctctggtcgtgacgcccatggagatactctgtaagcagagctggtaatccacaatggaatactacccgtgggaaagacaactgactgtgtctcgagtcgggtgacagcgaggtgacagcatgccgatgctgactcagtcttcattcctggcttgaaaggctccaagccaaggtttgagaggtacagtaacgtgtcccgggccccgtacgaggtgacgtgtgaccccaaagcccaggctttccgagctaagccacagcgtgcccctgccaggtgacctcacgatgtcacatgcgggcagtagggcctgctgtctagagggcttaagggagcagaatgctcatcaaccccccgnttcactgtgaaaattcacccttgaccagggactcatcactgaaaaccaaaactgacaaatccctcgtcaccgtagaagtggctcaaaacaaggaacactgtgtttatttcgggggagatccatttttgctggttaatcactgggcaaatatttatttatttatcgagacagagttctctcatcgccaggctggagcgcagtgggcgactcggtcacaaaaactcga

SEQ ID NO: 561478 - DNA, 260 bp, Homo sapiens
aatactcagagaaaaagtgttgcaccttattatatctcaagcaaaccaaaatatgatgctcttctgctttgttttattctaaattgttgtatcatatctttctgaaaccattctgaatttagttgaaattatcaatatttatcgctttataacccttaatttctgcgattcaatgcctgatatatgacatcttattgataaaataaattgtcctattccctttctctgcgtatgctcggaagtatgaagattgcagtctc

SEQ ID NO: 561479 - DNA, 236 bp, Homo sapiens
cgaaataaagagaaagaaggaaggaagaaacgggaggaaggaaggaacgggatgatttaaaaagaggaggaaagcctattatattttcacatatttttgcttactgtgttattctcttccttcccacattgttccaattcttctctcagctttctcactttctcttgtctgttcctcgtaaattccgtttaggctatttcttgttaggaatcggttctagctcagtgacaatatta

SEQ ID NO: 561480 - DNA, 435 bp, Homo sapiens
  misc_feature (12)..(12): n is a, c, g, or t
  misc_feature (19)..(19): n is a, c, g, or t
  misc_feature (21)..(21): n is a, c, g, or t
  misc_feature (46)..(46): n is a, c, g, or t
  misc_feature (48)..(48): n is a, c, g, or t
  misc_feature (216)..(216): n is a, c, g, or t
  misc_feature (409)..(409): n is a, c, g, or t
  misc_feature (412)..(412): n is a, c, g, or t
  misc_feature (417)..(417): n is a, c, g, or t
ggaggcgttctngaggatntnccacggcaggtgtactgtaatggcngnccaaagggagtagcgcccatcacctagggagtaagagcaatggttttctgggagcttaagcttcatagtatgacttttataagacttcaaggggcttggagacagcaacaatgcatactattcctaattttctatgatggaaatgcccatgcgactggtataagagtngtttctcttcctaaatccttgggctctcaactgtgtctcacagataaatgggactactaggtcccatcatccttgaagaaaggctctatccactgtagacaacagtcctatgaaaatgaccagggaagaaacttacagacccttatgaatgtcttttatctctctttttttttttttttgggaaacagagttncantggcnaccaagagtacacccggc

SEQ ID NO: 561481 - DNA, 1655 bp, Homo sapiens
  misc_feature (201)..(201): n is a, c, g, or t
  misc_feature (1577)..(1577): n is a, c, g, or t
cgcaaatatgggggcctcagatcatctgtcctagctgtgccagaaagagcactcctgtgaagttggagaggatgatgtggaggacgtcgagtcacacatcgcggcgcaagcgatgctctcgcatgtttttcctacggcatccggcaaaccctaccggggtacgccatgcatgtctactgaggcactgttccgtaggctatntttggggaatccctagaccatgccataacgtgtctcagtaggtgcccgatacacatattcctatgcaaaagtcacaaatcctattgtcagaacttaactctaggagtacagccacgggcagtctctgattcagggccagaacagtctggcagtgtctcagttccgaagtagtgcgagtattgacatctgaacgtgccgtcaccccaatgtgcagtggccttgccatcaacagcctcatcttgggtctttcgctgtggtgactaatccttagtgagtcggagacccgtccggcattgagactagtgtgcggcgccccaacagaaggcaccattggccggagttgaagtcctagcagctgatgatctactcagaggagttggaaagcctgggtccaccgcgcagagaagagtcacgacgcaagcggggagagcgacaattcactggcggaggcaagctcaactccacatgtgtcacctgtaccttgactattgcaatcggagcacagatgcttaagggtcactttgtcagaggcacggcaatggcataacgcgttccccccctagggggggagaacagtcgacgcgttgaaaacattgttccaagctgggcttttgccaatcgggtacaatcgatacactatgggggggcgcacactataaatacggcgcggacaaagaaacgtggggccccaataagcaaagcccggtggcccttgttcacctttcttggggacacaccgccttgtccgaacgttcaccccaactataactttcgccagtatatagacgtccaaggtccccccattatgtgcgagcaacctaggtaaaaattagcccacacgtggttcacataacacttggttggacaggtggacagagagggacaacgcggccacctgaggattcaaccataaagagaaaagatgggattgacgagtgagggacagaacaactcaatttgcggtggagccgattgaactacacctgagaagagtgaacaatgccatgtcaattaccaatttttaatgtcccagagacattgcgaaaaatgggagattgaaaaaaaacaacacgtaatgcaagacgcaataaagcgcacatatcttctcacacagcgccgatttagtgagtatcacataggtaccacctctgtcggccaccacgcttgtatgcaagtacgtcgtgggggacgcgacaagctactattcgatcgcgccattacaggcgacgggaatcgggctctatccccactatactgaacatctggcgaccgttgtcgcgatcagcacaaaatgggaggcaccgcttgggtcctagacgcagcggcgacacaaagttctagccactgcgaccactgttcagtacatggagagagcntacgcccacgtgtcgctactaaagcactggttgagggggagcagacttcggattggcacattcactacagcacaacta

SEQ ID NO: 561482 - DNA, 269 bp, Homo sapiens
  misc_feature (131)..(131): n is a, c, g, or t
  misc_feature (135)..(135): n is a, c, g, or t
tatttcccaggtcctagctgctggcatcactatactactaacagacgaactcaacacacttcttcgacccgccggaggggggaggagaccccattctataccacacctatctgatttttcgggtccaaccncccntgaagttatatcttatcctaccaggcttcggaataatctcccatatgtaacttactactccggaaaaaaagaaccatttggatacataggtatggtctgagctatgatatcaattggcttcctagggtttatcg

SEQ ID NO: 561483 - DNA, 748 bp, Homo sapiens
ttcacctgtgttcactatattccttcggtgatcactatgctgatggaatgcgtggctaaaaacatgaccagatgaaactcttctactcgtgcagcttcctcaaacttttttgagtttctcaaacttttattttgagaaacattaatgaaatctttttattgtttgtaacctgagccattatatacaatacatatttaacttaaatgtgaaacatatctgtgaaatgtgtacttccccttactgtgtgtgatactgctgttagtactcttctgtatttaactcctcactcctccccctcctcttcctattactccttttactatccttacctcttttattataattaatattacaacgtgccaaaaattgctctaaggccacctgaaaagatgaattataaagtgccaaaaagagcccagaaggcttagaaaccacttctccaaactttcccaatccccgaatggctcctcaacaatttgctccgtggcagttccccctacgggtgatggcaatcttacggaagactctacttttagtcttcctcgtgtgccccttctcccaacattaatcccatcccattttagtcttaacggaaaacaacctatagagttcttcagccacggtcgttgtgttgtgaatcgcgcccaagttgaccccctaacaactttcggaaagtgcccatggccccacaaaactcaccgaggcccgagtagatcacgacaagtgcctgtgcgtcaccagtgtagac

SEQ ID NO: 561484 - DNA, 213 bp, Homo sapiens
taacatttaactgtcatctctttacctgctttaagctggaatgtactctcagtctctgtctttcctgagcatgacatttttgaagagaagctaccagttagtttacaaaatacccatcaatttgggtttcgtctgatgtttcccaaggattaaattcaggtttcataggctcctgtagtattcaggctccagagaagcctgaatcaccaaaga

SEQ ID NO: 561485 - DNA, 418 bp, Homo sapiens
gtgtggcagagtctggggattggatgaggattctttgcagccgggaaagaagggtgttacgggagctctggggagaggttcctaacccatggggaagagagggtcagggacatcttaccgtggctgtagtgatgcacttgtgggagtcagcctccactgtgtcctcacagtcactccttcgtcagagctcttctctgtgccaggcctccgtggagagttggagttgaggatttatttcactgtgcattcttcagctgtcggcccgatagttcactttcaacccagggacactaatttctcacccagcctcttgaaaaaaattaaatttaccaacccatgcaaaccctctaccagctccccgcctcgtaccccaagtcctctcccaggaagggatgggcagggtgtgagctgggtcctc

SEQ ID NO: 561486 - DNA, 707 bp, Homo sapiens
atcccagccactggggaggttgaggcgcaagaatcgcttgaacccggaaggcagaggttgcagtgagccaagatgccccactgcactccagcctgggcgactgagcgagactcttatatctcaaaaaaaaaaaaaaaaaaaaggtcaaaaaagggaattccccatttaagttctcaaatcaggtgactctgttgctccaaaataggcccgtgggtaacttgaaaataaccttacaaagcagtttctaacttaatgtgcaagggtgtttttcaaacaattttgaaaagtgaaccttttacattgggtgaacatacgtggcaccagtggttttaaggacaaacgagtattaaagtcgctttgaaagaccgtgtctggtagtgtctcctcaaattgggctgaagaatttttaattaatgggtgtcacgattattgtgaaaagtaagcagggttttttccaagggtacattggggatatctttgtggtttagacagacttttataacagatgagggtttggaaaaagcccctacagaggtttggggtaaacagactatcttggcttaaactaaaatgacaagttgggtgacggatttcaacttttacaaagtaggacgcgtattcacaggagattggttgtgtgatgtgctacacactcagtcagcaaaggaaatcatgtgggtggtgaacttcgagttaccccgaaggca

SEQ ID NO: 561487 - DNA, 435 bp, Homo sapiens
  misc_feature (41)..(42): n is a, c, g, or t
  misc_feature (65)..(65): n is a, c, g, or t
  misc_feature (81)..(81): n is a, c, g, or t
  misc_feature (93)..(93): n is a, c, g, or t
  misc_feature (140)..(140): n is a, c, g, or t
  misc_feature (170)..(170): n is a, c, g, or t
  misc_feature (214)..(214): n is a, c, g, or t
cagcgctcatttccgtaagtaagtttagtttcatcctgagnntgaggaaagatctgtactgaaantaaacgatagggttcngaatctggactnagactacggctcctttaatagtaacgaaaactaaatggataagttangctctacattattttcttttaaagcttgcngatcctaactaaatgtcttgagaaggattatcacactgtagcanttccagttttagtgattctccttttttcccttgtctgtaaagatttatggaatgatcactttgtgtacatacaggttactgcttttttatttaaattcttttagtgttttgctccgtgagacacttcagtttaaattgatggaataaatgttatatgacacatttacgttttccttatcaaggtgtcaaatatgtggactttaaacaatgaaactttttcc

SEQ ID NO: 561488 - DNA, 307 bp, Homo sapiens
  misc_feature (40)..(40): n is a, c, g, or t
aggaggaatgtgctttgtatcatgcctatggtgtgtgatnactgcttgatacattacgtttcactttaatttattgtgctaaggctttaataaattgggggttccttataagagcagctcgtactgacgaaggtgcatgcgctgaatgatgtcacggcagtcgttgaacacacggcggatgttctcaagtgtccacagcgcaggtgaaatgagggtagcagtagtgacgcccatctccactggcagtgctgatcctcagaaactcatctcgaatgaagtacttggcccgggtcacgcgtgggtcctc

SEQ ID NO: 561489 - DNA, 438 bp, Homo sapiens
ctaggacgccaagagtagagactagcctgggcacataggagacccccacctcaacaacaacaaaaaatttttaattaaaaaaaattagtcaggcatggtggtacatgccgtagtcctagctacttgggagcgtgaggtgaaaggattgcttgagcccaggagtttgaggctgcagtgagccatgatcacgtcactgcactctagccagggcaacagaacaagatcctgtctcaaaaaaaaaatagtaaatttagtaaattgggggacaatcagcggggctggctcagttctgctcctccccttctcctctttcttttccatatgttttttatgcctttggttcctctaaggctgcctttttatgtattcagttgattttttatagaattataatcctgtttggatttagagtgtgtgtgttactttcttagtggatgc

SEQ ID NO: 561490 - DNA, 264 bp, Homo sapiens
aggtagtggcattgtcggtgggcaggcccatggtccagttgagggatcactcggggatggcagcagctcggcagtgcccggtgcgcaccacagagccggtggagggacttctctgagtaggtgtctcggtcgcagcctttccctatgtggctggtttctagctccactgtggcctgtactgaggcgactggctcgtcacgtgtctccaggtggatatttggaaagacggccaacgcgccggtgcccggctcatactcaatcctg

SEQ ID NO: 561491 - DNA, 704 bp, Homo sapiens
  misc_feature (315)..(315): n is a, c, g, or t
aaggcgagggggtttccactgtgtcaattattttagaaccttaaggaaggggtgccttacaaattgtaaaaagttttccctattccgggtttttccccaccccagtggttacccctctccagagggccttcacgggggcttcttcaaccaggggcccgttatggggggatggataacacagacatgcagtttgtattcaacagcgttagataatatttcgaaaaacttcccaagctaactgtaggggccctaaactgcatgtattcctcttagcagtgcaagcttgcagcattgcgtcagccaagtagtcaatcnccaatgtggtgaccactgcaagcgtgccgtctctttaaaactatctaccttctataagacttggatatacacgtgaaatgtcttcacagacagacacatgtattaacggcgagtttatgggattgtcgcaatcacctgtatcattgatgtattcaatagaagcggtgtcagcccaccatgttcaccactagaatatcatcgtttggtcgggtgggtctttctttcttttttaattgcgcactgtgcggtaacgtcacccatgtgcaggctccacaggggcgcttacaaatgaaatagatcttgtgataatctggatgcatttgcccttttcatacataaacctgtagaactgtccctgctgggtaattaaattgcttcattcgaaaaaa

SEQ ID NO: 561492 - DNA, 592 bp, Homo sapiens
gctcctcacagcggaggccaatggcaggcgcaggagtggcggctgcaggacggctgcccggggactcaccaggctgtggtcctgctctaaccccccacgccccattccctcctcacagcggaaacatcacttgttaacagctgacatgcactcacaagctgtgtttccgctgtgaggaggccaagtggcgaggcgcaggagttggctggctgcaagggacggctgcccggggacctcaccaggtctgatggtcctgcgtctagaccccccacgccccattccctcccaaccgcaggtctcattcttgaccccttttgaacgacttcctctctaggcctggctagccccgaagatagcatgagttgcgcgattggctacttgattgacggtgcgcgtcgccgactgttcgaggtttaccgctggacgtcgtggtctctgtgctctttcctcttctgtgggttctctgaaatccatgttggatccacggaggggagggccatctctgaagcggctgcccatgggggggcctgttcgccggtcgcctggtgcgactacctcccctgacccctaagaagtcatccctgaagcctct

SEQ ID NO: 561493 - DNA, 1605 bp, Homo sapiens
aataggtgaaaattccttataaatccaggatgggctctgagagaacgggataagaattaggaagaaacacaaaaagattcagaaatccgtacgaagggtttgggaggcacgaattagggccaaaattttataggaggcagcgtggtagggagtgcaggcagaagaattaagaggtggtttgcgttaagtagtcagaaggaggaaactagtcaacagggtcagtgagaaggtgctggagggtacagggaaaactatatcagcactggtgccattggcgatgggctggtggcgagtggagaatggcgccttaagcctggggtacagcctatcctgggggcccataaaatctggggctatccgaggagcatagctacagggtaactggtggggaaacaaaaaatggcacgagcttacagcagcaagcctatggggatagatagtagagggcgggtacacaaacaactctaacaagggcgttcgggggagtccgcatggcataggtgtccaggaacccatgtgaacatctattaccgtggaatggagagagggatctggagtatcaccaggcagccaaggggagaaaagcaagaagagatatattgcacacacgattatagtgccagaaacatattcgcgcgcagtcgcatattaaccaatcatatatacatcatataccacccagtgtgagctatacacgccaaacatgggatctccatctccacgtgcacagtgcacaaaccagggggacccgttggaaaagtttcccctggagtggccgtgggtgacaggacacgtggttacgacaacgagatagccacgcgggatatatacaccaacacacggatgggtgagaacgagggcacatggcaccacacggaaaccaggggtacgcacgcacagagggacactatatcccccaccaacacttttggggacgaccaccattcatggaggctcagggcaccccccgtagttcgaagattcacatggggcaccgagggggggagacaagcgcgagggaaagaggaaaacaccacaatggcaaagagtgcataacacagagagcgacccctacacaaacgggaacagcagaagcattgagttccccacccaaccaacatcgggggggtgttgaagcacccacccacagagagagacgaacgaaccaaaggggcgacgagaacaccaagtgagatcgagtaaaacacacgagacacaggcaggggggtcccacacacaggaaaaaacaaggagggagaagaaaacgaatacgcaaagagagcccgcttgggtgaacaccccggggggaagagaccccgggcggtagagagcaccaaaacagaagaaagaagcacggggataaaacaacccggcacacagaaccaccacacacggagaacaaccaccaaccaaaaagaaacgagaaagagaaagctaacaacaaggagggggacaagaacatacgaaaaccacaccaacaatacagagcgacaacaaaaaacaaagagagcagtcgcacaaagacagcaagagccctcccagcaacaacacaaaaaacaactagagagtagacacagcaccacacgcacaaatagcaaatagtaa

SEQ ID NO: 561494 - DNA, 144 bp, Homo sapiens
ggtaggcactgaagctcgatatccaggctcaagcgattctcctacttcagcctcccgagtagctgggactacaggagcgcccaggatgccatctttccgggagaccctagagctgaagccgtggctattaagacagccatgcca

SEQ ID NO: 561495 - DNA, 167 bp, Homo sapiens
cctagtattagaagtttcaatagcactgcactaaggaacctaagttttccattatggttcctactctcaaaaagcttgaatttcagtaagcaaataggatagtaaataaaagattacctttgggtatcagtacgaccactattgctattgaaacttctaaaactagg

SEQ ID NO: 561496 - DNA, 308 bp, Homo sapiens
aaaaaaaaaaaaaaaaaagcatttcagggccaggctcagaggtttactcttgtaatcccagcacttttggaggcataggtgggaggatcacttgaggccagaagttcaaaaccagcctgagcaacatagcaagaccttgtctccatgaaaaataaaaaattagccagaaatggtgatgtgtgcatagagttccaactacttggaaagctgaggcaagaggatcgcttaagcataggagttcaaggttgcagtgatctataatcaccactgcactccagcatgggtgacagaacaagaccctgtctgga

SEQ ID NO: 561497 - DNA, 302 bp, Homo sapiens
agcagccatgtttggccttgtttaacattgtagctgtcggtagcatcggtggttttttgttctcccaagcttgccccagaactgtgtcaagtttccgaactcccaccggcttaatggatctggctgttgcattttcttttaaaaccatcagggcagtgtccaatgttctctgcagttatgtgtccatttgcttcaggtacagtaataatgtagatggcacaaatggaagctcaaccttccacatcctcggtcttatagtagcagagtggtctcagcaatattagtcatataatgattcttgt

SEQ ID NO: 561498 - DNA, 415 bp, Homo sapiens
tagaggccacggatcactatatctttgttgagcgcagcttcactgctgagtgtcggtactggtctccttaggggaaccttccgcaacaggtcttctagcttgctgggattcctcaaagtgaaccctgaggtcctcatcctctgctatgctggtgatatctctgtagaacacggatatgtcaaagcccccaggtttcttcaggtgcatcaagtcaaggaagatgcctgtatctcggagatcaccggctttggtcctggcccggctgactaaggcactgtcattgccatgggggttgtcttcataggtgaacagcatgatcctcttatgactcatcttgaattggacatcaataaagaggttggcacagaaccacagaacttcactgagtgagtagtcagatccgtggcctctataa

SEQ ID NO: 561499 - DNA, 237 bp, Homo sapiens
  misc_feature (23)..(23): n is a, c, g, or t
  misc_feature (51)..(51): n is a, c, g, or t
  misc_feature (57)..(57): n is a, c, g, or t
  misc_feature (125)..(125): n is a, c, g, or t
  misc_feature (157)..(157): n is a, c, g, or t
  misc_feature (199)..(199): n is a, c, g, or t
  misc_feature (209)..(209): n is a, c, g, or t
tctgccctgagccctcccacgtnagtgccatcggtctagaaccactaaccncgcatngctgttgatcgtcacgctcgcatctatagataacggctctccagacctgagctttccgcgtcagcaantaggaatcgtttttgctgcagagaataaaagnaccacgtgcaatacttaatgtccgcatgatactgctatcccncttacccaanaggggactggtctcttttgaacaccttg

SEQ ID NO: 561500 - DNA, 334 bp, Homo sapiens
gacagtgcggaaatctgagtcactgctgtgcccagatatctcgcagactaacgagaagatgagaagatgtgtgatcatttgataagagcagcaaaatatcgtgaccacgtgacagcaactcaactaatccagaaaattatcaacattctcacagacaagcatggagcctggggaaattctgcagtgagtcgtcctcttgagttctggcgccttgactactgggaagatgacttgcggcgccggcgacgatttgtgcgtaaccctctaggatcgacacatcctgaagcgacactaaaaacagccgtggaacatgccacagatgaagatatccttg

SEQ ID NO: 561501 - DNA, 588 bp, Homo sapiens
  misc_feature (34)..(34): n is a, c, g, or t
  misc_feature (58)..(59): n is a, c, g, or t
  misc_feature (106)..(106): n is a, c, g, or t
  misc_feature (130)..(130): n is a, c, g, or t
tggttttaccacccggggcgttaaatcccaaaangtagagcccggcaaacaaaggggnncccttcccccccggccccgctttgggttccatcgggcccattgtggnttgccccccggtttggtacccacnaaggtgcgcgccggccccggcttcaacctggaggaactcagggtggccggcattccaaaaaaggtggcccggaccctcggcatttttgtggatcccagaagggggaacaagtccccggagtcccttcaggccaacgttcaacgggtgaaggaggcccgctcccaacttttccttttcccccggaagcccccggcccccaaaaagggagacagttttttttaaaaatttaaactggccccccccctggccgggccggttttgcccgtccggaacgtttttaaaaaggaaaaagcccgggttctcccttagggaaaagaaaaattttaaagcctttctttgtttccgtttgggccgggcccacccccggctttttggcattcgggcaaaaaaaacccaggaaccccccaacccgggtttttaaaaaaaaaaataaagcccccctgggggcttgggttcca

SEQ ID NO: 561502 - DNA, 137 bp, Homo sapiens
gctgagacaactctgtatatgcggctcggggatgtcggaggtgctgctgctccgaaggatctgctgcatgctgtcccactgtgagatggccagactcggctgcaggtgcattttctgactgttaacactcctccact

SEQ ID NO: 561503 - DNA, 944 bp, Homo sapiens
  misc_feature (133)..(133): n is a, c, g, or t
  misc_feature (149)..(149): n is a, c, g, or t
  misc_feature (192)..(192): n is a, c, g, or t
  misc_feature (240)..(240): n is a, c, g, or t
  misc_feature (300)..(300): n is a, c, g, or t
  misc_feature (311)..(311): n is a, c, g, or t
  misc_feature (317)..(317): n is a, c, g, or t
  misc_feature (377)..(377): n is a, c, g, or t
  misc_feature (525)..(525): n is a, c, g, or t
  misc_feature (566)..(566): n is a, c, g, or t
  misc_feature (615)..(615): n is a, c, g, or t
  misc_feature (634)..(634): n is a, c, g, or t
  misc_feature (640)..(641): n is a, c, g, or t
  misc_feature (662)..(662): n is a, c, g, or t
  misc_feature (672)..(672): n is a, c, g, or t
  misc_feature (692)..(692): n is a, c, g, or t
  misc_feature (740)..(740): n is a, c, g, or t
  misc_feature (749)..(750): n is a, c, g, or t
  misc_feature (763)..(763): n is a, c, g, or t
  misc_feature (769)..(769): n is a, c, g, or t
  misc_feature (783)..(783): n is a, c, g, or t
  misc_feature (789)..(789): n is a, c, g, or t
  misc_feature (797)..(798): n is a, c, g, or t
  misc_feature (801)..(801): n is a, c, g, or t
  misc_feature (805)..(805): n is a, c, g, or t
  misc_feature (813)..(813): n is a, c, g, or t
gagcggggcggtgctgacagcagctggagggcagaggaggcggcgcggggtgtcctgtcctcgccatgaagccgcagcaggcgccggtgtccggaaaggtgttcattcagcgagactacagcagtggcacacngctgccagttccaganccagagttccctgcggagctggagaaccggattgatatggcangcagtttgaatgaaacagttcgaactctaaataacctttgatgcaganagcagagaagctcggcggccagtcatatctcgaaggttgttatgggcttgtttaacagcnatagtaccatncttccntatgcatggaaacgtcattatgagaaggttctgaagaaagtctccaatagtacattcaangagcagaactgagaagatctatgctccacaaggcctcctcctgacagaccctattgagcgacggactgcgaggttattgatacattaccatttatgaagacagaggcatgagcagtggaagataaaccgaagaattgaagatcccacnttccagccgggcccctcatgtatccacgtggccgaccgtangagtgtcccttacctcctctccagagcatcattcctttctatctgctgncagagccacggtgccattntactcnnaggactcactttctaaaattncacacctggnagtgacctctagtcgctcangcatccactttgtgtttccaacattgtgtaggactctggtaatccttntgattagtnnctgagaaaacacnatgaangcacttcacgtttntttttnattccacnnccntttnattaaacncaggttggtcagcccgatgcaaagcgtggttgtgtggcaccgttcattgccgggggtctcttcattcctgggccagctcccaggggctttgaacctcaaaagcggatctcaccggtctatcttgtgccccg

SEQ ID NO: 561504 - DNA, 559 bp, Homo sapiens
  misc_feature (116)..(116): n is a, c, g, or t
  misc_feature (118)..(118): n is a, c, g, or t
  misc_feature (122)..(122): n is a, c, g, or t
  misc_feature (125)..(125): n is a, c, g, or t
  misc_feature (152)..(152): n is a, c, g, or t
  misc_feature (154)..(154): n is a, c, g, or t
  misc_feature (174)..(174): n is a, c, g, or t
  misc_feature (184)..(184): n is a, c, g, or t
  misc_feature (203)..(203): n is a, c, g, or t
  misc_feature (220)..(220): n is a, c, g, or t
  misc_feature (222)..(222): n is a, c, g, or t
  misc_feature (225)..(225): n is a, c, g, or t
  misc_feature (227)..(227): n is a, c, g, or t
  misc_feature (229)..(229): n is a, c, g, or t
  misc_feature (235)..(235): n is a, c, g, or t
  misc_feature (246)..(246): n is a, c, g, or t
  misc_feature (257)..(257): n is a, c, g, or t
  misc_feature (261)..(262): n is a, c, g, or t
  misc_feature (280)..(280): n is a, c, g, or t
  misc_feature (424)..(425): n is a, c, g, or t
  misc_feature (441)..(441): n is a, c, g, or t
  misc_feature (456)..(456): n is a, c, g, or t
  misc_feature (458)..(458): n is a, c, g, or t
  misc_feature (484)..(485): n is a, c, g, or t
  misc_feature (502)..(502): n is a, c, g, or t
gagcggggcggtgctgacagcagctggagggcagaggaggcggcgcggggtgtcctgtcctcgccatgaagccgcagcaggcgccggtgtccggaaaggtgttcattcagcgagcntnccgncgnggacccacggctgagccgttacccgcncncgttccctggcggcgtgggnagcccccggnttggctcaggcccgccagnttggcccgccccccgtncngcnancnccctcncatttctgacnccgccgcgccnatannaggaaacgatactctaanccggttgttatggattgtttccccgaactctaccctattcacatccagcctggcccactccattctgcgccggttctgccgcccaataaccctcacaatcccgcgaagcctgcaccgctctcatgctcaccccggcctactcanncccgcacctcttgcgnacggcctggcagatncntgcccttccactttctgccgcccgcnnccaagcacagtgagccnctcccacgccgccttcccagctacccatatcccagcagggatttttctgtctaacct

SEQ ID NO: 561505 - DNA, 127 bp, Homo sapiens
attagagcgatgcttatctggtatcccacccctcggtctcagaagtaagaaaaaaaaagtgtgtgtgtggggggacgggtaactaaatagagcaatactgtatatgtaaacatacagcaatggtatg

SEQ ID NO: 561506 - DNA, 234 bp, Homo sapiens
tcatctagaggattccccttaatgggccagaatagttaaacggtcatatactgtactactttctaccaagatcacgcagattgcagaagacctgtcatattacaggctatattcaactagaaaagctgtcagcgattatatacgctaaagaaatgcagtatttactgtgtgtcaggagacattagaaatcatctatacattatatttctgctgcccattgcaagggtaccgagc

SEQ ID NO: 561507 - DNA, 284 bp, Homo sapiens
agccttacccttaaggttcaatcaattttcaccttccaccagaaattttcacttagtctctggacactgactatatggttttttgttggttggtgggttgggttttaatgaaaaaggaatttctgaagaattaaatggaagattaagttacagagaaaaggccatatggactatatcctatttccaggattcaggtaataacaagagcttatctgcattttctgggaagaaagcactcttctggataggaacttgaagcagcagaatgctttctggccaagagc

SEQ ID NO: 561508 - DNA, 319 bp, Homo sapiens
gagctgacattgatcacgtacctatttggtgtaagaacagccaacgacagcgagtcatgtttagacagagtgaaaaactgaatggtgtcctagaagcgacgccgtctctgggataacatgcggaagctgggggagtgcatagaagaggcgcaccagataactcatgacggctacttgaaactctggcagtctgagcaagccttcgctggcctcttttgacgccatctttgtgcatgaggcccaggactggacaccagctatcatgaacatagttctgtctcagccctgtgggaaactctttgtaagggatagaccgcga

SEQ ID NO: 561509 - DNA, 316 bp, Homo sapiens
cacgaggggtccaagcatttcctaggatatgcggcggtctgcaatggtttcaagacagcgagtcctacaagtcatgtaggacatcggcgcagcgcgatgcaaacctgagcggtttttatcggccggcacgccgtcgggcgttgcgcgcccgtccggcgcgtccccccggatcgcgaggtggcggcgggtttcggtgtcacgccaaagcctttgacgatgaatccggcaaatgacttcgcgtgatgttgtactgactttatatttgtttgtggctcaccgcaatcggaatagactggtcctggagtccgggcgcctg

SEQ ID NO: 561510 - DNA, 456 bp, Homo sapiens
gggtggcccgggcagaagtgtctgtgctgcaagcaggagcgctcatgctgggaaggcagacacgtggcccaggcgtcaggtttgaacattcttgacagcaagtggctcacccgtcagcgtgctgctttttcccatcccaggagttggacttgacctgtggacatttggctgtttttctttttgtttttaagccagaaacactgtcttgtttccagtttaagatgtagagagggtgaaacagtcagaaactgggtcagaagcagcgtggttctcgtggcagggcggcacttggcccaagactcgtgctttggcgggaggctcaagtcaggcgtcccagcagcttcggtgcaacgcctcctgcccggctgcgtggggaggccctccaagacaccagctggtctcaccgcgaggcctgacttcgagccagagcagcgagtacattgcgtctccgtgtgg

SEQ ID NO: 561511 - DNA, 310 bp, Homo sapiens
cgcaacctctgcctcccgtgttcaagcaattctcctgcctcagcctcccgagtagcaggaattacaggtgcccgccactacgcccggctaattttggtatttttagtagagatcgggtttcaccataatgggtaggcgggtctcaaactcctgacctcaggtgatacgcccacctccgcttcccaaagtgctgggattacaagtgtgagccaccgagcccagcctctgtggcaattcttgaacctgaccttgatgagggttatctttttttttttggaagaggagtctcgctctggtgcctggccggaat

SEQ ID NO: 561512 - DNA, 1215 bp, Homo sapiens
gccttgctcgtctttcttctcttcgttggcgctcttgttcgcttgttgtgtgcgttgtcgtgttgttttgggtcgtgttcgttatgctctgtgttgtgtgcgtctgtggccgctttgtgtgttgttgtttgtgtttggtccttgcgtccttgtgtcttcttgtgttctgtttctcagcggggggtgcatgggtgtcgcgcccgattcccatggggggctgcggcgggtttgtccgcggatgggcccgtgtgcggtgttctactttcctggctctcgtgctgtcgttcgtctccgctgattgggcgctacctagtgattgtgcgcgagtatctggggttgtcgtctgcggcgtcaagcgctgcgtttgcctagccttgccttgggatgctgccccatggcgcacccgttgtcggtcagccttgaagtatcacgtcccgatgatatctgtcgtgtttcttacagactcagcccatcgcacggctcgacggcctgttcctgtaaggcgcgacatcgacgtccgggtgcagattggttcatcgagtacctgcgggcacttggtcagtccgctcaggtgttgatctgacaagcgggagcagttctcacgatgtggaagtcgcactcgggtggcctattacgttgccgcatgcgatgactcttgagtctacgtggacgctcacgatgccattggcaatggccgcccggcgttcactcaagccactgcctgtgagcgccaagcgtgcttgcgtcctcgggtcatgccacgtgtgagggccagaaatcacattgttatcattccgccctggcgccgcatcctggcgtggttgaggagcgtcacactacgactacaagttcctccatacgaggagtgccacgcaacaaggcatgcccgtggcaagctgtggctgccaaggcagctgccgctcggttcccttaagctgaggcctgctggcatgcgccatccagcgagcccgctgcacagcctcctagcgtgccgtcgactgtccatctgtgacccctagcctgggggactccgctagcccgctcgccagagcatgtcactccccaccctcatgttacagggtggatgtgggcatgcaggtgacaagggcccatgcctccacccctccagcccatccagcaatcagccccctgttctgactcatgggggcgccaggatgtagatattgtacaaaggtttctaaatcccttcttttt

SEQ ID NO: 561513 - DNA, 905 bp, Homo sapiens
  misc_feature (41)..(41): n is a, c, g, or t
  misc_feature (70)..(70): n is a, c, g, or t
  misc_feature (94)..(94): n is a, c, g, or t
  misc_feature (97)..(97): n is a, c, g, or t
  misc_feature (108)..(109): n is a, c, g, or t
  misc_feature (117)..(117): n is a, c, g, or t
  misc_feature (126)..(127): n is a, c, g, or t
  misc_feature (139)..(139): n is a, c, g, or t
  misc_feature (141)..(141): n is a, c, g, or t
  misc_feature (147)..(148): n is a, c, g, or t
  misc_feature (151)..(151): n is a, c, g, or t
  misc_feature (156)..(156): n is a, c, g, or t
  misc_feature (158)..(158): n is a, c, g, or t
  misc_feature (164)..(164): n is a, c, g, or t
  misc_feature (173)..(173): n is a, c, g, or t
  misc_feature (177)..(177): n is a, c, g, or t
  misc_feature (181)..(181): n is a, c, g, or t
  misc_feature (192)..(192): n is a, c, g, or t
  misc_feature (199)..(199): n is a, c, g, or t
  misc_feature (201)..(201): n is a, c, g, or t
  misc_feature (209)..(209): n is a, c, g, or t
  misc_feature (217)..(217): n is a, c, g, or t
  misc_feature (229)..(229): n is a, c, g, or t
  misc_feature (235)..(236): n is a, c, g, or t
  misc_feature (250)..(250): n is a, c, g, or t
  misc_feature (259)..(259): n is a, c, g, or t
  misc_feature (272)..(273): n is a, c, g, or t
  misc_feature (289)..(289): n is a, c, g, or t
  misc_feature (324)..(324): n is a, c, g, or t
  misc_feature (332)..(332): n is a, c, g, or t
  misc_feature (387)..(387): n is a, c, g, or t
  misc_feature (392)..(392): n is a, c, g, or t
  misc_feature (398)..(398): n is a, c, g, or t
  misc_feature (409)..(410): n is a, c, g, or t
  misc_feature (417)..(417): n is a, c, g, or t
  misc_feature (422)..(422): n is a, c, g, or t
  misc_feature (433)..(434): n is a, c, g, or t
  misc_feature (437)..(439): n is a, c, g, or t
  misc_feature (442)..(442): n is a, c, g, or t
  misc_feature (451)..(454): n is a, c, g, or t
  misc_feature (463)..(463): n is a, c, g, or t
  misc_feature (466)..(466): n is a, c, g, or t
  misc_feature (468)..(468): n is a, c, g, or t
  misc_feature (473)..(473): n is a, c, g, or t
  misc_feature (480)..(480): n is a, c, g, or t
  misc_feature (490)..(490): n is a, c, g, or t
  misc_feature (494)..(494): n is a, c, g, or t
  misc_feature (498)..(498): n is a, c, g, or t
  misc_feature (500)..(500): n is a, c, g, or t
  misc_feature (520)..(520): n is a, c, g, or t
  misc_feature (531)..(531): n is a, c, g, or t
  misc_feature (538)..(538): n is a, c, g, or t
  misc_feature (541)..(541): n is a, c, g, or t
  misc_feature (566)..(566): n is a, c, g, or t
  misc_feature (583)..(583): n is a, c, g, or t
  misc_feature (679)..(679): n is a, c, g, or t
  misc_feature (734)..(734): n is a, c, g, or t
  misc_feature (818)..(819): n is a, c, g, or t
  misc_feature (886)..(886): n is a, c, g, or t
gaggcttttgaaaacctaggcaaaagatctctggaagcagntaggtgcctgcccaagagcgttcatcttnatcacttccaaagaccaaccccanacntagcgctattnncccgcagnagacatctnncctttactttcngngaattnnttntggantntttagntagtcagtntctnccanctaaactcttncagtccnanataaagangtgccagnccacggaaggantctttnngatgaaattaaagnagattttgncaagcttcatcannagtattgcctcaaatntcctgggcagatgacagtgcctttatgtattggantgtctacngataaagcaagtatggaagttcgatatcaaacatttgtcttttttggttttttanttccntgttcnttatttttagnntttctcnttttnttgcttttttnntcnnnttntttgctttnnnnattcttctnttntntactncaatttntgctccttcntctncatntnttgctcgtgccatcatcganggttggcacgngggaccntcngttccatgcaaaaagtcccaggctntcagaaccccagggctncggacgccagggctattccctgggtgcctcagatggggtggacaacaccgtcagaccgggagaccagggcagctcttcacagccctactcagaagngagaggagagaacacgtcttacaggatggaagagaaaagtgatttcatgctaganaaattggaaactaaaagtgtgtagctaggttatttcggagtgttatttatcttcccacttgctctctgtttgtatttttgtttnntttttgattcttgagactgtgaggacttggttgacttctctgcccttacaagtaaatattagtaacntcggttccatcagaataac

SEQ ID NO: 561514 - DNA, 298 bp, Homo sapiens
ttttgaagttggagtcttgcctctgttgcacaggcctggagtgcagtggcgtggtctcggctcactgcatcctccgcttccccaggatcacttgtcatgacttgagaccagccctggacaatatagatacagcgtgtttcttcaaaaattttaaaaaattagccaggcgtggtggtacatgcctgtgattcgagctgctcgggaggctgaggtgggaggatagtttaagcacggaagattgaggctgcagtgatctttgatcctgccattgtactccagcctggcaacagagtgagaa

SEQ ID NO: 561515 - DNA, 552 bp, Homo sapiens
  misc_feature (358)..(358): n is a, c, g, or t
ttccacagcggccaattcttcagagcacaaagaacggggcgacgcaggccagaggtggtgggagtccagccctttggttcggaatcccggctctccactggtccagggtggttctcagcaagccctcgggctttctccaatgcacacgcatgggttcctacaagcaattccaacactccagaagaagacatcccagtgtaaaatcgggatggcaggggacctggggacaccggttgtgacggggcagcccctggggctccgagtccacacactcccacggggaggggcaggggcccctatcctggctcacacgcgggggtcccccagccctctgattctcacagagtcctctgtccanagaacaagctggtgcacacacggggcggtcagtcctgggattcaggggggcccatcggagctcgaactcaagggcctgacctagggacgcctccagtcccacccctaccttgggggggtgggagaatcaccgtgcaggtcactgacccattggacacagatcaccattctctcccgccccagtttcttcctccg

SEQ ID NO: 561516 - DNA, 1189 bp, Homo sapiens
ggtcgtcgcctgccatcctcgggcgagtcgcttctttcggttctactgggagaatccaccgccatcctgccgaccatggtggaacttcagggtagacagatccggccatcatggacaagaaggccaacatccgtcaacatgtctgtcatcgcccacgtggaccatggtcaagtccaggctgacgagactcccgtggtgtgcaaggcgggcatcatcgcctcggcccgggccggggagacacgcttcactgatacccggaaggacgagcaggagcgtaggatcaccatcgaagtcaaactgccatactaccctctgtctacgagacgtctcggagaatgacttgaagcttcatcaagcagagcaaggacggtgcacggcttcctcatcaacctcatggactcccccgggcatgtctgacttcgtcctcggagagtgactgcttggcctccgagatcaccgatggacgcattggtggagagtggactgaagtgtcagggcgtagtgcagtgcagacggagacagtgctgagagaaggccaatatgccgagcgcatcaagcctgtgctgactgatgaaacaagatgggacccgggcccctgctggagacatgacaaactggaggccagaggaagctcgtacaagaactttaccaacgacgcaatcgaggggacgacacgtgaaacgtcgactcaatctccgacgtaagggagacgggcgacgacacgaggcacacaatggggaaaacactcagtgaagacagaccgcatatgaccatacgaggacacaaggagggcgacaaagagacgaacatggcacaccacacgaggggagggggaccactacaagaacctagcacagaacacgagaaaagggcccgacacaaatggaaaattgatgggggccaaagagctaaggacacggaccaacaaaggaaggaggtgaacgggacgacccagagaaaggagggaggacaatgaacacaaaaagaagggggacaccaagcaggaacaaacggggcaagcacagggggcaccaatgtcgatgtgcaacacacacacccgagagaggtgaaccacgagggaaacacgcacatgggcaccccacaaaggaacacaaaggagggaccagcagacgtaacgaacaaagagaaaagagacacaaagtgacccgaaaaagaggggaacaacaac

SEQ ID NO: 561517 - DNA, 236 bp, Homo sapiens
ggtcggaccgtctctccccagaataagggactacaggcgtgtgcaacacacccggctaatttttgtatttgtagtagagacggggtttcatcatgttggccaggctggtctcgaactcctggcctcaagtgacacgcctgcctcaacctcccaaagtgctgggattacaggcgtgagccaccgcacccaggtgaaagctattttctgtaagcccttgaaaaaaagttgtgccactt

SEQ ID NO: 561518 - DNA, 169 bp, Homo sapiens
tcactcgccagggtcatatcttcgcatgggcttcaccgcatgagccagtatagctggcctgtgggacccggtaacgcagctggaggcttgggttttgctgcgtcgcgtgaaggatcctgcgctggcgcccccacctggtgatgccgagtccctgggggcgggcagaggg

SEQ ID NO: 561519 - DNA, 948 bp, Homo sapiens
  misc_feature (75)..(76): n is a, c, g, or t
  misc_feature (83)..(83): n is a, c, g, or t
  misc_feature (118)..(118): n is a, c, g, or t
  misc_feature (144)..(144): n is a, c, g, or t
  misc_feature (158)..(158): n is a, c, g, or t
  misc_feature (170)..(171): n is a, c, g, or t
  misc_feature (173)..(173): n is a, c, g, or t
  misc_feature (192)..(192): n is a, c, g, or t
  misc_feature (379)..(379): n is a, c, g, or t
  misc_feature (394)..(394): n is a, c, g, or t
  misc_feature (463)..(463): n is a, c, g, or t
  misc_feature (506)..(506): n is a, c, g, or t
  misc_feature (552)..(552): n is a, c, g, or t
tgcaggaattcggcacgagggttcatctacaatggttaccataaaaaatctggcaggattttaaaactcaatcannctttccnttgagctagtgacttgaaaagaaagagagaagganaagagaccatattaagtccatgccanttgcttggctagantatgatcaacgnntngtagtagactcaagttttnaaaaaacactattttacttaaactgtttcttatctaaattcttgcagagtgtcaatgttatcattgattatagaagacagggataatacctttatctctggccactcaaaaatgcagtgccaggagtgctaaacctagaggccaatactgatgacctggaaggtgatccatatgattgtcaccacanagtgctcttacacanaaacttgaaaatttgaaaaacatgacttttttaagcttctcatctcaccagtcttggtgttatattganatctatcaaagtagaaataattgtgctgatacacatacatggnaacataaggagtggatcctctggataaatgaatcacactctggtancaactacagaacctcttgatcagccagtagtggatcaggctgagccccgatgcccacaacactgaacatgacagaccttcgaacctgcgtctgtgatgtttaggctttgaagtgcaatggaatgatatgccgctgcggttatgaaagtggactaagcagagtcacctcttagtatggacgattcaaggaggttgcttgccaaaatttgcctgataagggcctgatcctgaaaaaaaaaaaaacattatcctaatctgtaaattatttctacatactactaaacagaaaaaaactcgggggccggaccaatgcctctatggcggtccaaatatgtcggcttaaacacggctggtaacctggggcccactaaacttgaaaaacccttccctgggaaat

SEQ ID NO: 561520 - DNA, 123 bp, Homo sapiens
  misc_feature (67)..(67): n is a, c, g, or t
atacgttaattatcatctggggcattaaacaagacttaatttaagttggcccaaataccaaagcatntgaatggccccaaatgggaccagaattttaaattcagatggggcttaatcacatta

SEQ ID NO: 561521 - DNA, 820 bp, Homo sapiens
gctactgccagctgtatgcctgagtgatgctaactacctgcgccgtggtgccggggccgggtcctgtggcccgatgtccccgctgggtccctggtacctgcgaggaggacgtgcgggggcctggagcccgcgtcctgtggcccgctactattgagggtcacattaacatgtcactttgaggatgctgtatgcgaattgcatcagccagatgtgggtgactagaggactgtacaacacaacttggtaactggagaatattgtcctaagaaatcaaagcgttctagaacacctatccaaaagtgcatgtgttagcatataaggcacaggcctctggaaatgtcagccaatgatccgagtaccatatttacgtcaggttgtacccagttaggttaagaaagcgtatgcgccgtgagacccttcacttgtctgattgatctgtcagggagaagtataagtccatgcaggtgtttgaccaaaaatgataccaagttcttgagatgagatccgaagcgaaaagagataagcatgcattgtgaagaaaacagtttgaagaagtcgaccttttcaggatgcaggcagcatgaggaaacttgcagcaactagtttcagcgaaatggatgcagcaaagcaacatggcctcagcaggaaccgaaagcaacagcaggagctgcactggccctgaaagcaagacccgtcgggctcagagcccagaaggccaatcggccatactttcctgaaaaaatctgaacaggccaggttggacctagctgagaagttcaaggaggcttgaatgcagaaagaaatgggagaacttcttgag

SEQ ID NO: 561522 - DNA, 216 bp, Homo sapiens
cattttttttaaataaaaatactactaccaatttagaacaggtcagttaaaattaggtttctccaggtaaacacaggctttacagaaaacattatatattgattattctgaatctgagtgctctaagtaattttatgttatttattattgttccataatatttcattattttgaattgttgatacacaaagaataaacttgcccttgaaaaaaaaa

SEQ ID NO: 561523 - DNA, 104 bp, Homo sapiens
cattggataagcggatgaggggaagatagcaggtttcaaaggtcatttgttctcgtcatcagctcaccaccagctgcctcagtcggaatcgcctcagttgatag

SEQ ID NO: 561524 - DNA, 202 bp, Homo sapiens
cggactctactactgtatctacctagaaatgaaatggacgtacggacattaagagaagaatcttcagagagagtaacaatctgaaataacaggaagggaagaggaaaagaaaagatccagagccctagtatattaatatggagacccaggctgtaggaatgaacaaggaccatacatttttttttttttttttttttttttt

SEQ ID NO: 561525 - DNA, 1161 bp, Homo sapiens
  misc_feature (314)..(314): n is a, c, g, or t
  misc_feature (322)..(324): n is a, c, g, or t
ggtaacttcttgatgttgccgtggcatttgtaaactgtcatggtgctggtaggagtgtagcagggaggatgatgggaggtcagtcttgtctctattttggttttggtgggttttggccagctccttcactgcaacctgttttatcagcaaggtctttatgactggtattttgtgctgaccttctatgtcatcctgtgacttagaatgccttaaccatcagggaatgcagcccagtagtttcagcctcatttttcccggctcctattttagatggagttgctctggttcacacacctctgacatgatcattgccnacgcgctnnngcctcccgggttcaagagatcctcctgcctcaccctcccaaggtgctgggactacaggtgtgtgccaccagctcggctaatttttgtattttttgtagagatggtgtttttccgtgttgcccaggctggtctcaaactcctgggctcaagcaatccttctgtctcagcctcccaaagtactgggattacaggcatgtcccaccatgcccagactaatatttacttttaatcagactaagatagggttactacttgagttgctatggctccagctgaaagaaagcccgtgcagtcatatcacgcgtaaacatttgctttatgctaaaaatatggtggacctggcattacagctattacaaatctcctaagatgtctcgggtagtgtattagttacttttcatactgctatgaagaaatactggaaactgggtaatttataaagaaaaagaggtttaatgtactcacagttccacaaggctggagaggcctcagaatcatggtggaaggcaaagaaggagcaaaaaggtatgtcttccatggcagcaggcaagagagcacgtgcagggaaactgccctttataaaaccatcagatttagtgagatgtattcactatcacgagaacagtatgggaaaaacctgcccccatgattcgattacctcctaccgggtccctcccacgacacatggggattatgggaactacaattcaagatgaaatttgggtggggacgcagccaaaccatatcgggtagcaacaacctagggtcagttttgcaggtggtaaagccatttaccaagatagtgtaacgtaaagaagggcagatttattcggagaa

SEQ ID NO: 561526 - DNA, 984 bp, Homo sapiens
ctagaggatcccgttgccttgtctggccatataagggaatagtcagaggttcgggaattaaaatatggacatacgttttgcagtgggccatcatccaacccattaccatgggaatgatctggaagagaaaggtaacactgatgcagaagggtgaacccaaggagggagctcttgggaaagctggaggatacaacccagagccagaaatcttcctgccaagcttttttattttttatttttttttgagacagagtttcgctctgttgcccaggctggtctcaaactcctgggctcaagcaatccttctgtctcagcctcccaaagtactgggattacaggcatgtcccaccatgcccagactaatatttacttttaatcagactaagatagggttactacttgagttgctatggctccagctgaaagaaagcccgtgcagtcatatcacgcgtaaacatttgctttatgctaaaaatatggtggacctggcattacagctattacaaatctcctaagatgtctcgggtagtgtattagttacttttcatactgctatgaagaaatactggaaactgggtaatttataaagaaaaagaggtttaatgtactcacagttccacaaggctggagaggcctcagaatcatggtggaaggcaaagaaggagcaaaaaggtatgtcttccatggcagcaggcaagagagcacgtgcagggaaactgccctttataaaaccatcagatttagtgagatgtattcactatcacgagaacagtatgggaaaaacctgcccccatgattcgattacctcctaccgggtccctcccacgacacatggggattatgggaactacaattcaagatgaaatttgggtggggacgcagccaaaccatatcgggtagcaacaacctagggtcagttttgcaggtggtaaagccatttaccaagatagtgtaacgtaaagaagggcagatttattcggagaa

SEQ ID NO: 561527 - DNA, 378 bp, Homo sapiens
  misc_feature (46)..(46): n is a, c, g, or t
  misc_feature (67)..(67): n is a, c, g, or t
  misc_feature (241)..(241): n is a, c, g, or t
  misc_feature (360)..(360): n is a, c, g, or t
ggccacgtttgggagaatcatttgaagcccccgggagttgaccaanccctgggcaacataagtgaanaccttgtccttattaaaataaataaataaataaataggttgggcactgtggctcatatctgtcatccccagcattttgggttgccaatgcaggaggattgcttgagccccaggagtttgagaccagcctgggcagaatagcaagactccatctctacaaataataaaatattanccaggtgtggtggtgtgcacctggggtcccagccacctgggaggctaaggtgggaggtttgctcgaggctgcagtgaactgtgaatgcaccactgcattccagcctaggccacagaacnggaccttgtctataaata

SEQ ID NO: 561528 - DNA, 960 bp, Homo sapiens
atactaatcgctgtgcattatagctactctcataaccctcaagacccactccctcttagccaatatgtgcctatggccatactagtctgtggcccgcctgggaggcagcggtgggcctagccctactagtctcaatctccaaccacacatggcctagactacgtagataacctaaacctgagctccaatgctaaatgctatagtcggtcccgaactcagtgtgatattagctaccactgacgagtgactttcgcagaaaaaacgacataagttgagagatcaacacaacccgaccccgacaggcctagatttattgagcatcgatcccgtcctactattttgtatagaccataggaatcaacgagactaggaccgtattataggctgttccgccaagccttggccctccgtacccccataacaaaccgccccctcgtagtacttaatttacctgagtcctagccctgcacaatcatggcaagccgaacgccgacttagtcgcagggaaccactagtcacgaaaagaaactctacgctctctatactaatctccctacaaatctcgctttaattaatagcattcacagtcacagaaactaagtcatattggatatcgttcttcgagaccacgctgatgcccacctgggtatcatcacccgatgaggagaccagccagaacgcgtgaacgcagtgcagcatagttcctaattcttagacccgtagttagggtcccgttccgcttactccatcgcactaagttttacagttcgacagaaaacctaaagctcataaaacattctataatcaagctcacggccaagaattattcaagtccggaggcaacaatttatatgactagttacagcaagttggtacgaaaagaactctttaggtccacttgatcctaaagccagtaagccaacgggtcaagattgcggacccaacggggggtagcccaaa

SEQ ID NO: 561529 - DNA, 336 bp, Homo sapiens
ccccccctttttttttttacccccaaggggggttgagggggggttttccccccggaaagcccttttgcccccccccggaaaaaagggggttttcccccaaaagggggggggcccccccccccccccccattttgggccggggggtttttccccccccaaaaggttttgggggcccccggggggtttaaatgggggcccaaaaggggggggggccggcccccccccccccggggggccccttttccccccccgggggggtttttgcccccccccccccccttttaaaaaccccggggggggggggttccctttttaaaaaaaaccttttttccttca

SEQ ID NO: 561530 - DNA, 964 bp, Homo sapiens
gtccaagttagccatggttacctttaagccggcattaccggaattattggccccttccccaggccaagtttaaagtcaccatcttactcattccccccaatgtctgataagcttttccgagtgaggaaaaagttagtgactttttagaccagacatgcgccgtaaggcccttttttttttttttttttgagatgagagtgtctcattcctgttgcccaagactagagtgctgtggcatgatctcagctcactgcaacctctgcctcccgggttcaagcaattctcctgcctcagcctcccaaagtactgggattacaggcatgtcccaccatgcccagactaatatttacttttaatcagactaagatagggttactacttgagttgctatggctccagctgaaagaaagcccgtgcagtcatatcacgcgtaaacatttgctttatgctaaaaatatggtggacctggcattacagctattacaaatctcctaagatgtctcgggtagtgtattagttacttttcatactgctatgaagaaatactggaaactgggtaatttataaagaaaaagaggtttaatgtactcacagttccacaaggctggagaggcctcagaatcatggtggaaggcaaagaaggagcaaaaaggtatgtcttccatggcagcaggcaagagagcacgtgcagggaaactgccctttataaaaccatcagatttagtgagatgtattcactatcacgagaacagtatgggaaaaacctgcccccatgattcgattacctcctaccgggtccctcccacgacacatggggattatgggaactacaattcaagatgaaatttgggtggggacgcagccaaaccatatcgggtagcaacaacctagggtcagttttgcaggtggtaaagccatttaccaagatagtgtaacgtaaagaagggcagatttattcggagaa

SEQ ID NO: 561531 - DNA, 347 bp, Homo sapiens
  misc_feature (225)..(225): n is a, c, g, or t
  misc_feature (232)..(233): n is a, c, g, or t
  misc_feature (261)..(261): n is a, c, g, or t
atggtgtgtagacagcatggaccagctgttgagccagattgggcaggaaaacacagaggagaaccgctgttctgaccgccaggttctgatcagtgctgacgaccgtgtgaaaaagtgcattggaggcgtcattttctaacatgagaccctgtaccagaaagatgataatggagttcccttcgtgcgaaccatccaggataaggtcatcagcgtgggcatcaaggntgacaannggtggtgcctctagctgggactgatggngaaaccaccactcaagggctggatgggctctcagaacgctgtgcccaaatacaagaaggatggtgctgactttgccaagtggcgct

SEQ ID NO: 561532 - DNA, 236 bp, Homo sapiens
cccataccggtgataccccatagtgctgggattacaggcgttgagccactgtgcccagccaaagtttatcaagtctttctaaggcctaaaacaaggcagaaattactaagagtctcactctattgcccaagctagagtgcagtggcacaatcatggctctctgcagccttgacctcccaggctcaatcgatcctcctgcctcagccttctcagtagttcggtactacgctttggca

SEQ ID NO: 561533 - DNA, 864 bp, Homo sapiens
agacagggccttgctctgttgcccaggctggagtgcagtagcatgatagttacaggaaaggggtcccaatctagaccccaagagagggttcttggatcttgtgcaagaaagaattcagggtgatgccacagtgtgaagtgaaagcaagtttattaagaaagtaaaggatgaggggcaccgtggctcactcctgtgatcccaaagtactgggattacaggcatgtcccaccatgcccagactaatatttacttttaatcagactaagatagggttactacttgagttgctatggctccagctgaaagaaagcccgtgcagtcatatcacgcgtaaacatttgctttatgctaaaaatatggtggacctggcattacagctattacaaatctcctaagatgtctcgggtagtgtattagttacttttcatactgctatgaagaaatactggaaactgggtaatttataaagaaaaagaggtttaatgtactcacagttccacaaggctggagaggcctcagaatcatggtggaaggcaaagaaggagcaaaaaggtatgtcttccatggcagcaggcaagagagcacgtgcagggaaactgccctttataaaaccatcagatttagtgagatgtattcactatcacgagaacagtatgggaaaaacctgcccccatgattcgattacctcctaccgggtccctcccacgacacatggggattatgggaactacaattcaagatgaaatttgggtggggacgcagccaaaccatatcgggtagcaacaacctagggtcagttttgcaggtggtaaagccatttaccaagatagtgtaacgtaaagaagggcagatttattcggagaa

SEQ ID NO: 561534 - DNA, 205 bp, Homo sapiens
cgtacgtgggttaccgtatgtacctcatataaattttagttgaatgtaggggcttcatataattgagtttaagcatttgcagactcttccataggtaatatggcccatttgtttttaatttccagatatagaaggcacaggtatccatcctatctcacttcataagtccactacttcacctggctcccctttctaagtactatgg

SEQ ID NO: 561535 - DNA, 259 bp, Homo sapiens
aatttagcatcttggccctaagtcttctctccctcaacgtatttatcccaaacagttttctatatataagaggaattctgctgtctgcccgtcaagatcataaaccttatttaacttgtcagttgacactgagcagcatgggcctcctggagtctagggtcgcatccatcttggtcctataggagcgtgtcctgagcaactgcagcgctgcctccccctgcatcccttcccccttgtgttggaaattaagcctttgcaa

SEQ ID NO: 561536 - DNA, 1065 bp, Homo sapiens
gatcgaggcaagatgcagctcatcatgttctgtgcattctgtaggacttatctgtgtatatagtgtacataaaggacagacgagtcctaattgacaacatctagtcttgctggatgttgaaagaggttgccacgtggtatgacaaaacgtagagttagtaaactaatatatttgtacattcgttttacaagtcctaggaaagattgtcttctgaaactggatgtcttctgggttgatggagatgggaagggttctaggccagaatgttcacatttggaagactctttcaaattataactgttgttacatgtttgcagtttattcaagactgctgtatacatagtagacaaataaactccttacttgaaacatctagtctatctagatgttcagaagtgcccgatgtatgttaaatgtataaggtagtaaaataccacttgtaaatatcttttgctaaaacttccctacggaaaaatgcttttggccacattggacattagtgaagcccacctttggtgaaccaggttatacgtaaatggtactaatacattggttcccaactaaggttctagaaggaggcgtacgggcagggacaagcaaatatgccacaacagggaactacttaactacacggtgttcactaccttcggcacgaatcatagaggacaaaccagaataccacatctgatatagacgagcatatcagtatagcacctgtataatacaaataagacggaacgccacatagacactacacgacggaaacaagagaccgaatcagcagcagcgacacgacgagcagcagacgacaaacacgagccagcaacaaacaagcagaagcagcacgagaaatagaagagcaggaagagaaggcaaaagaagatgacgacaaaaacgagagcagctagagagagcacacagcgcgaggtaggagaacagccaacacagaacaagaacgagaagacgaaaagaaaaaccccacaatcgccacgacacagcaccagcgcaccaaacgaagcagcagaagcagaaagaacagacaaaagcaccacacaccggccacca

SEQ ID NO: 561537 - DNA, 284 bp, Homo sapiens
ctgtgcttgggctgtgatgcggatcgcgcgtggatgaagatcgtgtcaggaagaggcaaccatctaggatcaggcggtcgtcccgcacgaccgtcctgccatggttcctgcacatgcaccgtgttcacgtggtccagggtctgcggggccaggtggtgcccaaagcaggatttctggaaagcgttagagctcttcgtcactgagcgcctggtccaggtcctgatctgagagcctgaagatgcgcgtcagacgcctgggcgcacgcgggcctcaactgcttggcc

SEQ ID NO: 561538 - DNA, 396 bp, Homo sapiens
  misc_feature (80)..(80): n is a, c, g, or t
  misc_feature (91)..(91): n is a, c, g, or t
  misc_feature (118)..(118): n is a, c, g, or t
  misc_feature (150)..(150): n is a, c, g, or t
  misc_feature (241)..(241): n is a, c, g, or t
  misc_feature (343)..(343): n is a, c, g, or t
  misc_feature (372)..(372): n is a, c, g, or t
cacgtctcgcctcctccccactactttctgggttccctaaggctgccgaagcgatggacctggagccgggtagtgtcccngcattgcgccnggtgcatccaaggcctcaacccgaagncacagccccgggagaggccaggcacgcgaggnagccacagctccaaggggcgccaagaaaagcaatgctcactcgccacgcacagggttcccgggaggtaagggtgcgttttcttcccatatncccggtgagaaaacgaggtcgagggaaaaggggatgatacaacttggagcatggcatatggactcagtgaacaaaggggacttgggagcaagaagcaacaancacggcaaaccgcagactcaaaagggctnttccggctttacgcacgcaaccct

SEQ ID NO: 561539 - DNA, 303 bp, Homo sapiens
  misc_feature (102)..(102): n is a, c, g, or t
  misc_feature (135)..(135): n is a, c, g, or t
  misc_feature (154)..(154): n is a, c, g, or t
taggtcagtgaaagggcaagtagtaagcggcctgcctcccttccctcagacctttccctcataattccagagaagggcatttttgtctttttaagcacagantaagggtggaacagtccatccttatccctcttntgggtggggcccggacccntaagtctttcccccggttaaggggtgggcctcattcctttccccccaagaatccattttagggcctcctgccagctgcccgggggctttttccaagggccatcagtgtcttgcctagcttgagggcttaagcccttatgctgtgttagt

SEQ ID NO: 561540 - DNA, 100 bp, Homo sapiens
ggtgtgttggggggagtagtcagtgacttcaggcaccctacaggcgctgctgctggccggctgcttcctcttcatctcccgttccaagccccagcgacca

SEQ ID NO: 561541 - DNA, 215 bp, Homo sapiens
  misc_feature (116)..(116): n is a, c, g, or t
  misc_feature (172)..(172): n is a, c, g, or t
aagagaatcaggatttcctccaggccccaggatggctctttcagttgaagcgccacaaaaggccaggcgcggtggctcgtacctgtaaccccagcacttcgaccgaggcgggaggntcacctgaggccaggagttttagaccagcctgggcaacatagtgagaccccatttntaaaaataataataataataattagctgggtgtggtggcatgc

SEQ ID NO: 561542 - DNA, 301 bp, Homo sapiens
tctggctgctcttgaggatacactaaagccaaccctcgacacacacattcacagttgcaggcgtgcaggtcggtggtgttacattcacacttgcagacgtgcaggtcgggggtgttacacacattcatgctgttgcaggcgtgcaggtcggtggtgttacacacattcacactgttgcaggcgtgcaggtcggtggtgttacattcatgctgttgcaggcgtgcaggtcagtggtgttacacacattcacgctgttgcaggcatgcaggttggtggtgttacacacattcacgcttttgca

SEQ ID NO: 561543 - DNA, 151 bp, Homo sapiens
gtggcacctatgatcctttctcgagctctcccaccaagagctaaaagcccagaacacaaggggcttccacaagccctatcccagtccaggggtagtatgtggtgtgatgggtcagtatccatgacatattcattattttttaaaatatcct

SEQ ID NO: 561544 - DNA, 386 bp, Homo sapiens
agggttaatgtagacacaataaaaggagggctgaagttgaacccaacttcctgggaacttcgggaaggagccccttggcccagcccttgcccatgagctccgctaccctgggggcgattgtagctctgacatctggatttgaactccaccctcatcacccacactccctattttgggccctcacttccttggggacctggcttcattatgctctctcttggcacccgacccttggcagcatgtaccacacagccaagctgagactgaggcgttaccacactcatagacattggcgggccactgttgcttgttgctcactgtgctgcttttccatgagctcttggaggccccaagaaataaactcgtaaccctgtcaaaaaaaaaaa

SEQ ID NO: 561545 - DNA, 851 bp, Homo sapiens
tgaagaaagggggcatattctctgcagaatttctgaaagttttccttccatctctgctgctctctcatttgctggccatcggattggggatctatattggaaggcgtctgacaacctccaccagcaccttttgatgaagaactggagtctgacttggttcgttagtggattacttctgagcttgcaacatagctcactgaagagctgttagatcctggggtggccacgtcacttgtgtttatttgttctgtaaatgctgcgttcctaatttagtaaaataaaagaatagacactaaaatcatgttgatctataattacacctatgggatcaataagcatgtcagactgattaatgtctactgtgaaaatttggtagtaaattttcatttgatattagatataaatatctgaataaataattttaatatactagtcatgatgtgtgttgtattttaaaaattatctgcaacttaattcagctgaagtactttatatttcaaaagaatgaataacattgataataaaatcgtactttaaggggtttgtccaaaataatattgtggctttatttattcacacctaattggtagaacagtcattatttcacttctacactgggtgcggctggcttacttaaagacagactttttattaccaatcctaattggcctaaccacagaaaccaagattacggctacaacctcgctgtgacagtcggtaccaaaactccttgccgcgcgctaaaggagaagccccacattaggggggcccgggctaaccttggggaggcacacacgaataccgtttacccccgggagaacccggggcacgtgcaacacctcacgctcaag

SEQ ID NO: 561546 - DNA, 110 bp, Homo sapiens
tctacaggatccccctctctacacattcagccctgcctgcggggagggcgaggacaagccgtgctccggccgtgcgggcagctgccagtgcgggcgcagtctgttgatca

SEQ ID NO: 561547 - DNA, 99 bp, Homo sapiens
cccccccccccccccccccgggttgattttttcaggctttggccccccccaaggggaaggggccacccccccaaatgggtttttaatgatgctttgata

SEQ ID NO: 561548 - DNA, 960 bp, Homo sapiens
  misc_feature (595)..(595): n is a, c, g, or t
ggcggaatgggagtgggaattctgtttggtatgtagcgttcttggagtggatcgggcctctcgcgtgttctgatactccccgttgcattctgctgcctcggtgcaacgtaggatagtccactgggcacacgcgcatctcaccagggaagctctacaaaattgaatgtctgaaacataaggtcgaatatcaccatgagcagtgcgcaatagctgtggattaccatacggtgctcctgtctggctagacgcttccaaagacctgtgagcttggaggctcatggaactagctcttgtgcggagcatttggtatatcaagacgtcacgtgacactaaccttgcctagggtccagaaattggcctagtgaaagaacggaaagcaacaacctatcagctactggcaagacagtcattgcctaaatagaagataacactaatagaatggctcattgagaaaaggtgacctaatgtctggattggccagttgaccatgtggtcatgatgccatgtgccaagaagtcaggtagagcctgacgtccaggatagtcttgcatgcctctgtttatcacgcaacgagataaaccttgttcgtgctgangccctagtttctggggttgattaacgtagccctctacctaactgccaattgaaatagctactctgggactggtgcctccatgacagacacagtaacgaccctgatgatcaagcgtctttactcctgaaatggtacagtttcttggcagctaggactgagtggtgtaatgcgcggagcttgaattgggacgtctgaatcccaaaacctctttcgctattgggacactaattggttgaaccggatactgtagttgcttcattcttgaggatcaactcttgatggcaaatgcgaatgaagtcggaatgcaaatattacctagatagggtcctgggaatttcggtgaatactttgagaggccattctaa

SEQ ID NO: 561549 - DNA, 149 bp, Homo sapiens
ttcccttgatctcttaggggccagctgagcagcagcttcgaggcacctactgcgtgggcacccccccaacagtcaggcagcccctttcctggcagcacagcatggctctcttctccctgcccactgggaggagctccttgtggacatgg

SEQ ID NO: 561550 - DNA, 119 bp, Homo sapiens
catggatttgctggtgcagtacaactaggcttaatactcgaattcgaggctttattggatgctgctggtgtggcctctcctgttaactacagcagaagttgtagtcacagaaattccca

SEQ ID NO: 561551 - DNA, 470 bp, Homo sapiens
  misc_feature (36)..(36): n is a, c, g, or t
cagctccatctgtccggatgcctcttgtggcccccncagtgtcagggctgctctgagttggctgagcctctgtccagggctaggccatggccctccccgccccacgcactccaggccaggggcagtcagtgaagaggcaggaaggtccagacagctctacccctggccagagtgccagcccccgcaggcaagagggcttgctgggcagaacttagttggcgagggtgaggactgctgtggtcacaggcctcccgaaggacagggaccacagaacctagagggtgggaagggctgggagcaggtctggagtggggctcggggctgagggtgcacacagggggcctgctcagggacaggaaggacagctgctcaccctcaagcttcctgctggctatttaaagactcccttttagtctagaatagtggccttcccacagttttggtattaaaatgtccttttgtgactggaa

SEQ ID NO: 561552 - DNA, 252 bp, Homo sapiens
cgttttgcgagcttctctagcactatccaccttcggggtcgctattgctgcctcgtcgattatgcagacagcctgcttgctgctgcggtgtcatctagagcacgctggagcagaaggctgttggagctggcgaagtcaccaagtctgcccagaaagctcagaaggctagatgaatattatccttgatacctgccaccccattcttaatcagtggtggaagaacggtctcagaactgtttgtaccttttgggc

SEQ ID NO: 561553 - DNA, 228 bp, Homo sapiens
tctagaggatactggcgccctagcacttccggacgggctgcgcacaacgagggcacacgggcagtggacagaagcgatccatttcctcgagcgtcaggctcccctggagccgatcgaaccgtcctgccctgctcgcccgcgccgcgcgcgaccatgtccgcgagcagggtcccagcgggcgcaccgggcatatctcggccgatggcggcaggaattgctagggcggcc

SEQ ID NO: 561554 - DNA, 345 bp, Homo sapiens
gcggggctcatctctgagggctgcgttctggggtaggagtttcgcctcagtaactgcagcacttatctgcccatggcaacctgtgctgatttcacatatctcagaaaatcccgctcttggagtactacacttgtaacatctgcttagcacattttgaaaaatcgacgatgacgagtaataaagtgtggacaaagctctgcagggagctcgtaagaaacgctgatacgaggccgggcgtggtggctcatgccaatattcccagaacttgggacgccgaggccagcggatcacgaggtcaggagatcgagaccatcctggccaacatggtgaaaccccgtctctact

SEQ ID NO: 561555 - DNA, 399 bp, Homo sapiens
cgaaaacgcaagaagactgaagactcttcttcaggcaaatcagtggcgtctgatgtccctgagggtaaagttaaaatgacatttttttcttacccatatgaaatctaaaagtcggccgggcgcggtggctcaagcctgtaatcccagcacttcgggaggccgaggcgggtggatcactaggtcaggagattgagaccatcctggctaacacggtgaaaccccgtcagtactaaaaggtacaaaaaattagccggacgtggtggcgggcgcctgtggtccaagctactcgggaggctgaggcaggagaatggcgtgaacccgggaggcggagcttgcagtgagccgagatagcgccactgcactccagcctgggcgacagagtgagatccgtctcaaaaa

SEQ ID NO: 561556 - DNA, 288 bp, Homo sapiens
tctggggctttatacagtgcacacaaagtcatactgaaagtaagacccatcccttgggcggcgtatctggtataaagtaactttactccatatgtacgtgtgacacagaagagctttacaccacgtgtcatcatgtaacctatagagacaaaactactaccacaagtaatatgggcttacaattataacacacaacctgtgagagggcatgatacaattaaatataggatagccatcttggatcattatcactactactgtctgctcaaatttctgtgcccataccaa

SEQ ID NO: 561557 - DNA, 521 bp, Homo sapiens
cggatccttagttcgacggacattcacatatctgcatgggctgggctggacagtgtcatgcaagggatgtgatacaagtgcaggttaaagcagaagtgtgtgaaagtagtaggatgggtgagttaagagtgggatggaggccaggtgtggtggctcatgcctgttatctcagcactttgagaggctgaggcgggcggattgcctgaggtcaagagtttgagaccagcctgactaacatggtgaaacgctgtctctactgaaaatacggcaattagtcgggcgtggtggtacgcgtagtcccagctacttgggaggctgaggcagaagaattgcttgaacctgggagacggaggtcgcagtgagccaagatctcaccactgcactatagcctgggcgacagagcaagactccctctccaaaaaagaggaacacaaaaaaggacgaagaattgagatgtataccaggcttaatcttcagggtacctctagatcaaggctcgtctaacacttgtggcccaggat

SEQ ID NO: 561558 - DNA, 335 bp, Homo sapiens
  misc_feature (7)..(7): n is a, c, g, or t
tggtaanataatgggggatacactgcacaagaactctcttgccaacaccacgtaagtcccatggctttccattcgtcttccaccatgatagtgaggtctccccagccatgtgcaacatgtgagccgcataaaacttcgtttcctgttaagaaattacccagatttcaggtcatgtctattattacgcgccacgcagaacatgactaacacacagtagctacaatctgctgatcacttggaaaggggcctcctagcaagacgaatgtcacactagcacacgactctcacaaaccactgacttttccacattgccctcaagttcagcagccatgggt

SEQ ID NO: 561559 - DNA, 141 bp, Homo sapiens
gaccacgcagtggtgatcctgagagagaggaagtgtgccctgcatcttgaggctatgggtctgtccaataattttaagcccctgggctatgctaacccagtgcacttatacacacacacatatgaatgtgcacatacatac

SEQ ID NO: 561560 - DNA, 134 bp, Homo sapiens
  misc_feature (34)..(34): n is a, c, g, or t
ttatccggtaccacgcagctggtttgccatttcntgccatgtatgtgctacaaagagtcgggaaagggattccatgaggccaacagttcggatataggacaaaaaaaaagaaacttttaacctctgttctgaat

SEQ ID NO: 561561 - DNA, 148 bp, Homo sapiens
tgtgtacagcatttaccaagatagattgtaggtaaagaagggcagatttattagagaaattgtgaaaatatgttagcagatgggcagctcagacagagtaaggggcatacctgcaaacgaggcaacgggctaggaggaaacgtttaat

SEQ ID NO: 561562 - DNA, 999 bp, Homo sapiens
  misc_feature (422)..(422): n is a, c, g, or t
  misc_feature (454)..(454): n is a, c, g, or t
  misc_feature (549)..(549): n is a, c, g, or t
  misc_feature (647)..(647): n is a, c, g, or t
  misc_feature (664)..(664): n is a, c, g, or t
  misc_feature (891)..(891): n is a, c, g, or t
caccgagtgttcagctgggcgggggcaggaattgggtggtcagcaggccgccaggcgttgcctgggtgccgaagcgcttgagcagtgctgcttgcttgtcggcactgaggcggttccagacttcgaccatctgcaaggcagcgtcgagtacagcggcgtccggcgtgtcggaaggggaagtggtcatagtgaaggtctcggataattcaggcagtgtggaaagcgctcaaaggcgcgctttccacacggtctggtacggcgtcagtctcggctttcgcgctcgactggttttgcttctttggcctcaggctgcttgtcgctggcctgctgcggtgttggctgctcagttgggtgcaggtttgggaaggggagattaggtatctcgtgcatcgtggtcgctcctcgcaaggtctgttttttcnatcgcaggtgattccgcgctctcaaaaagccntggcaggatacagcaccgtaaatgacaaaaagacttttatctccacagatgcacaatttttaatggttcaggcgcaagtgacatgaggtcacacncctagaacggcaccttgcccaggatcatgtcgcggtacatcacaaaatcccccagcaagctgtagaacgggtgctgaaaggtggcggggcggttcttntcgaagaagaagtggcnatccaggaaagctgtagcctgccaggggcaacgccagcagcagaaccaatgagcctctgccgatggcgtacgcgagaatgcctattaccagggtggtgccgataaagtgcaggcgtcggcaggtgctgttgccatgttcgctcaggtagtacgggtagaactcggcaaaactgttgaatttcttgatgttttccacggtcaccggccctctggttgctgtgccgccnacgggtgcgcggcggggagcttatttgagtctagagtgatcagtgctaacagccagtgacaatagatgccactttagtatccttggagataggcgcgtaaatagcggc

SEQ ID NO: 561563 - DNA, 473 bp, Homo sapiens
  misc_feature (42)..(42): n is a, c, g, or t
  misc_feature (49)..(49): n is a, c, g, or t
  misc_feature (60)..(60): n is a, c, g, or t
  misc_feature (112)..(113): n is a, c, g, or t
  misc_feature (170)..(170): n is a, c, g, or t
  misc_feature (471)..(471): n is a, c, g, or t
tgagaaaggggtattgaaacttccaactataattatgatttntctgttntctttacagtnctctcagtttttgccttcatatatatatacatatatatgtatatatattatnnttttttttttttttgagatggagtcttgctctgttgcccaggctggagtgcagtggngtgatcttggctcactgcaagctccgcctcccaggttcacgccattctcctgcctcagcctcccgaatagctgggactgcaggcgcccgccaccacgcccagctaattttttgtatttttggtagagacagggtttcaccatgttggcaaggatggtctcgatctgacctcgtgatccgcccagcttagcctcccaaagtgctgggattacaggcatgagccactgcacccagcccatatattttaaaagctctgttattggggtacattaaacatttagggttgttatatcctttgatangg

SEQ ID NO: 561564 - DNA, 201 bp, Homo sapiens
  misc_feature (201)..(201): n is a, c, g, or t
aggacatccttcagagattggcaccattccttaagatgtatggagaatatgtgagaggatttgataatcagttggaattgggttaagaacatgacagaacgtattccccagttcagatcagtggttgaagagattcagagacagagaatctgtgggagcttaactttgtcagcatcacatgctagagcctgttcagcggan

SEQ ID NO: 561565 - DNA, 332 bp, Homo sapiens
tctatccttctcagtatctcagttacctgattcactgaggattctgggaccagttcatacaagttctatgcacccctcttctatgtctcattagggcagactcccaatgtccctgagactaacccactttcaatctgcccttcaatgtctcttttattcctcaactccaacaatcttcatccataccaaagaaactcatttctcatggacagcagcaatatgcgaattactctgcctctaaaatcttgaactatagtatctcaacagctagtagttcttcagctctttacaattaacaacagctgctcccagggtcattctgtctccagtat

SEQ ID NO: 561566 - DNA, 636 bp, Homo sapiens
  misc_feature (23)..(23): n is a, c, g, or t
  misc_feature (27)..(27): n is a, c, g, or t
  misc_feature (30)..(30): n is a, c, g, or t
  misc_feature (72)..(72): n is a, c, g, or t
  misc_feature (91)..(91): n is a, c, g, or t
  misc_feature (102)..(102): n is a, c, g, or t
  misc_feature (112)..(112): n is a, c, g, or t
  misc_feature (135)..(135): n is a, c, g, or t
  misc_feature (145)..(145): n is a, c, g, or t
  misc_feature (189)..(189): n is a, c, g, or t
  misc_feature (214)..(214): n is a, c, g, or t
  misc_feature (314)..(314): n is a, c, g, or t
  misc_feature (397)..(397): n is a, c, g, or t
  misc_feature (563)..(563): n is a, c, g, or t
  misc_feature (575)..(575): n is a, c, g, or t
  misc_feature (590)..(590): n is a, c, g, or t
cttctggggtccggcgccctggnttcntgnttctgccgctgccgccgccggtataccagtggctcggcgtgntcggctcccacaggcttgnagaatagaatnagaaaagaanttaggggggcgcggtggaaagtnggccggtgtnggaggaaaggtgaaatgaatttttaagcgaaaagctaggggaanaggtaacaaaatcttgtttgcaaanaagaaaggaagctaatgaatatctgcaaagtaaggagtttgactcagtaattttctcattcatgcataaaaagaagctaaaaatgacacagcttatttancatgcccctgacactgcactgagcactttatgagcttgaactctgttaatcctcacgaccacctcatgagactctccagaaanagcaacagtaatggagtacatgagcactggaagtgacaataaagaagagattgatttattaattaaacatttaaatgtgtctgatgtaatagacattatggaaaatctttatgcaagtgaagagccagcagtttatgaacccagtctaatgaccatgtgtcaaganagtaatcaaaangatgagcgttctaantctctgctgcttagtggccaagaggtaccatggttgtcatcagtca

SEQ ID NO: 561567 - DNA, 469 bp, Homo sapiens
agcgggggtgacttcaaccccctcttcgggaggctggtcgtcatgatccggaccccattgtcggcctctgcccatcgcgcgtgctcctcccaggactcccgacggccgacccccgacgcaacatgcagcccacgggccgcgagggttcccgacgcgctcagaccggacggtatctgcggcgtcatgctgctccatgctactgtctgctgtctgctgcggcatgcccgtaacccgcgcggagaccacggccgggtcgtccccgcagagaccctcgtccacgactgggctgcccccaggcctcttcaccacgtccggggtgtcccgcagcgccctcgacataccccaaggcctcacatacgcgcaggcacacccgcaaaagccctgggaccttcggaggtcagcgcgcatggcccgtgatgcgagagttgtgcccagctcgtggacaggccgacaaaatgacctgcaccca

SEQ ID NO: 561568 - DNA, 421 bp, Homo sapiens
ctttggttatagctgtctttctctttcttattcggcgattctctaaatagtcgttcgatgtagattattgttatcaggtcgctagggcgccatgtggatgaggaagaggtgtagaacaagatagtccgtattgggtgcgtacgacggacagagtggagtgaagaagagcgcgcaatcgtgccggccagcattcgttctatgacggccacgccggcgatgttggaatgcacacatcatcgatggtgtcccagaggcttgtgactaatatatgatagaggacgcattcgtatatatagtaaaattaattctcgttgtcgcagcgcggctcagaagtggtatcataactgtttgcaccggccgtggagcacccctggtataaactgtcgcccacccctttgtccgcccaatacaatagacaaga

SEQ ID NO: 561569 - DNA, 138 bp, Homo sapiens
gcccgcctcgtgaactatcacaaattgtccattactcagctagattaagaggtttaaagccacaggacgggcagagttaagagcaatataaagacattgagggattggctgaggctttccctgggaacactgggagag

SEQ ID NO: 561570 - DNA, 122 bp, Homo sapiens
gccgaatgatattcctattcgcctacacaattctccgattcgtccctaacaagctaggaggcgttcttgccctattactatccatcctcatcctaacaataatcgccggtcactagatgggg

SEQ ID NO: 561571 - DNA, 344 bp, Homo sapiens
tgatatagcccatctcagccccgcaagagctaggattaaggcgtgagacacgaaaacatggaggccaaatgagagtattctatagataagaaatagtgtgtgtactcaggagaaatactgatatagagatccaggaatgctgcagacagccataggtggcctttctggtatctcggcaaggagtttgcctatttttccctctctgccgccattgattttcacttgctaatagataactagagcttacccaagaccaggtcatgtgagacacagaatctaagcatagctgctgaagggatgatttagtaaagatctaacctcttctttgggcacacattatggag

SEQ ID NO: 561572 - DNA, 669 bp, Homo sapiens
  misc_feature (644)..(644): n is a, c, g, or t
  misc_feature (669)..(669): n is a, c, g, or t
gcatggtggtgcatgcctgtaatcccagctacttgggaggctgaggcaggagaatagcttcagaggttgcggtgagccgcgattgtgcgactgcactccaacctggtaaacgagcaaaactttgtctcaaaaattacaagaaaattcttgattaaaaaaacaaaaccattatgtgggacgctgaggcaggagaatggtcttgaacccgggagggcagagattacagtgagcagagatcatgccattggtactccagcctggtgacaagagcaatactcggtcctcgggggaaaaataaatcattatttaatcatggtggtttggattggcagggctcaagtaaagctctttgtgacaggggccttttcagcttaaatcaagatattcctgtttcaagggaacatttaagagatttcctagttcaaattaacaggtatgtattaatggctctggcagaaatattaggggtaagatgtgacccatttttatgttacatgtgtagaaatttttataacgtggattggtcaatgccaaataaatgggggtttcaagataatacgtttacaacaattctctgtattcaaaaaaacctgagatggtaatacagttgaacaaattaagtccaagtacggatacgatatgtntcgagaatgttatcggataactttn

SEQ ID NO: 561573 - DNA, 538 bp, Homo sapiens
  misc_feature (48)..(48): n is a, c, g, or t
  misc_feature (57)..(57): n is a, c, g, or t
  misc_feature (115)..(115): n is a, c, g, or t
  misc_feature (119)..(119): n is a, c, g, or t
  misc_feature (122)..(122): n is a, c, g, or t
  misc_feature (125)..(125): n is a, c, g, or t
  misc_feature (130)..(130): n is a, c, g, or t
  misc_feature (170)..(170): n is a, c, g, or t
  misc_feature (172)..(172): n is a, c, g, or t
  misc_feature (297)..(297): n is a, c, g, or t
  misc_feature (338)..(338): n is a, c, g, or t
  misc_feature (356)..(356): n is a, c, g, or t
  misc_feature (439)..(439): n is a, c, g, or t
  misc_feature (479)..(479): n is a, c, g, or t
  misc_feature (513)..(513): n is a, c, g, or t
  misc_feature (537)..(537): n is a, c, g, or t
gaagcgcgcccgaacgaagccgcggcccgggcacagcatcggcccgcngcggcggcngcgctcggatgttcggcagcctcctgctcttcgccctgctcgctgccggcgtcgcagntctncangcntgctnctcccggagccccgaagctgagccagcaagatcaaggctncnctcgcgaggcaacctctgggccaccggtcacttcatgggcaagaagagtctggagccttccagcccatccccattgggaacagctccccacacctccctgagggaccaagcgactgcaagctgangtcatgatctgctcggaatcctcctgctaaagaaggctctngggcgtgacttcaagccngccccgcaccccaaatccagtacaggaggctgctggtacaaatacttgcagaaatggacaccaataatgggggaagacacaanagcgtggcttagattgttgcccaacccagggaaaggttgnttgaattgggaaccttgttgaatgggccccattnttggattgtaaatcctggaggctna

SEQ ID NO: 561574 - DNA, 522 bp, Homo sapiens
atgtcgcgctgctgcggtagcgccgcattgtctgcgctttctgcaatatatggtcgtgcggaactgctccagtttcctgatcaatgaggaatactcatgacctacagtgaattagaacgcacataacttgcatggcccgcacattccttccgcatactaatggatgtgatttcagcgcaagactgtgggcgtgaatgattaggcaggctcgacggtcaaaggtgtctcttgtggtcattaagcggagatccggccctagctggaatcctgccacctcctatgtgcggaccaccatcaacaagaatgctcgcgccacgctcagcagcatcagacacatgatccgcaagaacaagtaccgcccgactgcgcatggcagccatccgcagggccagcgccatcctgcgcagcagaagcctgtgatggtgaagaggaagcggacccggcccaacaagagctcctgagcccccctgccccagagcaataaagtcagctggctttctcaaaaaaaacacaccacaacag

SEQ ID NO: 561575 - DNA, 132 bp, Homo sapiens
ccccgagcaagacgacgaaaagagcagatagaacatacaaaaacgaatgataaacgaacataggaaggagaaaaaagaaaagaaatgaagaaaagaaacaaagagagaatagcacaaaaagaaagagattaa

SEQ ID NO: 561576 - DNA, 266 bp, Homo sapiens
gaagacagtatggcagctttcctcaaaacttcagacatagaattaacacatgatcctgcaattccacttataggaattgacccacaagaaatgaaagcagggacttgaacccatatttgtacaccaatattcatagcagcttattcacaagacccaaaaggcagaagcaacccaaatgttcatcaatgaatgaatgaatggctaagcaaaatgtgatatgtacctaacgaagtatccttcagcctgaaagaggaatgaagtactca

SEQ ID NO: 561577 - DNA, 107 bp, Homo sapiens
aaaacacacaacgacacacgaccacaccctctattaggtgacctatagaacaagtctgttttattaaagcaggctggtacctggtcctggaattcccgggatatctg

SEQ ID NO: 561578 - DNA, 1008 bp, Homo sapiens
gtgcctggggtgtgctgctggcgttgggccctggagctgcttgagacgccttcgtcttcccggtgcgagctgctgctgctgtctgctgcggatgatcatcttgcctgctggtggtgtgcagcttgatctgtgctggctgcctgccatgcctggacccctgtgctgctgctctgtgccgtctggtgctgcctgtggctgctgcgtcatttttccttgtgtcatccactgcttgcttgtgctgtctgtgctgctctgtgacgttggtgcttgtgctgctcgtgctcattgcatgcctggtgctgcctgccatcctgcctgcctatcaacctgccctcctgttgtggatgccctgcggtgcatgttgcctgagaacatgccccccagcaatggagtgtgctctgattcagttccttggatcttggcgaggaaatatcttcccttccaaccttggtgtcagcagcctttcgctcatactctaccacactatgcaagcacgacggcaatatcacctggaaccagggttgacagtgtgccctgtgtgcggcacgcgaggttggagcggcgatgcaccctcctggagacttcgtgcaattgtttgccctcgtctccgcctgttggaccgcatcgctcgacacatcttgcggtagcccttgaacatgggcgatgcattgtttcaaaacacgcttttactctccaacatcccatatcacctagccgggacacccactggagtaccttgagtcatcccattggactccattgattgcatcacagccaccctgtagcggcatccatagttacccttgcttttggcctgggcacaatcactcctgctacgaccttggacccaattatgcccttacaccatcctatgtgcacccccattggcaaaacactaccctatcctggtcaccgacctgccctggggcaccacccaaccaactgagctccctggttacaaggccccccactctaacacacccctacaaccgtacaaaacccctacag

SEQ ID NO: 561579 - DNA, 254 bp, Homo sapiens
gttcgacgcagctctaggtgtccacgatcactgtaatgcacaggactccctacggcatcgctgctatatatgacgaatatgatcctatacatcgccgaatgctccttatgctatccgatctcactgatatatgacagatgcttcttatcggactcttactcctctgctgcaggcatatgagatcttatcaattaggagcgatgtatggtcttaaggacatagctattcctatgtcatctggattcatatggcgt

SEQ ID NO: 561580 - DNA, 441 bp, Homo sapiens
  misc_feature (322)..(322): n is a, c, g, or t
gagtctcactctgtcaccaggctggagtgtaatggcgcgatctcggctcactgcactccagcctgggcgacaaagcgagactctgtctcaaacaacaacaacaaaaaaatatcttagccctgccttgctgtacaaaggatttgagatggcataaactacagcatctacattaaagagaaaaataatagtagaaattaagagttggaaaaaggaagcatttagagcataaggccagtgtagttgctgttggtgcgacagctaaggcaagaaaagagacagtcacccctcaggtagttgttattgccaagatggaagagcaaanctgcagagaaccagattgcctggatgtgacttctggctttgagcaagatctttaacctttctgtgtctcagtttcctcatctgtaaaatggggacaatcttaatgcctacactagtgga

SEQ ID NO: 561581 - DNA, 264 bp, Homo sapiens
  misc_feature (1)..(1): n is a, c, g, or t
nggtgtatgcaggaacagctataactggtcgtcgtgtttcactgaggatagagctataactggtcgctcagttctgactgcgcaatagagtaataatcggaagaaaattaactatgactaacatctcagacgcgcagagacatataaaccgtctgaactatcctgaccggcatcatcctaatcctcatcgccctcccatccctacgcatcctttacataacagacgaggtcaatgatccctcccttaccatcaaatcaattggt

SEQ ID NO: 561582 - DNA, 521 bp, Homo sapiens
  misc_feature (114)..(114): n is a, c, g, or t
  misc_feature (402)..(402): n is a, c, g, or t
ctctactaaaaatacaaaaattagccaggcgtgatggtgggtgcctgtaatcccagctacttgggaggctgaggcaggagaatcacttgaacctggaaggtggaggttgcagtnagccgagatcataccattgcactccagcctgggcgacaaagcgagactctgtctcaaacaacaacaacaaaaaaatatcttagccctgccttgctgtacaaaggatttgagatggcataaactacagcatctacattaaagagaaaaataatagtagaaattaagagttggaaaaaggaagcatttagagcataaggccagtgtagttgctgttggtgcgacagctaaggcaagaaaagagacagtcacccctcaggtagttgttattgccaagatggaagagcaaanctgcagagaaccagattgcctggatgtgacttctggctttgagcaagatctttaacctttctgtgtctcagtttcctcatctgtaaaatggggacaatcttaatgcctacactagtgga

SEQ ID NO: 561583 - DNA, 225 bp, Homo sapiens
  misc_feature (85)..(85): n is a, c, g, or t
  misc_feature (185)..(185): n is a, c, g, or t
  misc_feature (200)..(201): n is a, c, g, or t
  misc_feature (211)..(211): n is a, c, g, or t
gttaaaaaaccaaaaaaaggaaaaaaaagactctccagccctggaaactataactcctctgcgagaggcggagaactccttcccnaaatcttttggggacttttctctcttaccccacctccgcccctgcgaggagttgaggggccagtttcggccgcgcgcgcgtcttcccgttcggcgtgtgnttggaccggggtaannggagggtccnggcgtactgcccgg

SEQ ID NO: 561584 - DNA, 191 bp, Homo sapiens
agcagctgtccaccttaagctgtagacgtcaaacggaacatctggtagctgtgttcgtcctggaattcaagaaggagagaggaattaggctgaggcatcagaaggaaagccattaggttctcgggctgctgcactgtccgatattgacttttctttctccttgctgtctgtcacaggaacccacttaaaat

SEQ ID NO: 561585 - DNA, 101 bp, Homo sapiens
agcacgtaggacacacgcgcctcgttcgctcttctcgggagccagtcgcgccacgccgccgccaggccatcgccacctccgcagcatgtcaccaggtccgt

SEQ ID NO: 561586 - DNA, 448 bp, Homo sapiens
  misc_feature (98)..(98): n is a, c, g, or t
  misc_feature (278)..(278): n is a, c, g, or t
  misc_feature (303)..(303): n is a, c, g, or t
ccaaactctgcccatcttacatcttccccgggtcaatccacacagggggtgtttgtgcctgagcccgccaacatgtgaggcgcccttcacacagcgcntgtgggaagatctacagccctgtttgtcttctgcgtgaacgccggtgtgtaagccgttgtaagggtgtaagcacgcaatgagaaaggcgcgtggagctgtctgtaaggcggcccacgggctcgcgtgtaagactgggttgtcccttacaaccccgccgagtgtctggaggagatggaggncccgcgttcgagaagatgtcgctcntgcccgccggcgccacacagcatcagagctactcgtccttggagtctcgaggttgaaaccacagattctggacgttcacgtgcactctcttcctgtaccgtatttattgttcctggcactttatttaaagatatttgaccctcca

SEQ ID NO: 561587 - DNA, 159 bp, Homo sapiens
caagcagttaatacagactcatggaatacaagtgagagccaaaaatacactgcctatggtcaactgattttaagacaagggcgtcaattctattcactgggagaaagaaaagccttttctttacagttaatgcaggccaaattattgtcgcgctactga

SEQ ID NO: 561588 - DNA, 231 bp, Homo sapiens
gagcctggtccgaaaaatggaggaaacactgggcacggtggctccacaccctgtatccagtgctctgggaaggccaaggcgggcaaatcacttggggtcaggagttcgagaccaacctcgccaacatgatgaaactttgtctctactaaaaatacaaaaattagccgggcgtggtggcacatgcctgtaatcccagctactccggagtctgaagcagaagaatcacttcaa

SEQ ID NO: 561589 - DNA, 486 bp, Homo sapiens
taatgaagtcctataaaaagaaaagtgggttagacatggtggctcatgcctgtaatcccagcactttgggaggctgaggcaggaggatcctttgagcccaggagttcgagaccagcctgggcaacatagcaagacctcatctctacaaaaaataaaaattagccaggtgtggtggtgcgtgcctgggtgccagctactcagaaggctgcaatgggaggactgcttgagtccaggaggcggaagctgcagtgagccatgatggcaccactacactccagccagggcaacagagagagaccctgtcccaaaaagaaagaggaaagaaagagagaaaggaaggaaagaaagaaagaaggaagtaaggaaggaaagaaggaaggaagggagaaggggaagggaagggaaggaaggaaggaaaggaaagggaagggaggaaagaaggaaggaaaaaagaaaaagaaagaaagtagaaaggaagaaagaaga

SEQ ID NO: 561590 - DNA, 275 bp, Homo sapiens
cctgcagctctctctatgggacatttgagcaccttattcatgcccagagcacacttctgaaggttcctgtgtcttcctgtgctcagcattctggactgtgcatcttatgccttgctcaggagggacccatactgtgggtggtgcgtgctccttggcaggtgcagtcgccgtactgagtgctcgaggggccagggcccacagcagtgggtatggagcttccacgcttgacgctgggctgtctgcaagtcgctagacatatggtccgtgcaacatca

SEQ ID NO: 561591 - DNA, 148 bp, Homo sapiens
tgctgggattacaggtgtgagccattgtccctaaccttaatctttttaaagaaaaatccaaatacatgtggaatgtagaagcagtaaacactgtaaatgggcaagaaaggactcaacttaattcatttaatgagataccatgtcatta

SEQ ID NO: 561592 - DNA, 132 bp, Homo sapiens
atgtagcgactgttgatggtgatgatattggagaggtggtggtggtgttgatggagatgatggtaagaatggtagtggaggtggttagtggtgatggtggtgatggtggttgtggtatgtgatcgtcagtga

SEQ ID NO: 561593 - DNA, 301 bp, Homo sapiens
agaacagggctttgtcaagtttccattggccttagtggggaatgaatagactccctcaccttctctgtgcctggtctggaattttggctaacagcattaacatctaacttaatgacaaggaggaaggagattcttagaggctgtccaagatggtcaagtgttcagaatatggccttccattatatctctttagttctttctggccgattaggttatactgtcttagtcaggttggttaagtagcccaggggggcttctccattctttctgtatgccttatctcagcattaccatcttccta

SEQ ID NO: 561594 - DNA, 176 bp, Homo sapiens
  misc_feature (67)..(67): n is a, c, g, or t
  misc_feature (69)..(69): n is a, c, g, or t
gtcgggtccagcgcgtgggctgctggatggcggaaccccaggcggagtcggagcccctgctggcggngnccgcgcgcggtggcggcgactggccggcggggctgaccacttaccgcagcatccaagtcggccctggtgccgcaggccaggtgggacctcctgccagtttttgaata

SEQ ID NO: 561595 - DNA, 817 bp, Homo sapiens
aattggaatcaagagaaccacccactagctaattattagcatcatccccctactattttttatccaaatcaacaacaacctatttagctgttccccaaacttttcctccgaccccctaacaatctccctcctaatactaactacctgactcctacccctcacaatcatggcaagccaacgccacttatccagtgaaccactatcacgaaccaaaactctacctcatctcatactcaatctcccataccacaatctccttcaattatacacgattcacagccaccagaacttcacatccatcttcttcatcatctctcttcgcacaaccaacacttatcccccaccttggctctccatcacccgatgaggcacaccagaccagacacgcctgaacgcacggacacatacttcctattctacaccctagctagagctcccttcccctagctcatcgcactaatttacaactcaccaagcaccctaggctccctaccacattctacgtcctcactctcaactgcccaagcaactcatccacactcctgagccaacacacttcatcatgcctcagcttcacacacatcgctcttcatcagtaccagatacgctcattacgagacctccacatcactgactccctaacagcccatgtcagcagacccacatcagatgtatcactcgtactttgcaggaataatctacacaactacggaggctatgggttataataagcctcacaacttcattataaaaacactgaacaaaaaacatagaataaacataagattgacaaataagtagaggtacatatcgaaag

SEQ ID NO: 561596 - DNA, 120 bp, Homo sapiens
tacttttccacacgggactcctggctgctttcgcactggtatagggaattcatgtagctgtgttgggaacactcctcatcagacactgttttccctagtgacagaagttaaattccccca

SEQ ID NO: 561597 - DNA, 844 bp, Homo sapiens
  misc_feature (512)..(512): n is a, c, g, or t
gaatacacttggtgtggggcagcggtcctgtgtgacccacgtcagctgttcaggtactgacttcatgcagcatggcgctgcgtgttatttcattatactaagctctgcctaccgttagtcgtgacgcaggttgtcatcattcaagtaactgctgctagtgctgactatactagtaattagacctcacgatgccttatacttcataacctagtgctatacttaacgaataatttcccatatccttaggatggacaaaacgtgaggctccggatccaattgtagctcgaccttggcgtctgtaagtcccatagcttgatcatgtagcatgggccgaatagagggcggctacaaggtcgttcgtcggtctgataggtctgagggcttggggagtctgcaagctggtgggctgcacaggcttggtatatctctgcgatgctttctgggaaaggctgatgacccacgagacatcacctctgagagatcacaggatggctcagaagaatagaggtctntggaccatacttacatgggagacgaatcgcgcgagtcatctaacggagtcattggttttgtagcaccgtcatatacactcgcaatacttccgattgtcgccacaagtgctcgattgcctcaccatttgcgcaacggtgtgatgtaaccaggtcgcaccgttgttgtgctttcactggagatagaacaggcactcatttttcatggcatgctagaggagagtgtttgtgcaccgacgtgttgaagtcctatctatagcagcaacgaacgttggacactccgggtcgatatcaaacagatttgacagaaaaacatccacaggacatcgtggttg

SEQ ID NO: 561598 - DNA, 179 bp, Homo sapiens
cggactagcctggatgagtcggggtaggtcgttgcggccgtgaagttcctgtgtaggaggtgacgactgtgttcttctcccccttcttgatgtccttcctgtcccagtgggccaatgcaggggccacaagcattggacaggacaagtgccacccatgatccctcaatgatctgtgcata

SEQ ID NO: 561599 - DNA, 127 bp, Homo sapiens
cgagtgctggagggtcggtgacgtgacgtcacgccagccctcatgaggctggagggtcgctgtacgtggaaccatcattacccgcacagccctagaggcggaggttgagctgagaagaggccagtgc

SEQ ID NO: 561600 - DNA, 132 bp, Homo sapiens
tttgacagttttcaagtattttatttgaaaagtagcaaaatgacaggttggacatatttagattgaggataactataaccattactgaatggattatgattgcttcagatagtacgatacactctgatatca

SEQ ID NO: 561601 - DNA, 583 bp, Homo sapiens
ggtggctgacgcctgtaatcccagcactttgggaggccgaggcaggtggatcatgaggtcacgacttcaagaccagcctgcctatgatggtgaaacactgtactctactgaaaatacaaaaattagtcggacttggtgatgggtactatgtaatgataagccatactgagtatcgttagtctcagacattcggaaccacgcgaagataattgttgtaaattagtatagatggggaattgtcatgtactaccaggcttggaccagatattctgtcgtttagagatacacttaggtagcatatatagagtgctcaagagaccagcctgacagtcaagaaataggctcttaacatacccactggttagctggattctaattgcctccttgaaactatgtaattgtgtctttttggatcctgtggagatatctttccacttgtttaattttacactgtaataagacacgttatcactgatgaaagaattacctgattcactgtcctgcgatttacaacttcgtgactgggaaactcattgggtacccaacttaatcggtttgagcacttctcagtttagacagctgg

SEQ ID NO: 561602 - DNA, 198 bp, Homo sapiens
tcacgccatgtcacaacatagtaatttccatgtaaatgtgagctgccatgatgatggtgatgatcatggttgtgatgatggtggtgatgattgtggatgttcattagtgtctgtgcattgaatggttagatgtttattgtagtcttcacagtctgggcttctttgtacctgtccttcttgggaaggctttccaagtat

SEQ ID NO: 561603 - DNA, 341 bp, Homo sapiens
  misc_feature (54)..(54): n is a, c, g, or t
  misc_feature (228)..(228): n is a, c, g, or t
gtacccaaggattgcagttgtgctctaatgccgttgtgcttctaatgcagttgngcctctaatgcagttgtgcctctaatgcagttgtgcctctaatgcagttgtgcctctaatgcagttgtgcctctaatgcagttgtgcctctaatgcagttgtgcctctaatgcagttgtgcctctaatgcagttgtgcctctaatgcagttgtgcctctaatgcagttgtgccnctaatgcagttgtgcctctaatgcagttgtgccttttatgcagttgtgcctctaatgcagttgtgcctctaatgcatttgtggctccaagtggcgatgggggtctaatgcgga

SEQ ID NO: 561604 - DNA, 166 bp, Homo sapiens
gccagtcagaacagaccgttcggcagcgcacaggttcagcatttgttgtatcggggactacaatggcacgtcggtctggtgtagtgctccaaggaggtgcaccgcatcgtgggcatcgtctggcaagctctcatcgtcccgtgcgcagaggcactgcgaggtagga

SEQ ID NO: 561605 - DNA, 190 bp, Homo sapiens
  misc_feature (32)..(32): n is a, c, g, or t
  misc_feature (189)..(189): n is a, c, g, or t
gacccccgacccttaagaaggattttgtatantctctccgccattgagaatgtgctttgtagatccaccccctgccacaaaaaattgtcctactccaccgctatccaaacctacaagactaatataatcccaccaccctttgtgctctttttgactcagccacctgacccaggtgattaaaaagccccnc

SEQ ID NO: 561606 - DNA, 113 bp, Homo sapiens
cagtctgctcccatcagaggaatgcaacagtttaaaaacagataatgaaagaaatccaagaacataaaattaaaatatacgaatttccagaaacggatgggagaagatgcgca

SEQ ID NO: 561607 - DNA, 253 bp, Homo sapiens
agcagtctcggtagtgaagacatgactggtctactatacaagtcttacctcaggatccacacatcagagattcatctctattactccaaagagcacaccatggctgctagtgtacctctccattctcttcttcctcttttagatacctttctgttatcttttagacttctcctatatttagcagtgaacctggcttggatatagctgcatggtcttgtaccttaacataatacatcccagatcttcaaacccc

SEQ ID NO: 561608 - DNA, 683 bp, Homo sapiens
  misc_feature (146)..(146): n is a, c, g, or t
  misc_feature (275)..(275): n is a, c, g, or t
ccagtgaaaaggtattctcagtagtatcccattgattaatgataataaaaatgttgattgcaatttaatttcagcttttgatcacactattctgtgaagttacagggcagtaactgccaaaataattttatttaaatgataatgcntatttatggcacatatattacatgtgtatgtttacaatatgaaaatacacataagcctacagtgaagatcagctaaattattgtaagattaatgccaaaagctttattactctagcaaataatcatcanatcacatttccattagacagcacctcagctcctctatacatacagcagttcgctggattgaatacacaatgaacaactgaaaatgatcaatttccatcattctgataacacgggcaaaaatttcaaactctctgttagaatacaggtactagtaatcaaaaagaaaatttcttgatatctcccactagcattttcagatttagaatttaaccatgaagtacatatctagaactaatgacagaaaatcgcattttaaaataatattacagttcttctgtaaacctcagagtgatttctgtgtggggaacttgctgaccagaaaattaaatgagaattttgtacatcctcagatagccaaatagagttaaagggccactcccacaccacccccttcaaaaagaaaaataa

SEQ ID NO: 561609 - DNA, 290 bp, Homo sapiens
ggttggaccaaaggatgaaggaaatgaatagttactgagcatatatagggttccatatctggtgctaacaatttccacctgttttcttatttaatcttcatacaagaccttaaaataaatattttcactgtttatattataaagggaggtggagaattagagaggttaaataatttgctcaaagtcatatagctaatgagtggtggaactagcatttcgacccagttctttctggcttgtgctcaatctgctctaccatgaacttctatgcatagagaaggatatttaaa

SEQ ID NO: 561610 - DNA, 161 bp, Homo sapiens
  misc_feature (15)..(15): n is a, c, g, or t
  misc_feature (31)..(31): n is a, c, g, or t
  misc_feature (46)..(46): n is a, c, g, or t
  misc_feature (81)..(81): n is a, c, g, or t
  misc_feature (99)..(99): n is a, c, g, or t
  misc_feature (107)..(107): n is a, c, g, or t
ctgccccctgccccncgcccccccagtttgncggttgcaacagtgncctttcttggttttaatttctgagcagatgaattngctgtgggaacagcacanagtgaggngcctagcacaatgtctggcacaaagtaggtgcttaataaatatttgttcaaatt

SEQ ID NO: 561611 - DNA, 522 bp, Homo sapiens
  misc_feature (10)..(10): n is a, c, g, or t
  misc_feature (111)..(111): n is a, c, g, or t
  misc_feature (166)..(166): n is a, c, g, or t
  misc_feature (440)..(440): n is a, c, g, or t
  misc_feature (512)..(512): n is a, c, g, or t
ctgttatgangatgatgaattctgggaatgaggagtcgtgacgtgctccttcagtgcccctgtactgccctgccatctcaggccaaagggaggggagcaagtggggacccngccatggccccctcagcaaaaaccctattccacagggggtgggggaaaacaccancacagctcctgctgactcccccttatggatcctcagtttgctcctttttatgggacctttaatggagagagagtaaccctccacagaatgtctgaattcttgcattctttacccttccatcactatattgattcttttttaaaaaacatgaacccaaactcccgcctcacttcgtctctacagaatgttcacagcaaaacacgtttggtctgtttttagattcttgaagaattcaatagtctttcaagatgtttaatgtgtttaaagctgggancctgttgggagttcacaagtgctgcatatactgggtagcaaaagaaaatggaaaaaaacccacaaaacaaantttaaaaaaa

SEQ ID NO: 561612 - DNA, 555 bp, Homo sapiens
  misc_feature (10)..(10): n is a, c, g, or t
  misc_feature (111)..(111): n is a, c, g, or t
  misc_feature (199)..(199): n is a, c, g, or t
  misc_feature (473)..(473): n is a, c, g, or t
  misc_feature (545)..(545): n is a, c, g, or t
ctgttatgangatgatgaattctgggaatgaggagtcgtgacgtgctccttcagtgcccctgtactgccctgccatctcaggccaaagggaggggagcaagtggggacccngccatggccccctcagcaaaaccattccaggggcccccgggggggggttgggggaccctattccacagggggtgggggaaaacaccancacagctcctgctgactcccccttatggatcctcagtttgctcctttttatgggacctttaatggagagagagtaaccctccacagaatgtctgaattcttgcattctttacccttccatcactatattgattcttttttaaaaaacatgaacccaaactcccgcctcacttcgtctctacagaatgttcacagcaaaacacgtttggtctgtttttagattcttgaagaattcaatagtctttcaagatgtttaatgtgtttaaagctgggancctgttgggagttcacaagtgctgcatatactgggtagcaaaagaaaatggaaaaaaacccacaaaacaaantttaaaaaaa

SEQ ID NO: 561613 - DNA, 115 bp, Homo sapiens
tcgcagcctgctgagtttaagttaagaataatgtagaactaacgtggtctataaagtttcataattaatgtcaaaaattgccaagattattaatatatagtttggcacatcacta

SEQ ID NO: 561614 - DNA, 292 bp, Homo sapiens
gggcccccttaagtttttcaaggcgggggataagggtgtgtttccccttcccaaaaaaggggctgaaagtggtggggccattttttttaaggccaaacccattttttttccccccggggggaagtttaaaaaacccttttttttttttatgattgaaaaaaaaaccaagtttcccctttttttggggaaagggggggattccccccaaaaaaaaaggccttttggtccttaacccctcccctccatcccgggccccccccctgggtgaaattaaaaaaggggtggggtggga

SEQ ID NO: 561615 - DNA, 100 bp, Homo sapiens
aacacacgtacattcccactcgtgcctatgcacgctcacacatgctcacacatgcacgtacccacacacgtgcctgtgcatgctcacgatcacacacagt

SEQ ID NO: 561616 - DNA, 487 bp, Homo sapiens
ccacccaaataaaggggggtaggtccccccttaggcccccccgggttttccctttatttttccggcttgtattttggggggaaatgtgagcggaaaacaattttccccagggaacagctatggcccttttttcccccagcttgaaattaaccccccctaaaaggaacaaaaagtgggggtcccccccggggggggcccctttaaaaaaaatggatccccccgggtgcaggaatttgggcccaggaaaaacctaggagggtccagcccaacccaggcccttttcccctaccctggggcccaaatttttcctcaggggcgggggaaaaccctaaaggccccaaatgccctttccctgggaaccattttgtcccccctattcctttaaggagcccggggccccctttttttgggttttccaaaggaaaggggttgcaggaaggagggtttgtaaaaacaacaggaaaaaaaactgggtttgagccccgga

SEQ ID NO: 561617 - DNA, 317 bp, Homo sapiens
  misc_feature (59)..(59): n is a, c, g, or t
cgatctagaggatcgcgttatacactcccaggtcagaaagtgcatctcagcctcctaantagctgtgatcacaggcgtgcgtcacaggctgggataaattttttttgtatcttagtagagatgaggtttcaccacgttggccaggctggtctcgaactcctgacttcaagtgcctacctcggactcccaaagtgctgggattacaggtgtgaaccatcgcacctggctgtaaatggtggtatagctagctgataccaccattgctctttggtaaaaatgcctgctttccaagtacttcgacttgcactattagaaca

SEQ ID NO: 561618 - DNA, 366 bp, Homo sapiens
cggcagcatagacattgccagcgtattcctgtccatgtacacatcaggcaaagtctatgctgcttcaatgaatataagcattgggagatttttaatcaagtcgtgagtgcgacaaaatcctggcggtgattgcccaagttcaagtgctccgggaccagctttgtaaacattgtactaccattaacatagattccacgtggcaagatgagagtaatcaagcagaagaaccactgaatatagatagagagtgtaatgaaggaagtacagaaagacaaaaatcaatagaaaaaaaatcaaactctacaagaatttgtaatctgactgaggaggaatcttcaaagagttctgatccttttagtttatgga

SEQ ID NO: 561619 - DNA, 412 bp, Homo sapiens
ataaaatgagtttttgagtttcaacattatataaatttgattaatggatctatcaaaagtgtgcatatgcttgattacatgtgttatttcttgtttaatggtgtatgttgggcttctaatgtacccatcacccaaatactgaaggttggatcccaataggtagtttttcaaccctcaccctctcccacccaattgtttttatttctgaaagttatatttctttcttggtctgcctgataattttttaatagtttcttatttttcgttagttttcaaaaaatatcttgttgggcattttgtccatagctgtttcatatttaaaaaggtaattccaatatcggaagtccttaagaagttgtacttaaggtagtttgtttctttctgtatctggtgattttttttatgagctaat

SEQ ID NO: 561620 - DNA, 765 bp, Homo sapiens
tccccgaagtaggaggcgaggctacttattatatatagtatagcgcctaacttgcaggagcacccactcatagagcgggccccgatctggaacgccagaactgccatccgtactcctagcgctcacagcagaagcttctgccgcagggaaccccaaactttttcttggggggagacgagacaccgataggacccttaaagacggctcccatgtggacgaggagaggcccgaacggttgtacagagcgccaaaaactagattccctaacccaccattagacaatagaaggtaccaaagcgtgctgaaacttacaacctcacaaacggacagccgaccacacagacctgccctgaggaaataaccacatttacatgacaggaatctgcttgcaataggatagagaatgcagaactgataccaccaccaatatcccccatattgcttatggggactccacaaaagtggctcagctcttgcttcaggaagcccgaaggacccaaaaaacaagcaaggccgggggcagcaagacaagacaatgccagactggagaaagatatgagacccactcacggagagaatgagagtgagaggttcggaacgcaatcaaaaaggttcctgttccaatggaaaagagaaaaatgtcccatagagaataagggttaagcgtccccagaacacagccttgtgtcgcatacggagcccttcaacaaagagagagttgtgatataggagcacccgtgcgaggatagcatgagtcgtagaaag

SEQ ID NO: 561621 - DNA, 286 bp, Homo sapiens
  misc_feature (4)..(4): n is a, c, g, or t
  misc_feature (44)..(44): n is a, c, g, or t
gtanctctgtttggggctctcagctctgaaggctgtgagacccntgattccacttacacctctatatttgtgtgtgtgtctttaattcctctggcaccactaggttagggtctctctgaccaagctggtctcagcaacaggcatgcaccaccatgcctagctactgttttggttttttaggagatgtgatcttgatatagttcccagcgctggtcttgaactcctgggctcaagcgatcctccctcatcactgggattacagccatttaggtagggtaccgagctc

SEQ ID NO: 561622 - DNA, 189 bp, Homo sapiens
cccccttttttggggttcagttccctcaggaaaaaatgaggccgtcgccctctttatgtgccttcagtggaaatgtcccctgctcacgaccatagtgcattagagtctaaagaagtagtggcccgaacagggcagagtaggtcccctccatggccctgaatcctcctttggtccaggggtggcctttgc

SEQ ID NO: 561623 - DNA, 439 bp, Homo sapiens
tggtttaatttggtcaatatcagctcttagagcagtagcagctacccatcccccacctccaaccctatggcagacagctgtgcatatgttcctggagtagcttgcacacagcttacaggagctagggtgggccaaaagaccctgtcctccaaatatcagggatttgtgctctgattactgcttctgataacagagatgtagacaatgatgcaggtggccattgttgttgcaccttctcccattgtttttattttttattttatttttatttttattttttttttatccccaaagaatagattcttgtcaaacttagccacattatcattattccacctaaaaattaataataccccctaaacattaccaagattcaactggtgttcagatttcccaaaacactttcaaattctttgcttttccacttactgaaaaaaaa

SEQ ID NO: 561624 - DNA, 250 bp, Homo sapiens
cagaaagaaagaggttcgttggacgttatggtacatatggctggggagactcacaatcacggatggacggcaaggaggagcaagtcatgtctgtacatggattggctagcaggcaaaacagtttgtgcgagagaaactcccactttttaacaaccatcagtactcttgtgacgaccccaattcatctatctatgcagaacatgcatgggtaaagacccatccccatgcattcaatcacctcccaccagtt

SEQ ID NO: 561625 - DNA, 155 bp, Homo sapiens
tgtgttccctcaaagaatgaaggaggatgtaaagttagaaaatagcaacagaattttgaagtcttaaaaaagcccccacatttagcttttttttttgaacaaaaacatattccatgctttgaaataaaggaaagtgctctcctgttaaaaaaaaa

SEQ ID NO: 561626 - DNA, 479 bp, Homo sapiens
ggtgacagcaggaaatgggaaggatgttgttgaggatggaatatagagtgataactgtgaagatatggaaagacttagcgagagagtgacaggttagtggttttgacctaattttggggaacaaggttcatatagacttttcctcttctattatatggaaagtaccataaaaatatgattagtaataatcgtgtgtatcagtttatcaatttttctgtagccaactctgcttttatgtacaacaaatgagaaagcagcccctaaaatatgccagagtgaagaacatcttcacgttttgtgtgttcagttggaagtgtttcagtaatcatccagggctgcttccacagtctccgtgttgatattgtagcagtttctcaggtttgtgggcaagtgactatagctattccacttggtggacaaagcagaatgcatgatcaggccgtctttggtgcagttcacagaatcatcacctgtgcctg

SEQ ID NO: 561627 - DNA, 1175 bp, Homo sapiens
  misc_feature (447)..(447): n is a, c, g, or t
  misc_feature (679)..(679): n is a, c, g, or t
  misc_feature (685)..(685): n is a, c, g, or t
agaaagatgatggaggtttctgattggtgcctgtaaaccgccttaagaaaagagcgaaggaatttcgaccttagcgtgatactattctatgcgctctgctataagacagtattgcctaacacggatgcttcgaaccctgcaaggtaggagaggcatctcttatgtaaataactcggtgcactaatctagcacatgggaattatatgcgccgtactgtacgaacttgattatattcgagttggcagtaggataggtaagagaaagctgggtaacttacttatgatacctagcccgacaactcctaatatgagttgtacagtactatcccgaatctatgaaggttttcgctgagtaggtagtagaccgatgtggttgcagatatcggtgttggctaattgtgcatcacgtcgtatacagtctaccatacttgcacctgggaaacctgtngatgaatgacttctagaccatagtgctatcagtatgcaaacagttgctgcaggcactaagtagagtgccgtctaattagtattagagagcgagtgctccctgagctctagacagtcgtgatatgacatgaatactatcatcctaaccatatgcgggtggtaatattggtgtcatcactctatatcaaggaagagactgatatatagcgtgtatgaaaccagaatatacgccntttgantgttgcttctaatgcttctatgagttacatttacggctctctgtctgcctcggagagaatgtttgattccattgaagagtctttacgtgtaagtgacaaacgcttcacagaggcaggtaacgttcgtgtggtgcgtatcatattgtcttctaccatcgaagtggaatgtaagcagtaagaccgtccgttggaagaagagggaatgggacaacgggagaactaatgcaaacggtgtttccgtatgaggttgggggtgtaccagaatattttactacgcgcgtggtatcggcagtccgtctttggaatgtgttacaacgaacagggcgtgtggcgtctagcggtcctctgtgtgcgcatgttatctgcccgggttgttttacaggggccgtatagagcgtattatatgtaagggcggtactaggtctgggacgctcgagttgtggccccctgtgggaatagctcaccgcagtgcgccgacaatagatggatc

SEQ ID NO: 561628 - DNA, 466 bp, Homo sapiens
  misc_feature (466)..(466): n is a, c, g, or t
taatggaagcacatagggaagaggctggatgattgatgtaaagttggtgtgatagacagggcggaggcttttcgcccactgaagggaaaagcagatgaatcagcttgtgatcttcattatgtttctatgattctcgatggtaggctggaaaacaaaaggacaaatgtaagtcttattagaaaaatggcatgtgttgttcaaacctattaaaataaatgccaaatgacttagatcatctttctgcaatttacaccagtgaaaacaatttaagcctgtgctagacttacggatgctgaattcttctgttgggctaggcaaggggacacaccaataaatgttgtcataagaagataagtcctattaaagctcagcatgttgacaaattggaaatgtaatagcagattcttcactataaagttcacagaaggtagatccatcatattctccaatggaaaggatgagttgn

SEQ ID NO: 561629 - DNA, 172 bp, Homo sapiens
ttcctggtggcattagccactccctgcctctcactccagacctgttccctcaactggggaggtaggctgggagcaaaaggagagaggtgggacccagtttttgcgttggttggtttattattgattatttggatgtcagcgaaaaatctgaaaataaagacacagagagaaa

SEQ ID NO: 561630 - DNA, 307 bp, Homo sapiens
gcacacctgtagtcccagccactcgggaggctgaggtggaaggatcgcttgagcccaagaggttgaggctacagtgagttgtgttcacaccactgtgctttagcctaggtgacagagcaagactctgtctcaaaaatataaataaataaataagtaaataaataacagaactttctaagggcttgcactagggcagcactttgcttcaatctgctgtggatacccaacatacccatctgtgtcgccagatttgagtcttcacttgctaatcattcctcagtttcttattttgtgtccatgtaggttt

SEQ ID NO: 561631 - DNA, 106 bp, Homo sapiens
taagtaccattcaaactagagtcatcaccaagagtctagaaaaaggttcaaaatatttcttgctgtctccatcgtggtgctttcagtgcatatggagagcatctca

SEQ ID NO: 561632 - DNA, 117 bp, Homo sapiens
cacctctgacgagttccagtttatacatcctgagtcaatgccaaaaaaacaaaaacccaaaacaaaccaaaaaaaaccaacttcaggccttgccattctcatttggtttctgtggcc

SEQ ID NO: 561633 - DNA, 156 bp, Homo sapiens
aatcggcgtgacataaggagaagctgtgatacgatcagacctggactacgaacaagagatggacacaggctgctatccagacatcctccctggagaagagctacgagactgccatgacggaccaggtcatcaccattgagcaatgagcggttccgc

SEQ ID NO: 561634 - DNA, 477 bp, Homo sapiens
ccctataaccttattgatccgccttgcctatcggttttggccatcgtcgtgaacggacagggcgggtgttgcccttctgtctccgcgaaaagtctaatccttggccagcggcggccctcggttgccacgccgaagcgggtcggcgtgcgcgagaaggcggacagcccgctgagtgccgcaagcggatgcgtgatgatatagaccggcgtctcggtcaggatctggcgatgcggtgccttgtcttcgaaggcttcacggaaagacgggtgtttcagcggctccacgattttctggacgatgccgccagcgagatagacaccgcgcgcgccatgaaggtcagcgcaaagtcaccggcaagacggccgagataggtgacgaacagcgacagggtttcctttgcctcgcggattcgccggaaaggccggccgcggtgatgtcggcagggtctgcagcgtggcggcgttccggcaaccttgc

SEQ ID NO: 561635 - DNA, 272 bp, Homo sapiens
  misc_feature (256)..(256): n is a, c, g, or t
tgcatggcgagcaccatttccgggcgctcagtccgtgtcggccttcagtcatctccaccacacaggtacagcagcgctttctgagagtcgcccttagtgtcttgctggatataacagtacagggactcgccgcaccttctcttgaagtcagacctgattatcaacatgtgcacttcactgcggcagaccatgactctgatcaggaccttatctcgcgtccccttgcccttcatggagtcatacagacgatcagcanaatacaggtgcttgtt

SEQ ID NO: 561636 - DNA, 855 bp, Homo sapiens
agaaagtgaaattccctctcaaaaaaaagaccactctcagtatctctgattgtcgtgaagatgtaccaaaaaaatatagcttcatatatctggaatgagcactgagccataaaaggttttcagcaagtgtgtaacttatttggggctaaaaatgaggtttttggtggtaaagaaagaaatatggtgcttatgtatggaacgaagtgtaccttttatataactgatttttcaaaatgcccaaagggactagttggaaacgcttcttttaaaaagaattcctctaatatgactttatgtgagagcgggataaatacagtgatcaaataaactcagttaatggttactgtaaaaaagaatgtgtaaggcagctcagcaccatgcttctcgtaaaagcagcttcaattatccactgggtaatcttttgacaactgtgccattatctgatgttacacaattcaatagcaagcaagttgtgagacaatcgcagtttaaaagcatgaaccatttaacaaaaagtggaataattaaagataaagcacttcttcccaaaggaattatcacctagtgaaaaattgatgcatttcatctactcagttacgactgaagttctctcctcgctctagctctcaagcttgggggatattcctgtgaaatatattttccacttgaagtcatactcaatcaaaaccctttatgagtgtgagcactgtattgcactgttgtttctccggcctttttgtactttgtgccttgtaccagattggtgccgcttccaaggcgtgggaaccggcggtgaaaacaaagggtgcaggcagtagcagggaacccctctagggtggaagagaagggagggaa

SEQ ID NO: 561637 - DNA, 793 bp, Homo sapiens
gtgcccaggaggatgctgaaagtgagtacctgcagccctgttctcattcaattggatgccctccagactatctgatgatgccatacatgctttaagccatttgtgtagcatctcttactaaagttggcaagggctgtggaggcgaagttacgtgttcaatggcctgcgttaataaggtcatgttgcaacatgcactaggtcgtaatacaggtaaaattgccacgttctcttactagagaatagcagacatagaagttgtaggccgggctttggtggtgggtgtgcctgttagtcgcccaggctactcgtggaggcttggagagcagagggaatggttgtgaacccaatggagtcgggaacttgtgagatgagcactgaggatcgcaacgcgaggtgcgcatcatagggctgtgggctcgaagagaaaagataaaagcttattcgggtgatgaatggggggagttgtagatttgataccgtgctaggggaggttttcggggggtctgggatgagaaactcttgaggggtgatgggaaaactgagggctgagtcgtggatctgtgtgtgggtgaagcaagtatagttcgaggggatcggtacaaggcgcgtgatgaggtttctgatgcagtgatattgcgtccagagtttcaggaaaaggccccttatgagcatgatgtggggattggcatttatgcgtttcgggggggaccgagtgccctgactatgttcggtaaactcaggatttgacgcacggcatgctgttctttgccagagggttttcaatggtttgtta

SEQ ID NO: 561638 - DNA, 1314 bp, Homo sapiens
  misc_feature (292)..(292): n is a, c, g, or t
  misc_feature (392)..(392): n is a, c, g, or t
  misc_feature (600)..(600): n is a, c, g, or t
ggctaagattgctgaggaggcggcagggtagctggcaggcgccgacttccgaaaggccgccgtccgggcgaggtgtcctcaatgacttctcttgtggaaccatgtccgtgatcttgttatgcctgacgatggtacgggtaaggagatggactgcccgctctcagacactctaacgtgagtatttaaccacgacgctcgaagatatttgtttggtaattcggcagcgatgagcagtggcgtcgaaagacgtcttatgcacgttgtcgaacatggggtcccagttatccagtgntgcgagggtgtctagtcaagacacaggattgttgagcgtattacgatatagcacttatattgcgtctcttattcggggggatcgcttgggcacttgcagntcgagcatattcattgcattcctttgcaccatgatgctccaagccagacccactgtggccatgtcattgctttccatgggaaggaaccccttgatgggtggggaactttcaccacagctttccgtaattgaccaggctaccgttgcatatttgagccctaggacctcccagggggtccattaacggacatttcttctattgaacggtntttgaccatggcgagtccactttcacgacaaaggtgacatgtctggcatcatttacacctattgttaaagttgaccttcttcgagcattgggacgtcgcaaggctctgggaaacaaaacagttcacgtggcagggaagctcaaaggtttgccaagcctaccaagtcgggatatcctacaactcctcgcgaatggaaaccactagaattggttgtgccacaacttggggcgcggtggactcgacactcgtggtcccagcagcaacctggaattggccagcctctcggcacgccctgagctacccttaacatattcccgaaagttggcaaacccacatgttgaaacacggaccctgggggagaatattcgcctgattagccccgttccattttccttccatcgcattcaatgggctgagtcgcctgtgaccctcctggaaaaacttccaccagatttactgtacaaggagaacgagtttccacccccattgtgtacagaaaaaccacaattgtctatttaccaagggggttttgggcaccccaacgtcaaggggagaatctggtcgacaccactgcaattggagcgcctaataaccacgcggtaccatctatctcgcggacggcccacggccacttgcaccacgcagggcttactacttggagcccccacagtcagacacaagcaccacagccaaggggcgccctcatacaggcgg

SEQ ID NO: 561639 - DNA, 548 bp, Homo sapiens
gtactctagacatccttcggttgtgctcccccagatactgtacaggccgatcgagacttctgcaggctgctttggggcgtcccacgtgctgctctcgattcatgtgctatccttgaatagtgtcttatactctatcctccggaagttggctgggactatgggcgagtggcttggtgaccagatgcagacaggcttcggcggcaaggcgagggaccgagtggaacaggactatgtggcttcagctaatgcacgggggacagccatgaccgggtatgagcgtctcacctctgtctccagctccgttgcactatgaccaaagggacaatggtaactgtacctggctgacagccatcttcaggataaaggatgctgagatccgggacaaattgtgggggcgatgccgtgaaatacctgtactttcaggcggcacatcatcggggctgctggtggttgtgggggtcctctccgtaggcatcgtgctgcctgtcaacttctcaggggcactgctggagaccaatgcctacagctttgggagaaacaccattgcc

SEQ ID NO: 561640 - DNA, 1699 bp, Homo sapiens
  misc_feature (255)..(255): n is a, c, g, or t
gacccacgcgtcgcccacgcgtacgccgccgtccgtcgcgcgtcgtccgtgcactgcagtccccaggccccggcctctcatccacgtctgccttgctgtcctcgtcatagcactacggtgcccagagctgcaaccagagccaaggcaggctgtcaggcaacacgtccgtactcgagctctcacatcaacagatgctagccgatgaccgtggaactcgatccagagctctctcgacagcatatccagattctagcnagtagcgtcgctctcgacagatagatacccgaagcaaatgctgcgctgtctagctacccatcagaccggggcatgtgaccctggtctgcagtctaactatcgatcgtatacacctcggaggcacatgtagtctgaccgattggagcgccactcttgtgcataccagagggcagtgacctgttccaagctcatcgcaggaatctgaagtcgcggcgcgtgtgtgctcccaatctaggcccgctcgagtgccgtaatcttttccttttggtgtgaccctttccatgttgcgtatgccagattacgtgagtacattagcatgtaggcgtagctctcgtaaatacatataattcgtatgcgtagtgatcggcttgcatcattccttggttgtataactagtactatgagattcgaagagtggcatcatatggcttatataactattatatgatttccgatgcttttaagcttaggcttaagacttgttggctagccatttagaacctgacgaacctcgctgaaaaaccacaaagaacgccctacataaatgcgtgcttccatgctttttcatttggcaagtagtattgcaccatggagataacaactaataatagagggccaaattgttcgcatcgtaataaatgcacagagttccgcacgcacggcacagagttccttaagaaccgataggcatagaaggagaaataatcccccgaaaagaattgtgtgaaaccccccaaaaatattgaccaaccgttgacacgtagggcgatatgccttgagtggctctcaacgaagcgtgaacacccacttacaggtagacatcaaacgccaaatgttatggcaactccccaaacttccaaatatacgggaacgaacgagtatctgtattttgggaacgaaaggggatctatggaacaaagatgtagagaaaaagcatgagcaaaaatatagggaccaagatacacctgcgaggaagagtgaacacacaacagaaaatcccatgttagagtagagtatatgagcgcctgaaaccgtaacacgaaaatcaccaggagcaaccaagcaaatgaaccaccgcggtgcacagagacacatatgaggacaatacccataaaaaatacaaaaacacaggcaacaaatatccccatcaaataaagacaaactacaacaaaatcactagaaaaactaaatataaaaaccacacaatttaatacacctaagacagacaacaaaaaatttaagaaagaaacaacaaaaaaaaaacaaaaataaaaataaacaaatatacaaaaactaatatcataaccacgaaaaacattaccacaatctacaaacaaccacagcaaaacaacaaaacgacatcagacaaactacaaaaaataccaaaaaccaaacacactatctaaacacaaccaaacacataatcactaccaccacaacacac

SEQ ID NO: 561641 - DNA, 764 bp, Homo sapiens
  misc_feature (56)..(56): n is a, c, g, or t
  misc_feature (114)..(114): n is a, c, g, or t
  misc_feature (222)..(222): n is a, c, g, or t
  misc_feature (254)..(254): n is a, c, g, or t
  misc_feature (300)..(300): n is a, c, g, or t
  misc_feature (305)..(305): n is a, c, g, or t
  misc_feature (319)..(319): n is a, c, g, or t
  misc_feature (333)..(333): n is a, c, g, or t
  misc_feature (352)..(352): n is a, c, g, or t
  misc_feature (361)..(361): n is a, c, g, or t
  misc_feature (366)..(366): n is a, c, g, or t
  misc_feature (382)..(382): n is a, c, g, or t
  misc_feature (384)..(384): n is a, c, g, or t
  misc_feature (388)..(388): n is a, c, g, or t
  misc_feature (390)..(390): n is a, c, g, or t
  misc_feature (440)..(440): n is a, c, g, or t
  misc_feature (448)..(448): n is a, c, g, or t
  misc_feature (492)..(492): n is a, c, g, or t
  misc_feature (510)..(510): n is a, c, g, or t
  misc_feature (541)..(541): n is a, c, g, or t
  misc_feature (556)..(556): n is a, c, g, or t
  misc_feature (566)..(566): n is a, c, g, or t
  misc_feature (586)..(586): n is a, c, g, or t
  misc_feature (588)..(588): n is a, c, g, or t
  misc_feature (650)..(650): n is a, c, g, or t
  misc_feature (653)..(653): n is a, c, g, or t
  misc_feature (658)..(658): n is a, c, g, or t
  misc_feature (703)..(703): n is a, c, g, or t
  misc_feature (721)..(721): n is a, c, g, or t
actgaagtcatactaaaagggaatttacaccacttactgcctacattagaaaagangtctcaaatcaatgcaaatcaatgacttctgcctttacagtaagaaaccagaaaaagngcaaataaaatccagtaagcagaagaaaggaaacaaagatcagaacagaaattaatataatcaggaaaagagagagagggagaatcattgtaaccagaagtttggggnaaatcaaatcatttggtaaacctctagccagncagatcagaaaaaaacacgaaagacacaaaccagtctcagaaatgncgggnagcctcattaccancattaaaaggatangggcatgttaaaaggatangggtatcantaggntcccccccttgggtgngntatntnaaaaatttgaactctttctcagtgaccagggcctgtgcttgggcatgggngggcgggnggggccggcatgccagccgcccagggctgggtttgtcgccaaanttatgtaaccctgcaganacccttcgagaaacctcatctcgaccaaaanctaaagctgattggngagtatgggnctccagaacaaatgtgaggncnggagggtcaaatttaccctggtcaagatccataaggccgcccgggaaccgctgacgcttganganaaggncccacggcgtctgtaaaaaggcattgccctgctgcagtggctggnccgcactggggtgctggntgagggccagatgaagctgggttacatcctgggcctgaagatc

SEQ ID NO: 561642 - DNA, 723 bp, Homo sapiens
  misc_feature (723)..(723): n is a, c, g, or t
ctaggtcgaggctgggtgttaatcggccgaggctcgtacccgacgatcaccatcagctacctcccacacgcgccgcccttcgccggtggccacccggcgcagctgggcttgggccgcggcgcctccaccttcaaggaggaaccgcagaccgtgcctggaggcgcgcagccgggacgccacgccgccggtgtcccccatcaacatgtgaagaccaagatgctgcatcaaatgtgtgagctgcaagctggctgcgtgaacctggctggctgtgccaccaatgtgcctggaagcggaatgctggatgctgcatctgcgctgcctgtgatggacaatggtgaagactgctcaagtgcctgagaactgcggggctgtcgagtaccgcctggcctcctcctgtggagcagtgtggcccagctcaaacagaaggtcattgacccactgtcatgcaactggctgtcagctgctgcttggggtcaatgtgacacgccttctgaactgtcccctgcccctttactggacaccccctctgcttgtgactgtgctgtggcacactgcctcccactggggtccagtggagcaggctggtgggcacccaccctgggacctaggggcgcctgcaaaccacactggactcctggccctcctaccctgcgcccagtccttccacctcgacgtttacaatgcccccccttccactttttttgtatgtttttctgctggaan

SEQ ID NO: 561643 - DNA, 307 bp, Homo sapiens
gataaaaaacccagcttggaccaggtgcggtggctcatgcctgtaatcccagcaatttgggaggcagaggtgggcagactgattgactccaggagttcgagactagcctgggcaatatggcaaaacccccgtctctacaaaaaatacaaaaaattagccaggcatggtggtgtgcacctgtagtcccagctacttggaaggctgaggtgggagaatcacctgaacgggggaagtggaggctcttgtgagccatgattgggtgcacctttgcactctagggtgggcaacagagtgagtccttgtttgg

SEQ ID NO: 561644 - DNA, 1716 bp, Homo sapiens
  misc_feature (719)..(719): n is a, c, g, or t
ccaaccactgacagctcacctggcccagggctctttcctttacctcgtggcggtcccgcgcctggcccctgctgggcctcgcctccctcgcgcaggctctcctctcagctctcactgcggcaccacaaccactcactcccctcatccaacacaccacctgcacacgccctccgccgccacccctcacacactccccctccccgcaccctcatcccacacacacgccgccatgccctccacccacaccctcacatcagcgctcgcccaccgcgccaccacagcctggcccactccccactcccaccctgcgcgcgcgcacgcgcctaacatagcgaccaccatacggcggcccccggcgccacctgccaccccaaccacccctcccctgcgcccgcacgccacccctacgcgactgccccccaacggcccgcacagctcgcgcctaacccccaactccccgcgccaccgcccatcgcgcacctgccttccccgcccacacgtccctacacccgccccacgccacccccacacaccccccccccccacccctccaaaaccccctgcgccaacaactacacagccgcctcgcccaccggcccaccaccccccaccgccctgcctgcacactcgctcggacacgcgcggcacttcccccctgccacctaactggcgcaccaccacacacacgccacaccctgggatggcatatccacgcacancacccctggaacctcaccaccccacgggctccagcccccgggggaaccacagttcacccaacaccaccacacaccaggcagcacaccagcccccccagcccgctggcccccccccccagcgcgcgcaacacacccccacacgtcgccaaccgccccacatcagcccacggcaacacaagcacaccaagctccccctcccctctacccccggcccccagcgcccccaacgcgcccacactacagcgcatggccaccacttcccgcctcgcaccaacaccaccacggggcacacccccaccgaccccgcacagccgagcacgcaacgcaccccccccacccaaccacccgccccgggccgcacacccaacgcccacacacatccaccccacacacacacgcccaccaccggacccccacgcgtcccccacaccgcacacaccacacacacctgcgccacaacattcaccccacagccccaacgtcgctgactagccgctggacacgcacgaccaggcccatacaagcccgctcactcatcgcggcaccgcagccatagccaacacaagctaggcacataacaatacatcacccaaccacgccacccgacgcgacccgaaccacgacagcaaatcgacacaccaagagaccacatacacatacacaagcgcctcgcaccactcgacaggacacacacacaacctggcgaccaccggccacactagcacaactaggcgccacactgacacacaccacgagagaccaacacagacactcaccccaacagccacgcacccaaaaaaccacacacaccagcgaccaccaacacctcctggcaccaaccacacacacgccaagcagccacactgcacgagcccaacaaccaatcccaccagccgcgcacacaccaggcatgaacaacagctcccaaacccaaccacatcacgaccgacgcacaccactccaccacccacacaacacacacgcgcacccacaccaa

SEQ ID NO: 561645 - DNA, 486 bp, Homo sapiens
ttacatctatataatcttacataacaaatgtatacctacacatattagcaactcttctaatacatgacgtataaaaattaagaagaatacaaatattccagccccaaatgagaaatcacacatattaaattgtacaagaaaatttcttagaacactttagaaagtttttggaaacttagaaaagagggaaaaaaatccagtgttactagtaatttccatggtaatacagataaaatacatacttttaattctgggaaattagaaaaagtgaggtgatctttccaggaaaaacatgtgtaacatctgcttatcactccagctccctcctcctcctcctctccacgttcccttgagtaaatgtctgggaaagtatgaagcttgatgcaagaaccctgttgtactggcgttttcctcccctgtgacaacgtaactactgttgggagtgaattgaggatgtagaacggtggtggaaccaaattgtggtca

SEQ ID NO: 561646 - DNA, 283 bp, Homo sapiens
gtgacgtgcaggtgaaggacaggaaggggcatgtgagcgtaaatagaggtgaccagaggagagcatgaggggtggggctttgggacccaccgggccagtgctggagcttgacgtctttcctccccatgggtgggagggccccagctggaagagcagactccagctgctacccctccttccatggagtggctttcatcttgggagatctgactagtagactaacataaagatataaaggcataactatttttgtgagcactttttataactccaaacaaaacct

SEQ ID NO: 561647 - DNA, 838 bp, Homo sapiens
ggctctccgccaatttctctcagatttccacacgagacgttcgaatgtcatgaaaaccagaatgtatcgacagctattaatgtacatgggccgcatcaggtaatgagatgtgagccttgtgcatgtgggggagtagggagagagatggactgtccataaatgatgttccccctaaacattggctgttataggcctcaatgtagtgcaggaatactttgtgatgtcaccatggctgactattccatggttccacgagaggaggccttatcaccaggagtgtggaagttgaactgctccgtatgctcacgtccctggaatatacggagcttcagaatcgtggggctccataaatgcatgaatcaatgcaagcccagcctcattgggaatgtcctgggacagtctgttctgctacagctcgcttgcaacgagtcgtggagaattggcatcgattgataagcctatgagtcgacaatcgttctgtcgaagatgtgtcgtctacatctactactgtggcttggagtgctatacatgggagcaccgtgtccaggtagaccccagagcatggtcatgtaagaggctttacgattgtccctcatttgtggattaagagaccactgtgtgtcgctggtcactcccattggaaagcccttttgaatactctatggcaaagtgactcatggaccctgaagcaatgccaatcactggctgcggacaagactgtgaagtggtcgctccagggaaaactggggcgctgactggaccccgggtgttcggcaaaacatgtccatgcctccggtgacactaacagggtgcgatccaagtcatccggagtgaacgg

SEQ ID NO: 561648 - DNA, 486 bp, Homo sapiens
gttacatcactgagcccggaggcagagtgtgcggtgagcagagcgccactgcactccagcctgggctacacagtgagactccatctcaaaaaaaaaaaaaaaaaaggggctaaaaatagccaagatgtcgtacaaaatacagttaggatggttaacagactgattgttggtttcccaccaccatccctgtcccaaacttttcatttggcgtgaaatcctaacccccaaactaaatgcagaaaccagcatgcgtgaaacaaacgggcaaagaaaccacaaaaaaactctttggggcataatactaagggtaataccttactaaaattctcaaaagaggaagagccaagcaaaattcagcctaagtgataaatagatgtgtaaacttatgaaaaaccaccttttaaaaatgaggaccgtgtcaccggggggttacagacgggagacaagatcaggacttaccaaaaatgcccaaggcccatttatgac

SEQ ID NO: 561649 - DNA, 872 bp, Homo sapiens
tttacactcaggcgggatgccttgctgttgcagcaacaggattttacagtatgctttactcaaagcttgcattcttaatggagatatcaaatggtgtaattccaaatataaatatgtttatgacactaatcatatgcttttaacaataactttttgataacttattgccctgtaagttaaagccttacacggagtggactgttgccatcagaaaatcccctttcacctgctagagagagtgaaagtagtgcgtggcctccacttttcagttaacgagtagcaagcttctagtaggggctgcttatctgacccatgtggggtcttgggccttgttactttcctgggttcgtcccttcagctggaaaggctgttgaaaacacttgccaggaaacagtaaagctgtgagagaatcttctagtcttagatatagagaaatgagtaccagttgatgctaacacgatacttagactttgaggggcttccatccaagctttggcatgaatctgttagacacggttttcttcactcctctgatcaatctttttttccagaatgggttataatggtcagtggtggtaggtaacaaattctaaacatccagtgttactttcggtccgagtatagtgacgtagaggtacggtacagttcaaggtttgcccttcaggaacagtcctttttcgagtaggtatcgatggttccctgtgaaactctcagcagtgtctgtgcaggctctggtgcatgcttggtattgagtttcggcttgaacaagggctttggaagtcaactgggattgtcagttcttggatgtcatcatgaatgggttacaacattttccaggttcatgtccttccaactccctttaatcttatcga

SEQ ID NO: 561650 - DNA, 231 bp, Homo sapiens
cactagtagtaggcatcactagattctagttcacaattaggtcgaaccctattactctatgaagaaggaacaagagaatgtgggccagttttcatttgccattcttccatgtgagttagtatggctcgtaagtattcctggtgatacgctagtattggcaattctgtgaggttgaacaaaggggtggtatggtgtgctagcgtgggaattaggagacctctgggtcttgac

SEQ ID NO: 561651 - DNA, 617 bp, Homo sapiens
agcggtctttcgccgccggcggtgcgtgggcacgcgcagaaaccgctaggtggcgacggtttcccttcccacgcgcggacgccggcgtgggccgactgcgtgcggagcgcccgcgcgtgcgcagagcctgaggccaggctgccctcgaagcggggcggggcgaaagcggggcggggcccgagcagggccggggcggggggcttgagtgttgattcccaaagccgcggggccgggctccagtgtggttgcggggaaaacccgaaagtgggcggcggccgccgtgcggggcccctggtcggagcacgcgcggcaggaagcttgggcccagaagacgcggggaaccggggccgggggcccccccggggaaccgagggcaaaagatgcctggacagggcacatcctggttccaaagatgctggccaagcttgtcttgacacgtctcccattaacaactcgcgaggtagcctttaaccccggggctccctacgcgagaacgtacaaggactcctttgactgcgagaacgggattcccctttcaagccaagttcatgtttccccttacatttagaagactaatcttgacaatgtggtgccgccatggtgcaggatcgcaaatg

SEQ ID NO: 561652 - DNA, 1005 bp, Homo sapiens
  misc_feature (1)..(1): n is a, c, g, or t
  misc_feature (380)..(380): n is a, c, g, or t
nctattcttgttggtcgttgtgttgtgtgttttagttgttttctgttgtgcgttgtgtttgtctcttgtggtatatgtttgttcccccccgcggccggacggcgcgtcgatagggggtcgcgcatgtgaggttgcggctcttttagcgtgcgtctgccaagacgcgcactcgctggtcgcccgttcgccagtgtctgtttttagcgccattgttccagtaccccgttgctgtccaggtgcctgccattaggactttgcccagaatgcgccctcttttgtagccaccggcagatacatcttagggctcttgttccagaggttcttttaaattctgcccaagtagggcattgtctctgtcacctggaaatgcccctggaccngcatttgctgactcttctgcaagtcctccagacacgcttaatgaagatggctttctagctaagaaacacgaggggttcatacacaagccaagagtacttccccaccttgtctctgagtggaaactcacagggcccttgtggaaatggcgtggatttgggaactcaggctgatgaaacttggaagccccgcccacgcccgtcagcacgtttggtccacgaacctcgtctgcaccctcccgtgttctagtaaatggaggaagggagaaggagatgaaactaattgacccttgggcctcttttatgaacccggcaactttgctattctcatccacgtgcttacctctggtatgttcacccctcacaccaggtgtttgtaagaccttgatgaaataacaactaggcttaagtacttagcacccacccaacctaggagctatatatgagttgtagctattgtaagtatcatcccacttatatagatgaaaaatctgaggctagaaagccacatagccgggactctaatcccactggctagttcccaagcccctattcttccaccaccatataaaatattgcttccccctctcttccttcttccatagaggttggcctgaaatcccaatta

SEQ ID NO: 561653 - DNA, 1355 bp, Homo sapiens
taatcttctagaacctttatttctcggtgaaaggggggaaaataaagggaataaaataaaaagggcacagtggacacacaaaaaaaaaccaagtgtcagggggaggcgcggggagggtggagcaagttaaagtggggggaggggttcccattatacagcagcgaggatctccaggtgaccgcgggagtgcctcacaatctctcccggagagggtggggcgggagtatagcccctttcactcccagagggtcagcgtggtcctgtgtgtccaacacgcgcggggcctcccctatagcccgcgtgtgggagggggtggaccgggtgtaaaacattttctccacgagggcgtggggacagagagggagagtacaacgcgggccgtgggcgtgaacagtgggtcacgaggggttacacgcaccacacgtgccacacaggggagagtgtgcaccagaacacaaagaggccccccacaggtgtttatacacacaaaacacagacgggcatctgtggcgggcggtgattgaggagcgggggttgggccccacacgagagcaggcacccagagtggtaaggggatcactctatcataccacacacactataagagtgcgcgaacgcaagaacacacaaaccagcagaacgagagagcccaccaccgtggggagccaacacgaataataagaagacacacctccccaaacacacacccgagagacaacccgtgggagactcacaacacatataccatcccaaaaggaaacgttggggccactgtgaaaacttctccacaacctcagtgccaaagaggggcgagacagtgaaagagcacaaccagcgcaccgggcgacccccccaaaaccactacaacgacacacaacaccacatgggggaccccacacattgggcaaaaagcggcaccaaatgtgggacaccacaagggcgcttcccccaaaggcaccaagcgacccacccaacaacacccgggagcgcaacaccattgtctccctaagagcgagaacaatagatcacgagaaccaacaaacaccccacacaacaaggaacaaactggaaaccacacacaaaacaaccaacaccaaagaggggaagacccggcacaaccggaaaacacaccccgaaccaccgacacaaacacccgtagcggaaaactaaagcggcacacctggccccggccaaccacacaccaacaccacaaaacacacgcacaagacagaaaggcacagacccccaaagaccagctgcaacaagagtcaacaaaaacgacagaaacacgcaacaaccaagcaacacaagacacaacaaaacaaaccacacaagccaccaccccccaagcaaat

SEQ ID NO: 561654 - DNA, 938 bp, Homo sapiens
  misc_feature (463)..(463): n is a, c, g, or t
  misc_feature (581)..(581): n is a, c, g, or t
ggagcgtgtgtgttcgtatcgctgcgaactagattccatgttgcgctgttattaacaagatttaggcatatccccgtacggtgacgatgatcatggtggtgtctgtttcgggccaccgcatctagcagcgagttgtgactggctccatatactcatgcgctgtaccctttggatagtctccgacgatcacgcggggctctatgctttgcattaatctaatacgagtatatccaaagcagaacttgcttgcgtttagcgcgtgcagagtgtcttctgaaatgttcgtcacgaaaccggcggagatcagtggagagtcctgtctctggtgatgatgatctacttgtacacatccacggtatgacttggacgatgatgcacagctacaagtgatacagagtaagcctaaagtttgggcgcgtatcgcctttaatattgcctttgctcaagacaggtacaacatagnactggcgagctggttaaagtgtcgtcatgcgttacacattcctgatgataaatagatctggttctccagtcaccattggcggacgtagcactacgtgtacgtgtgtgtacaagcatgnaaagtttgggtcttcgtagcgagaggggtgcttcgctgccccttgcacactttaaccgcttagttgtcgtgggtgccttgctagttctcggctagttctggagtcccgttggccgcattgagaacaagggtaattagtgacattgcgacggtagcgagcgtacctcggtggtagtgcttcggtgtttgacctcagatatcgagtgaagggtctgcttcgcatgtttgcccaagtgtcggtccccttgcatcctcgagttgcatgctcatatcaagcacaccttttcaggagatcgggtgagcctgttgcaggtctaactttgacgcttggctgtgccgcttggcacttggttagacc

SEQ ID NO: 561655 - DNA, 100 bp, Homo sapiens
ggctagcttggcacattcggctctgctgatgagtggatctgcactgggaagagtagagcagcttgaccccccatcccttcttgcttcccctccccctact

SEQ ID NO: 561656 - DNA, 192 bp, Homo sapiens
ccctgtctccccttgcttctcctctctctctccactccctgaacctactctgccacatgctgggagagagagaggaagggaatagaaaagaaaagaaaagaactgtagatcagagtattattctccgccggatcgaggatgtgggagtaccagacctcgaaattcctacactcctagggtcatacgctactt

SEQ ID NO: 561657 - DNA, 187 bp, Homo sapiens
aacaaaaaaaaggagggggggaaacatgaaagtccattttaacaatttttgcaaaaccttttatttgcagacccttggatttatggtattgccctctcggggtgatttatcggatggatttgataggttttatgaattgttttgagttgtaaactcctaaaccctttatttaaatgggccttattta

SEQ ID NO: 561658 - DNA, 240 bp, Homo sapiens
aacagtctccagccctctgcactggactagatcagaagcacctcttctgttgatagaagttgatggatggttcattctgattctgctgaccaagaaatgcatgcttgctgcagcgacacctcattgcaaacaggatgagattcttcagaatttctgatccatatgtccaaagacctgctataatcactacatcacagaacaagtccatcggatgaatacaactaacttgccaatctcacg

SEQ ID NO: 561659 - DNA, 398 bp, Homo sapiens
cgctctagagtttccccatgctcatccctccttggaggaagacaattaatagctattatgtgagttaataaaataagcccaggatttataactaacctgttcccattgattttccttgtctcatgcaggcacagagctgatcaaaacagcaaaagcaaagcagtgcctctggcccagttctgaagccaaccttccttaatcacccagacccatccctggttaggacttgctgtggatcctcaggtgactccatctcaggatacagggactgagagtgtgtatgcaacttctcagacccagaaaccgttgattctgccaaaaaacacagcaataaccacatcccaccctcttgatttaaatgaaagggtttggaggaataaaagatgaacttctttttt

SEQ ID NO: 561660 - DNA, 1626 bp, Homo sapiens
  misc_feature (325)..(325): n is a, c, g, or t
  misc_feature (750)..(750): n is a, c, g, or t
gtggaagattacactggtgaattatggcttccggtactctataatgccctgtgtgtgcttctcggcgctcggggtactataaagttgtgctctgaggcatgctgcttttggtgtctgctggatctgaatcgcatgatgccgtaatgccagctggaacgcagcaacaaggtagcgaaggcgacgatattgtaaccgtgactatcatcaagtccatgacctataacacgtattgcatgagtgctacagttgcgctctagggacatcataagcgcctggagtctctcgaagtattgcacttatgaggtagctgcatgcctgggagtancctcgatgacgatgatgtctgtgcatgtatgtacctagaagcactcatatgtacaccgtgtcattgcgtacgtatggcacagtaatgccttgtggggacgaaggggaggcacactactttgtaatcctcttgggaccgacaagcacatcaaaccttaggtacttgagtgaattgcccgtctggaccacgtatggcgtgacagtatccttgtattgccctttgaccaatttgcctcgcttgtgtcattcccctagtcgagcaaattccctggccttaagaaagggactttgcgggaaggaggttctatgagaggcccgcgacgagcctaggccggatgtagtatgcctcgacaaccgaacgtggctctcgtagaggggaggacctacctaccgggagttcacccctagagacatccttgtctcctncaatgggggacactggaaagggggcgtccgtataacacataggcaagttttgccttaatcgagcatatgcgtgggcgttatggccattcgcgttccttccttttgcgccactttgaagagatagctaagggcaaattacacccaaagttaacttagccccattttggcaccatagaaaaatgggtatacctgggctacctctgtcttggcttagggaccattcgggttaccccttgggtatcgcaccaggggcacccttcggtatgcctataaccgtgctcaggggatagtggtattccccctttaaaaaaacggctcgctgtcgaaaccaagaataaggtgggttgtccgaaactacgccccccagaggaaggacccaccgcctttagggtatttatcatagtgagcccacatttgtgagggcaacaggaccaagcggcgtataacccaatttagcggcccttggtgcactgtctttccgtgtgtcagtgcgtctggccactcatagacaatgtattgtgtataaccattccgaaacctctgtgtgtcctttattacattttcaccgtgcgttgggggttacctctactttgatgggtttggacgacgttaacgctgagaacagactaacagcggtacaggccccaagagtgcgctatcttatacatatcataggagagcctacccgatcttccacacgcaatgacagcgaactagtgcgccattttttctctaagagtagatggcctaatcgcggcgacaacgggagggaccgcacggatatcatacgtagctccacggagccatactcacggactcactagacacctcccggagcaaacacgctccgcagacacagctctagggccacctata

SEQ ID NO: 561661 - DNA, 644 bp, Homo sapiens
  misc_feature (424)..(424): n is a, c, g, or t
  misc_feature (507)..(507): n is a, c, g, or t
  misc_feature (548)..(549): n is a, c, g, or t
  misc_feature (603)..(603): n is a, c, g, or t
ctttgtttgtagacaatataatcttttatttggaaaaacctaaagatgccacccatacaaaaatcagtagcatttttgtatggcaacagcaaacaatctgaaaaagaaatacagcaagtaagctcatttacaatagctacaaataaagtaaaaaacctaaaaattaaccaaagaagtgaaagatccctgtaataaaaatggaaacattgatgcaagaaatggaagaggacacacaaaaaacgaaaagatagtcctggatgaatcaatattgttaaactgtgcatattacgtaaagcaatctacaaattcaaagcaatgcctcttaaaatcccaatgtcaattcttcaaagaaatataaaaataattttaaaatgtatacgggaccacaaacgacacagaatatagtcaaagccatcctgagcanaaagaagacagctggaagatcacattacccgactcaaactatactattaactatagtacccaaacagcatggtactgacatangaaacagcacatggaccaatggacagagtagagacccacgnnaacaatcatacatttacaagtgaatcattttttgacaaggatgcccaaaatttncatcaatggacaaggtttttatatatatatatatctggttg

SEQ ID NO: 561662 - DNA, 382 bp, Homo sapiens
cccaaatggcgtctgagttatgagcctccagccagcggtcgagggtctcgctggctcatggatatgacgcaccggacgaacctgctaacgattatggctatgcaatctatggaaacggctgctagaccctgtactacctaattactatgcgacttgtacgccgcacataattccaactcagcagaggcatctgtggtgtgcatcatctaacacacaatcctcataagcttatcgacggatctcaagctatctgcatagttgccgagagcagatgcactcgcttactaagctgtgaactcgtacgcttagccctgtgggatattcgttcatctacagctacagactgagatgccatgtatgcgacgactctagtatagcctgg

SEQ ID NO: 561663 - DNA, 822 bp, Homo sapiens
cgctaacggaagataccttgcgatggctgaaaaagatcgccccttccagcgatcaccgagtacgcatgtcgaataagatggtgctgcaggggctgcttggcgacctgctgcacagtccgaatcgtggtgcgaactgtctgtccagagtccgcgcggcctatccgacgtgcggctgcagcgtcgactggctcgttcagcaacttgctgcgaggctcctagcgtgcgggggcctaggacgcggacctgccgtcatgcaggacctctgcggtgtgggcccgtgggctccctgtgccgccgcgctgagcgatttagagactgccttcacctcaggaagactacgcgcgcggcacttccggaggcctgcgtctgtgtggctcatcatccacggtatgccagacggggccctggcgcaaacatttaatcctgggctgtgctggggccgaggccgctatgcttattccttccgggctctacatgtggcatcaatgtggacggggtcagttcctgggcactgcgcgcggcattcgaatcccgagctggtgattgtttggcctgcagacatcccactgcataatgagccgtaggccagaccgccagctccgttgaagtcttgtgattggacaagacacagtgtggacgaaagacccctaagcctaacagagatgaaggtaggctgggtccagacacggcacctacggaagatgccacggaccgaagccagagagcctttcctctgcaagtgggactgaaactcttgacagatgctgctcaatctgactggtatagcaggacaagttaattccagggcacgatatggcttga

SEQ ID NO: 561664 - DNA, 395 bp, Homo sapiens
tataagtaatttcttatttgatccctagttaaaagaggaaaaaaagctccatggctgccgctctgcaccatttgggatgtatgaagagccaagcccagcaatagaggggagcctgcccacatggatctataggagcctaacaccagatttccccatggcgcgatcccggtgacggaggcagccccagccggcatgccgcggccactctgcagaatggagaatgaatgtcggtgacaggggcacacagggcctccagggagacggccctattgtgcctcttctcctgggtgtttgtcacctgcatgcaaatcctagagaccattcactgactcacgttttcttacctgtctccttagaaacagttcttaaaagctcgcaccctgtattccacttag

SEQ ID NO: 561665 - DNA, 142 bp, Homo sapiens
  misc_feature (20)..(21): n is a, c, g, or t
  misc_feature (33)..(33): n is a, c, g, or t
  misc_feature (40)..(40): n is a, c, g, or t
  misc_feature (53)..(53): n is a, c, g, or t
  misc_feature (72)..(72): n is a, c, g, or t
  misc_feature (74)..(74): n is a, c, g, or t
  misc_feature (85)..(85): n is a, c, g, or t
aggggttctttttgtccctnnttgtaccttgtnctccttncttcctttgcccnttaagccccaaaaagcttncnattttttgctnttttatggcttgcacaagagcctttgatttgaagattatattcttttctgaacagta

SEQ ID NO: 561666 - DNA, 157 bp, Homo sapiens
cttgcatgtctttacctctgactgacccgaatggtagttacatgccattcaccctcagagaatttccaagtaagctgaaatttctgtgtaggttctacgcccatccaagggacttgggtgccgtttgattgcaggcagaattggcttgtgcaggggg

SEQ ID NO: 561667 - DNA, 1370 bp, Homo sapiens
attctagaggccgaggcaggtggatcatgaggtcaggagttcgaggcgagcctggccaacatggtgaaaccctgtctctactaaaagtacaaaaaattagccagtcatggtggcacacgcctgtaatctcagctactcaggaggctgaggcaggagaattgcttgaacctgtgaggaagaggttgcagtgagctgagatcgtgccattacactccagcctgggcgaaagggtgagactccatctcaaaaaaaaaaaaagtgattggctttggacgtctaagggggcggggttgtcccctccgggcaaattgccctttcaacccggacgactcatggtgcccactttacccggggctgggagagtgggtctcagggtccctacagggagataggcttcgttccccttaacttccgtatgtagcactttggctctggcaggagcctggccattctctaagcctgggtaagagggcactgggaatggtccggtacagagagacctagataggtcatgcaagtgagcaacgactcgggggaacactggagacctaaggcgaccggaaggacgcacaaagacaagcttggggcacgaccataaacacctccaaaggggcatactggccggacttgggtatcacaagcaggcatcagggaccagcatgggccgcggaacagcggcggcaccaacaggcccacaacgggaaacagcgggcacatatctccacaaaagggtcgagcaacacacgctcgggtggtccacacgcgtgcatcaatgaggcactgcttgtctcagtgcgcgcgagactctgtctcgcacactcacgcccacacaacacaaacaacaacccacaaggagcgggggggggaggaggggaggggacgacggaccgggaggcagggcggagaacagcgggcagcgggccgagtaggcggcggcaggccacagcagagggagcagaggggacaggcggcacgaggggagagacagggaaagaagcagagcaagaggccggacggggcgggagacgagagcgcaggaggagacaagcgcagggagagaaggggggcgcgagagggagcggggaacgcgaggacggagcgcggaggggggcgcgggcgaaccgagagagcgagaaacggaggagggcgggacgcgggcgggagagcggagagggacaaggaggtgggaggggggcgaggggagggagaggggacggaggggggagggagacgagggggagagggggaagggggcgggccgagcagcggaagcggggaggcgacggcgcggagaggacgcgcgcgcgagcgcgggcgagaggggcaggagcgagaggcgcgaggggggcaggcgggagacgaggaggagg

SEQ ID NO: 561668 - DNA, 746 bp, Homo sapiens
cgtgggtgtctgcagtgcccgggcacggcttcggcgtcgcgtgctcgctcctggtcgtggcgggatggcgggaggagccgcgtcgtgtgtgtgtggcgagcacgtgcacagacatgtgtagtgtgtagacgcagagggcggcggcctgtcagtctgtgtggtggtgtgcgggctagtggttgtcctgttggtgtcgtggggctgtgtcgtccttgcgtctgttggtgtttgtcgttcttgtgtctcgtctcgtcttgcggttgtggtgcgcgtacggtctaccgtgtgtgtcgtgcgctactgcagacgcgcgtcctttcgaggggtatcggagcttggcgcgccagcgcgtagttttggtcttgaggtggtcgggcggctcgtgggactggcgctggtgctggtgtgtgttcgtgggttttggcttgtgtttccgcgactcgtgtaccgagggttttgtttcttgccgtttcgttggctagtgcgcccacggtctttgttctgtcgcgttgcggctccgacttctgtgggtgtcctgccgcgttggtgcggcgtctgcttcggatgtcacggctctgtgttgggttggcgggtggcggactgttcttgttctgttgtgtataggggagggctggggtggcggtgcgcccgtgtggttgtgggagccgcgctgcccttcgttggcttgttgagggggggtagtgactgacccctcggtgcgtcccgcccccccttacccacaaaca

SEQ ID NO: 561669 - DNA, 130 bp, Homo sapiens
  misc_feature (23)..(23): n is a, c, g, or t
  misc_feature (64)..(64): n is a, c, g, or t
gcgacaacgccaaggcgatccgnctagctgcaccggtgcactgattcactataggggatctcgnagtatctttgtaagatcaccacctgcccgcctcggacgccatccacagatcgccttggcgttgtag

SEQ ID NO: 561670 - DNA, 820 bp, Homo sapiens
  misc_feature (319)..(319): n is a, c, g, or t
agtcatgtgcgggagattcacgttgccggcgaagtgggagagagaatattgggccaactaggctagctagaaagactgatcattcatcacgctgcacgatatgccctgggatttgtgattccctgtggggtgaacgacacttgtcggggtagccttcgcacgtatcgaggcaatgtggaggacttagcctccgcgggtcacttgcttgactaccagtctctgccgacgtgtggcgttgtcctaggcacacgtatcgaacgtgggacgaaactcatgtatcacttgggcctgaccgtcgtttgacgtggacctgcccgcntctactttcatgcactttccagtggcacagcataagccaatcacgggacttgcttcaataagtatatccaaattgccatacaactcgccgagtcctagcggttctgtgatgaagccatttctcgattccattgttggcaatccaattcgtaccatacctcgttgtcgagcttgccagttgccaattgggggttcaacggaaaggccaaggcattgatccccatcccaagaatctatggggattccggactaggactccaaaacggacgtaatcgaatctaatacggtgagtgataccttgttcagcggcaagcttgggggccacatccagtactaagtaagcgtgccccatggttgagccacgttgggtacattttacaactccccgggcatatacgacggcattgcatggaacaatggcatagcatgctaggaactagtcggttcccgattttttatgggtcttcacaggccctaagaaagggcaaaggtccaaggcgaa

SEQ ID NO: 561671 - DNA, 223 bp, Homo sapiens
tccactcgatggttcccacatgtcctccaggccctgttgacttttcttcagtcttttttctttctgttcgtcggacttgacagtttcaattgtccggtcttcatacgtgtattctttcttctgcctgcttagatcggcttttgaatccctctagtgaatttttcatttcagttttgtactttttatttcataggaatttctattctcgcttctttatcagcgt

SEQ ID NO: 561672 - DNA, 243 bp, Homo sapiens
gatcatgcttattttcctaatggttctttgtatccgtagtatttagttacaatactgggagattattccgaagcctggtaggttaataatattaacttcgagggtgacctgagaaatcagaataggtgttggtatagaatggggtctcctcctccggcggggtcgatacaaggtcgtgtcgcggtagctgtctgtgagtagtatagtgatgccagcagctatgactgggagagataggagaag

SEQ ID NO: 561673 - DNA, 274 bp, Homo sapiens
cttctgtaaactgctacccctgaggccttctgcaccccggggtgagcctcctgcctgcctggtgccctgtcccatccccatgtcctgtgcagggcacctgcgtgctgacagccatgctcttactccagccggggctgccagcgcatccagccagcccaaccctgtgaaagatggagctgacttgctgcatgggacctgatttatacggcaacagaagtcacactccggcctctcataattcacttgaagttcaattaaatacagtcacaccgcc

SEQ ID NO: 561674 - DNA, 482 bp, Homo sapiens
  misc_feature (12)..(12): n is a, c, g, or t
  misc_feature (289)..(289): n is a, c, g, or t
  misc_feature (393)..(393): n is a, c, g, or t
  misc_feature (395)..(395): n is a, c, g, or t
  misc_feature (414)..(414): n is a, c, g, or t
  misc_feature (453)..(453): n is a, c, g, or t
ttttttaacggncgtcgcatcgaagatccaatcgctgcttcttccttatcgaagcgatcccaagttccctgcaattcttgaagaattaacgaccgccaacataagccgtacaaaaagttacatgcgccagccagatggtgagcataccgcggtccgcaggccagccaatggcatgagcaagcgcgacgaataattacaacagcgacaagcccgtgatgacatctggcattaccagcggcgcggtgattcataaaggcaaagccatttgatccgcgaaacctgccaaagngcaccagcaccaccgccgcaatagttccgaggatcgccgccgccgtcgccggacaggccgcaattgtcagacttaaaccaaccgcactcatcatccgtcatcgngnaataactcaccataccagngcgttgaccagccggcccacaccgtcaccagcttcgagntgttaaacgaatagataaccagcatcagc

SEQ ID NO: 561675 - DNA, 106 bp, Homo sapiens
gaagcgtgctaaagaaagtgcatgaagaggagatcgtgagttgcaggctcagcgtacaggaacagcaggatccaggtggagatggacatgtctaagccagaacctc

SEQ ID NO: 561676 - DNA, 352 bp, Homo sapiens
gcgtcgacttttttttttgctagagtctcactcttttgcccagactacagtgcaatggcatgatcatggctcactgcagcctccacatcccaggctcaaacgatcttcccacctcagcctcccttgtagctgggactacaggtgtgcaccgccacacccagctaatttttgtgttttttgtagggacaggtttcgtcatgttgcccaggctggtctcaaacttttgggctcaggtgatccacctgccccagcctcccaaagtgctgggattacaggcatcagctactgtgccaggccccaattcccaactttgatttctgaacttcaggcccacttctctctcttgtcgacg

SEQ ID NO: 561677 - DNA, 99 bp, Homo sapiens
cctttacctattggcgtcttactctatcacaactgtgtcagcgacatccgacttcccagcccccctgcccgacatgtactcaataaaatgtgagtggtg

SEQ ID NO: 561678 - DNA, 410 bp, Homo sapiens
aagggtgaccgcaggcgggttacaaggccatagctgttaagagatcctctcacacacagatttccaaagtgctgggatggcaggtgtgattcatggcacccagacttggctgccttacttacgattatcgaggcccgagaacctcgaaactcaggcactgtatagatgaccactttcgtaaaatacggacctagcttgttgccaattgttgattgaactgcccataactccacttcgggtctgtacctctgtatactgccaccttctgtccctgtcatgagcctttaggtctccatttgcatatcgcaaatactatgttccatgtaggtagctcattcagggccatgctctacagttcaaaaaaggttcccttgaggactggccgtcaaaaagaatagcagtgtgcttcc

SEQ ID NO: 561679 - DNA, 905 bp, Homo sapiens
tggcctttctcgggcatttttagaagggctctttctatcaggcccgggaatttccgcgctccgcatgctccctgacccgcgatgtcggttatttccccagaaatctgccccgagggtctcctcaatttcccgctccccgcgggccccccccatgtgtgccccctctcacttcctgggaacgctttctctataccgaagattccaggcgaccctttccggggccgccggctttttttgtggttttacctgcacccccggggtggaccccccgaccttctcccggaggcattttatgttaccgcctcccgttacccattgccccctgggtaacaaccagatatcttcctctgcgctaatgtgggacaattgccccatccccaagcaacaaacaagggagcttccaccccaacgggctttgaaatcctggctgagaatctctgtgctcgggagaaatttctggcgcaatgacgatggccacccatattctccgcgggaaaccacccccatggggagagtctatacccctgaaatcttgtacatttctaccagagatctctgcagagattgttaaaaaagagatgcaggctgtcttctgagaaggccgtgaaccacaggaggaatttcagggtgaatggactcgctcccgctcctgagttcacggctactcagccccgaggttccagaactggttttgaaggtgtaacaggtgcccttctgtgcctattcagccattccctactgaagactggagcgctcaccccgccccggaagaatggtttcagctccccctgctcaggcccctgaatgggtaggagcaacccctgcactggtcttaaactgttcttgcataggcttttaaccaccatgggaaaattgttgatggaaaataaacaccacttttctta

SEQ ID NO: 561680 - DNA, 917 bp, Homo sapiens
tcacaacaacacaagttttatatttgatgcgcctactatgtgccaggcacggtcctagaacccccccaaaaaaaaaaacaaaaaacaagcatagtatggcagacaaacacaacattcttgatgttgatgatgagaatgtggtgtgcatgattgagataaagacgtgtgttaattgtggacactttgaagaagccttgatgtgttgatgtgggtggctcatgccatataagtgccttccttcatctctggccctccttccaccagaaactccctcacctcccctctatcattgctggttgtgcctctccgtggagaacacctggaagagaggaataccctctaagaaaaacagagaaggcaccagaccacaactggatacgtgctccactccaagcccccaatccgaggctgagaacacgcaccccaaatcatcgtgaacacaattagcccccactcgccctgtgtatgacaacccactgggtgacggctgagacaaaggagccatactcaccagaggctgagacatccaagtgggacagtgataggaaaacttattgcgctcccttgaataaacttgctggcatttttgaatcgagacagctctcactgtgagactgtagtgcgtttgctcgcctaatatcgtgcaccaactcctcgaaacattcgtggtagccattgttggacccacatcctttatagcacgtgcaccacaagagtgagagttgacacaacaccgatccccacaacagcaacatgcacacgtgatacataaggaaccaattatgtgaaatagtgtgagaatcacaaattacccaaacaaactacagaacaacattaagcaaggaaaccaattttaatacataggcaacctattaaaatgcatatttgatgctccaactagaacctaccattacatg

SEQ ID NO: 561681 - DNA, 164 bp, Homo sapiens
ctaggccccagtttgaggctcccctgggaactagagccaggaacagccagtggcactgacaatgtgacggagtccaaggcgttattgggccacctgacagctggacagaaaatttgcatacacacctattatgctatttaaaataaatgcatatttttacttgt

SEQ ID NO: 561682 - DNA, 209 bp, Homo sapiens
gaaaatagcccattttgaggaacaagagggtgacatgaagcgttcctacacttacttacgggtactttaaggagcctggaatttaagacagatgcctcaggcagcagattcttgcagcgatttcttaacttaccgcaggcaagggacgcgagaacaaattttacaggaaaccatttacaactttaaccttttcctttagagcagttcca

SEQ ID NO: 561683 - DNA, 187 bp, Homo sapiens
ctgtttttcacccaaacataggcctaacgacaaatatccattgtatctggccccatcaaatgatccaacttgaaaccccctaatgcatcaatgaaaacctctttgcaaaaaactttgagctactttcttttgagcaatctaactgtacctagctctatttgaatttgacagaccagatcatatgtcc

SEQ ID NO: 561684 - DNA, 155 bp, Homo sapiens
agagttcccttccatcctaaccccaataacctccagttccctcctccccccctcagaaaaccaaagtttagatcctggctgaaagcaaatttacggccctgaggtagaatagaaacagtctgatcaggaagcagtaggaagtagaatagagaggt

SEQ ID NO: 561685 - DNA, 213 bp, Homo sapiens
tgctgatgtgatctaaggatccctgaagaacacttgcacacgtctgctggccaactggctcaaggccgttcccagggactgggcctgaatatgaattgcgtcgtcagcagtaggccgacggcagtgcggcgctgacggccagtgccagggcgaggggtgcccaacgggatgatttattgtttttcacggcgagttttttcacgtcgaacggag

SEQ ID NO: 561686 - DNA, 176 bp, Homo sapiens
  misc_feature (23)..(23): n is a, c, g, or t
  misc_feature (45)..(45): n is a, c, g, or t
  misc_feature (47)..(47): n is a, c, g, or t
  misc_feature (54)..(55): n is a, c, g, or t
tatgccgggattttcttaagatntacaccaaatgagccgaatacnantgcactnnaatagagttcgatcaactggacaggaatggcattcttggaccattcgacaatgcagtccaggcagaagtaatgtgcacagttctccggcgtccccagcggcataatggtggggggtgatcc

SEQ ID NO: 561687 - DNA, 1555 bp, Homo sapiens
tatttgatgttcccaaattttaaaaagtcaggattcttacatcaataaagtaccctggtgctcaaccacaaaaaaaaaaaaaaaaaaaaaaaaacaaaaaaaaacaaaaaagagggggggcgcgcgacgcctagacgaggtatctctccccgagcgggggcagcacagacggatacgcggacgcaccacgtcatagttagtagaacgaagggggcgccccatatagcgagagcgcgcacgtacatatatatcacataaccgacagacggcgcagcgaggcgcagcgcgaagtatatatacaacacacgtcgcagagagagagcagggcaagaacaacagagagcagtaaacaacaacacagaagaggcaatctactttgaagaagaaagagagaactcatcaatcactagccacgcgagcgaggagcaaacacataaacggcgaggccaacagaaccaaaaatctaccaagacagacaaacatttaaaagaaagcacatacacagaagagcagacacaacctaaccaaagaaacatctaaacaaaaggagggaatatatagctgtggagtaataacaaaaaacaaacaacagcaaaataaaaaaaacaagaagaagagcacgaagacagaacacaaaagacaaaacccggagcacaaatacaacaacaagtagacaggaaacaaccgtgtaatataaccgaagcaggacgacccaccagcacgacaataaacacagcgacacgacggaagcactccagagaacaacgacggagcacacaaggaacacacgaagaaaacaacaaacaaagaagaggaagaacacagccgacagacacgacagagcacacaacccgccgcctgagacgaaaaagaagaagaaaagaacggagagagacagcagagagagagaagaaagagagaaagagacagaagaaaagagaaaaaaacaaacgaaggctagaaacagaaaaggaaatgaggaagagacatgcgaaaagacaacaagaatagaaaagaaaagagaacagacgaggcgaaaaagaacaagaaagcaggagaaagagcgcgaaagaagaagacactagaagcaagaacacgggcaggcgtgcggagatagaacggggaaagaaaaaggacggtagagggggcagagcggacgtgaacgaggaggataagagagcattagagcggcgtgagaaaggctaaacagaaagcgagcgagacacggaggacgacaagaggaaagaggcaaagataagagaaaaggcgaaaggcggacctgcggagagatgcggacacgtaccagcgataccgacggaggagagagagaaacgaggaacgcacggtcacggcgaggagaagaagagaacgagatagtaggcgaaggagaggaggtacgcctaggacgagagagtcggaggaggaccggaaaggagaacggaagggcgaagaaaagcgaaagagagagagcggcaagaagagaggaggggtgacgagggagacagaaacgcgcaaagaagaaaagcgaagcagagagttgagcagaggacgaatg

SEQ ID NO: 561688 - DNA, 717 bp, Homo sapiens
agctgcgagcgagtcgatggaccctcgcgcctggtgtgcctcagccatggggcttcactgctggcgcccagtgctggggtgcttcgtgggctcccgctttgtccacgagggagggtctccgctggtacgccggaactagcatagagccctcgtgtgtcacccgtccacagatgtagtgctgggcctgtctggggcactgctcatactcagccatggtatttacgggtcctatcctggtgtctggtaaatcaggcgtgggaggtttgtcacattagaagggctggtggcttcccacgtgaggacctcttacacatgggaccatgatggccctgtagactgggcatggacaccctcgatactttctcttcggttcgcctcgaccaacatggtgctgggcctgtggtggatctcactgctggtcagatggggcggcggtcggcattatcgtggtctggtagcatgtgatgcccgctggccggccgcctggctctatccctatctggtctggctggccttccgggaacatagtcaagtattcgcgtattggcgaggataaccatggtttggggcattgtgaggggacgagtgtgttgccatatgtagatgtgtccgggccaacatgggcatgtgctgactagaacgcagtgaggtgccaatcacgcttgtggaatgttgggtggcccgtcacgggctttcaatgaacatttggggtcttga

SEQ ID NO: 561689 - DNA, 127 bp, Homo sapiens
cccccccagtttttggggtcaggaaaaaaccctattttaggttgtgttttgtttttgtataggagcccccggcagggctaggaacagtttttaaataaaaggccccaggtcatgttcaattttttca

SEQ ID NO: 561690 - DNA, 522 bp, Homo sapiens
agacagttgaccgtttcctttgctgtgcaggaactttttaacttgttaaaaacaggagctttttttcactgctttttttctgcattgctaatgcaggagctttaaccatttgtccactttttgctttggttgcctgtgcttgtgggaattactcaagaaacctttgcccagtccaacgtcctagaaagtttccccagtgttttcacagtttcatagtttgaggtcttaaagtctttaatccattttgatttgatatttgcatatggcaataaatgggagtctagtttcattcttctgcatatggataaccagttttcccagcaccatttattgaagagactgtcctttcctcagtatatgttcttggtacgtttgtcaaaaatgtgttcactgtggatgtatgaatttatttctgggctctctattctgttccattgttctgtgtctgtttttatgccagtaccacgccgtttgggttagtatagctctgtagtataatgtgaagtcagaaaatgtgattcc

SEQ ID NO: 561691 - DNA, 1745 bp, Homo sapiens
  misc_feature (1296)..(1296): n is a, c, g, or t
ttctcctctcggccccttgatttattttcggcggctttaatgtgagctacgcgctccttgtggggggtcaaaaattttctgcgtagcactccaaggggtgactctcaccacatcacctaattgcgagcggggttagtcaacgagagaagagcaaagtcgcgcctcctgtcgttagtaatattgggcgcgcggcgcaactataaaagggggggtcgccactaactagagagagaagagtgggggtgtaggtaaagcacaacagttgtttgtttttagaaaaaatagacgtttggtggagtagtaagaataattggtagaaagcgcacgccaccccctcgttgattgtggtgtgtttccgtcacaatatatatgaagatgaatagtttagtgttggtgggtggaatgaaacaccgtccctttgtgggtctatcccacggggggccgctcttcactggtgatccccccctatatttcgtcgcattatagacttggatagggggtgtcttcccataacaaggaggtcctcagtttcgtgttgtggtgttattagagtatggagagtattcttgtttttagtgtgtgatgttgttcgcctacacagatcattgttgggtgaggtgagaggtgtcgcctcgcatttgttttgtgggaggagaatgatgttctcctactctcctgctgtgtaggtgttattcttcttgttacgtagaggatgtttgtctctacacgaggggggtggttgtgtaattagctctgtctgcttctcttcgtgcctgtgagaaaacatttcttctctcctagtgcgagccgccataggggaggatggtgtgttatactactctcgtcggggcgcatcgccaaaaaagatgatgtgtgtggtttcctgcacagcggggcgccgtctccacgatgatataattgtcgcgcgccgacacgccctactattgttgttgtggtgagacagcgcttctcctctctgctttgtggagtagtgtcttcttcagagagtttctctacgcgcagtagtggtgttgtgtcgacttctgtgtgctgtttcctgtgctctgctgtgtgctctgttgtgttgtgttgtgtgtgtggtgttgttatctgtatgatgatacactactccctcttccactctctctagagatatgtctcgcgtgagagatctcttctctctgtagatagtgtctcttccctctccacacacacgagcgggctctcgctcccacatactctctcgcgcgagagagagagagagatagtagtgtgagagtatctctactgtgctcnctcagagagagagggtcaacacagcccacacatagagactctgttataatgaaagagtggcgtccacataacaatatgtgaggtctctcaccgcacacccactgtgtgtgtaaagacacacataagagaaaagagagggtgccccactatgttttttaactcctctctctccactaaagatattttctgtgtttgagaaaagatataaaaagacgttgatgaaaacccccaatgtttgataatgtgggaagactctcatgggaacgttctcatgggtggagacgaccacatgaagtttgtgtggaaagaccccctgggggcaccaaacacacggggggttaaatgttgtacaggaggcgggggggaaatgtgcaccccccccccccgaaattttttttaagagtccgacattcccaaaaggggcccaaaaaaaaagggtatttttggta

SEQ ID NO: 561692 - DNA, 428 bp, Homo sapiens
  misc_feature (406)..(406): n is a, c, g, or t
  misc_feature (420)..(420): n is a, c, g, or t
tctttttcggcttttttttcatttctcctttttatatttttattctgtatgtataacatacatgcctatatattttatatgctgagagtaacccatttataaattaagagcacattatattcaataagttataagagggctggtcttaagtggactactatgtatataaattgggggagggcaagctgtatacatttttgggcaacggttatgcatattatttaccagaagaaaattttcttataaaatcaaacatttgaaacttaagtatgtattcagtcaattaaaatgtactatattgtaatttcaactatatttcttatactctaccatttaattatctcagctggaagaaaagcaactgtggcatgtaacagtaaatactcttctcaaacatgattctagnccaaataaaatttntcctttga

SEQ ID NO: 561693 - DNA, 101 bp, Homo sapiens
aatgatagtctctaattgaaagaacagagaaggaggagataaagggctcaatgataaataatggctccctaattggggaggtggaagggcctggaacagtg

SEQ ID NO: 561694 - DNA, 619 bp, Homo sapiens
agcaggctgtacggcccaatgctttagatggcttgcacggaaggcgtccatgacttgacatcttaagatgcgtcttgtcccctgcggccagtcattccccctctctgagcctcggttgtcttcaacctgtgaaatgggatcataatcactgccttacctccctcacggttgttgtgagcgactgagtgtgtggacagttttgtcatacaactttggcatgctagatgtactctagggtggtgtgcccaggtgtcgtttctatggcgagccttccgagtacccgagctcgcccgacccattctccctcttccttatgcccgggcgacgcgcgaactgtctcaatgagtatcgacacggctccttcgccctctgtgctcctggtcatgttccgattattggggacgccccagcagacatacactggatacggcaggcaggacggctgagtttggggtattgatatcccccgagtcccaccctgctagcatctaaggttgctatgtgactctcctgcctgggcaactcttgctgtacctcatgagcgtatctctaggattctggcaccgacgttccttccctgtgccccttagagcctagctgtgtatcggtgccccagccc

SEQ ID NO: 561695 - DNA, 412 bp, Homo sapiens
  misc_feature (189)..(189): n is a, c, g, or t
  misc_feature (367)..(367): n is a, c, g, or t
  misc_feature (409)..(409): n is a, c, g, or t
acagcggcacgatggataccaacccgtctctcaagaataccccaaaaattaagtttttctttttccaaggtgcccacgccacccctatgtcacgcctgaagtagttattgagaaagtcgtccctttccccttttctataaccaaatagacaggaatggaagattctcctcggggcctgaaagcttgcgngatgaataactcctcctcctcaggcccagtcccaaggtacaaacttgcaccagcaggcaagataggcagaggcaggaagagagctgggctgggaaggacacgttaccccctggaaggttcaagaggggaggtcgccctgggtactacataggcagttcacgtttaggcttggggacanttcctgtttttacagagggattttttaaaacccctggccccntcc

SEQ ID NO: 561696 - DNA, 1197 bp, Homo sapiens
gatttccagtatttaagagagaatcatcatcaatggcaccgataggtaactcagtggctgtgaccagttcgactgtctgccactggctgttcccatgagttcagctgtgacgttgcgcttcagtggctccagaccgaatttctcaccatctgatcggggggctccatatcggtacctggggactgggtctgagtagggtggcacgacgttcatggtctgtccttgcctagccagatttccgtcgcttctgtactgtacgttcttgcacgatgaggcgtagtgatacaacgttgctgctgatgtagagttctattactatggatagagcgagattgtacatcatctaggctaccatgtcatgctattgccttgtagcatagtacgtgaggtaagtaggacttcttcgcttgttccgccggatccggaagctatccgacacgacatacaactgagtctgaccccgtcgtacgaatgagaacgcgtgtgtggagatggttatcacgccctcagtagtagagaccacatggccgtggttggtttcattcttagtgtaacccccgtcaatctgcttggtacaatcctagttggtcccagttgtagtgtctacacgttcgtagccgcatgtgaggctgttgggccgttccgcacggatccctaacgggttaaggggagctccggaatttcatcgacatatcgaagccgcattgaaccacttctacgtgacaccgacatttgcttaggtaaacgacccggaaagtaccccgaatgcaacccaaccgattcaaggaggccgttagcttgcctgtgggtcatctgtgcgccaaaatcggggtgggtggagttcccttaccacattgggcgttatcaacattgtgcattgccgggtacctttacagaggcaccccgttgcgcttctcaacacctcggtgagtgtatagatatgactagactacagggggaggaaagccaaggcggcagatccacagagctgtgcaaatgggtcacaccagttaagaggcattgcaaggagacatgcgccattggtccccaactactaccattgggtgtgggaaacgacgggccttggcatgttgtctaaatcagcatttccccacacaggtaagtcccggctacagtcggcgcacgggcgcaggagcacaagtgatgtccatgacggtaagtgagcggcttcgcgca

SEQ ID NO: 561697 - DNA, 125 bp, Homo sapiens
cccacccgggacttccagttcttctacctgccctacttcgagaagtgatcgcggcgcagcgtggccccttgcgccatgggggcgcccctcttgccctgttccgttcccctcatcccgtgggaagt

SEQ ID NO: 561698 - DNA, 231 bp, Homo sapiens
agccgctgactcatcaacgccgctgatgatcaacgcgtcggatgggttcagatccccgaatctagtgcggagattggcgcggaggggtcatgtgcggtacgcgacgtccggaaagcgaggaccgggagagttctcttactggtgaggcagggagcctggatgtgtgtctgccgcgagagaggggcccgtgccttggaaagcgtcgcggcccgggcggcgttggatggcagt

SEQ ID NO: 561699 - DNA, 1749 bp, Homo sapiens
  misc_feature (37)..(37): n is a, c, g, or t
agtgctgctcgtacctgcgtgactaccgttggctgtncgtccctgtgcacgtgggggtcccgccatttctgtggtaggttgcgctgtggtgatggcgcgggggtgtctgcttctggggttgacgggttgcacgatggtgttgttcccccgcccgctctgtgtgtgtgcccgaccgttcgttctacccgccgtgggtttttgatggagtattgttcatgggcccttttcggatgtgctctatcagcgggctattttcgagagggtgatagtcggtggtctcttcgctagggtttcacaggaggggttcccccggctgccacgaccgctggtgtgtaccacgaggctgttctgtgtatcatatgccgtgttggggaactgattgtgtttttgtccccgccggcgctaagccccagagagatgccttgttgttcccgccgggcctctcccttggggacaaccattaggcgcccagtttgtccccggtgatgttcccctgttcgccctgatggcaatctttttttgagacctcctctggtgaaagcgtttgatgaagacaggaatttcttggttgcccaccatgagggggtgcctccccgtggggcggttccagaactacgcgctgttcgcttgggtgtctccaagggaacacaattatctggttaggttggttctgataaaatcttcgcggtttttaaaaggagattttggggcgggcacccaccgatagtgattgttatcggaacctgggcatgccgcagagggttcgaccgccctatgtctcccacgggccccatcgcgccaattgtggcacccaagcacattgtgtccccccccgctgtgggccttttgcgctcacgctggggcactttgttgggacacgccgtgttataagtgcgccacctgaagcccccaggcccacaacactacgtggggcgcccctactatcatgggctcgcccgcgccctatgtctgtttggaaaagcctttgccttggggcggccctcccactctgtggcacagggctcttctctctgggatatctctctctgggttacacaagagattcggaacctctctgtgcgctctggcacccggttatatctcagagcccaggcgctctcagaacgctcacgtataatgtttaaagaggcgccaagagagatcccataacactttgtggcgcccccagagtatagattacgcccccacgagcgttgtaagaagaagacactctccggttctccgggcgcacagagtgtagaatatatccctggggggtgtgcccctcccacccctcgtgcctcagaggagatatttaccgcagtagcctctctctctcgtggggttacctgtaagaatctcttctgtgcgtgttctcttccgctcttctgcctttaacccacgcgggagagtgttctctcaagagagagcatagagttgactcttcttctcctcgctttgttcttatagtgtgcacctgtggggattttctgaacttgaggcaccacttcttctccacgccacgcccctgccttgctttgtaaataattaagtgcccctgaagctggaactggggaaagggggaacaagggtcacgttctgtcgggcggggcccgaaatccaatcagccccaggatataaattaggattaattacctaatagagcaatcctaactatatcaccccaagggataccactataaatgtaataaaatttaatgtctagaagtttaccaaaaagaaaaaaaa

SEQ ID NO: 561700 - DNA, 428 bp, Homo sapiens
caggaccagtcttaaactcatggcctcaggtgatcctcccatcttagcctcccaatttgttgcagttacaggtaagagccaccacgcacagcccagcactttcaatttccttcaagaactttacctttgcattcacaatgtgactaagtgtttagcacaagagacctagccttcagccagtcttgcattttgacatgccttcctcactaagctcaatcatttctagcttttgatttaaagtgagacatgcgactcctccttactcttgaacactcagaggccactggagggttattattggtgtaacttgaatatttttgtgtcttaggagatgggggggccgaacagagggagagagactggaaaacagccagttggtggagcagtcagaacacacgtcacacttatcaattaagactggtcctgga

SEQ ID NO: 561701 - DNA, 111 bp, Homo sapiens
agagggggttttcctcctgttgccccggggggggggcaatgggggttttttgggtcattgcccccccccccttctggggtcaagggattttcctgcctttggtccctttta

SEQ ID NO: 561702 - DNA, 920 bp, Homo sapiens
cgttggactcgagcgaacaagcatcgttaaagtcgtcatcttcatcgcctgccgtcatgtcatagagtcagagatctaccttaaagagcccggaacagctgagtgaagctctttcatatggatgggttgagtctttgtaaatcattcctgatagagatgcctgatggagccaatttgtagagacgatggggaacgctcacagtgactgtgtggctaatgtattagatccaacacacacagagccgcgtccagcgggactttgggttaagctcacaagtaatgccaactggtgcgcagtgagggtggctgcatggctatgaaaatgcaaggtcacacaagagttggatggcatcagtattgctggaaccaaaagtagagcttggtctcccacgaacaaggaattcgtcacatacgaactcgaggatgcaccgacattatgcttggtgagcacacaggattacttggggtccggtgtggcatttaacatgatagaggactgtcgcaagagacctctcactctcaagagtatctagtttgtccgaaccacttatgagtaatagaaattgtcaagtgcattggaaatcaatgtactgtacccgcagggcagttgggcgatggacaacacgtgggtcgttatgccttctagtaacctctagtatggacactatgtacatctcgatggtagtcaagatttgtccattccctgaaagtacccatatcgtgtagaactggcgcacacccctgttcgaagtttaagaattgacgccctgtctaacgcacatgagattgggctgaagtgtgttccatcccaaggcaagtgatgtcggaaagtggttctaggaaaacttatggtggagggtcgtggaaaggtgggttacgggggggcaattgattacttccgtcctggggagggaagaact

SEQ ID NO: 561703 - DNA, 252 bp, Homo sapiens
atccatatagttcatatggagcagaatgaacatactatatctgtctctgtactgatggaatcgtgtccagattgtgtacatctatctctagaggcctgttaagtgcatctgagttgctaaactccttattagcgccactccatatgtgtcctgggtttagctcctgcttgtaggattagtcacgagataacccgggtctgctcgtgatgcctttttccaaatccttggtatcagatatatggctattaattg

SEQ ID NO: 561704 - DNA, 489 bp, Homo sapiens
  misc_feature (68)..(68): n is a, c, g, or t
cccaaatatttgggtaccgtcttccccagtgaagttgacacaaaattaaccatcacagctgccttccntgggcctcatgttatatgagaacagtattgggtgtacacttaaagcgttctgggaatatgaatcccttctgcaccctggaatcaccagtccagccatgcatggagctggggaaagcaggccctgaattgtctagagagacttggtggaggaggccacggcccgccttgtccctgccgggtcccggccaggtgtgtgtgtgccccagctcgactctcggtggtctccaggctgcagcagaaggaataccttggtatttgtttcattttagtgtccatccttaccctcctggtctggtagagcctatggttattcttggattccacatacatgaaaagcgaagatttttctttgtttttatgcttaagctaaccccaattctgctttcccacaaaataaacctaatgccatcaggcaaaacaa

SEQ ID NO: 561705 - DNA, 362 bp, Homo sapiens
agaccaagtagaacaggacttgaatcttaccaccaccacttactcagatgtgattctagaaagttcatccttattgataatacgaggtgccattgactgagtgatcgtggtgatccaggcatgcttcatcctttacctctaactcttataattgctcctcaatgtagctatttcttttttcttttttgctttttaagggccgcacccatggcatatggaggttcccaggctaagggttgaattggagctgctgcctccggcttatgccacagccacagcaatgtgggatccaagccgtgtctgcgacctataccacagctcacagcaatatcggatccttaacccactgagcaaggcaaggg

SEQ ID NO: 561706 - DNA, 293 bp, Homo sapiens
cacaagctctgtggtggcatcagccagctgctgccgccagcgtgcatcacaagcccaaatccagcatgcagcaaggctggctggttgccaggcccagcaagccgtgtgtgtcagtgtcaagcacaggcacagcaaggcttgcttgtttgtgttgttcaagcaagccagcaagcaagcctcgtgtgttgggcaacacacaggccagccagctcacacaagcaacaccagccccgtgcaacacagcaggcctgctcacatccagtgtgtcggggggtacctgcagctctgacatt

SEQ ID NO: 561707 - DNA, 189 bp, Homo sapiens
agcaatggttgctgcccttttaaggtgtcatccaccgtcatgatttcaaaaatggtatcgttataataatccaaaccacgcaccattgtcggatcaacttcaaatgggatatcaagcgcagtcaacagtgcttggggtttttccccagtgtgcttttgcatcatcagaaagataatccaaaattactgg

SEQ ID NO: 561708 - DNA, 153 bp, Homo sapiens
gctgggactacgtgtgtgcgccaccatgcccagctaatttttttgtagtgtttgtagagacgggatttcaacttttattgccccagggctggatcttcaaacctttccgggcttcaaggtgatctttcctgcccttcggccttttaaaaggtt

SEQ ID NO: 561709 - DNA, 486 bp, Homo sapiens
agtggggcatgcttatagctcactgcagctcaacctcttgggctcaagctatccttccatctcagcctccctagtagctgaggcaggaaaatcacttgaacccgggaggcagaggttgtggtgagccgagatcgcaccattgcattctaacctgggcaacaagagtgaaactctgtctcaaaaaaaaaaaaaaaaaaaatcaaatttggtatcaaaagtcaccgtgtggtaggaaagataccttttcttcttttccataagggtgcatagtcttggataagggactcagtatcctgaagggcagcttttactagttaaaaacaccaccaagacacacttaccaggacaggacaggtaagtaaaggaagtcgggcattaaaaagatcctcgtgccccttttcttttttcctcggccaggtggagtcaccatgtaagggaacagggccggatccggtcatttccacctttgggtttggaaagggtcgc

SEQ ID NO: 561710 - DNA, 262 bp, Homo sapiens
ggtgactctaaggatccctttagcacgaatgtacattgtttacgtgatatgtggtgtaagcgccaccggatgcagttgggcccacttgcgtgcaacttgatgggcgcttcacaggctatcggaccgctgttgagcaagtatgcctggtcgctgcaggtgtggtggcaccgacgatcgacaagatccagttgcgcgcggttgttcaaacccaggccagggttgatcaccggtgtgcatctgttgggcaatggcgtcgcgtacg

SEQ ID NO: 561711 - DNA, 346 bp, Homo sapiens
  misc_feature (10)..(10): n is a, c, g, or t
  misc_feature (156)..(156): n is a, c, g, or t
  misc_feature (184)..(184): n is a, c, g, or t
  misc_feature (289)..(289): n is a, c, g, or t
  misc_feature (333)..(333): n is a, c, g, or t
tggcgagtantaagtttattaggacttacacacagggcactcagcaagacagctcgagagatccagcctcccccaatgtctaaactgcttttcagttaattttctggctctttgtctactatatatgagcaacgagacttttacttggttggttcncagatactctccaggatgtttggattcncagagacacctggtcctcagctgggcaccatggaaatggctcattacccggccttcagggttcaagcaggggacatgcacccttaaataacctaaaggggacctntcacactacaaccaccaccaccatcatcaagaagccactggctnactcagatacacc

SEQ ID NO: 561712 - DNA, 389 bp, Homo sapiens
aatcttcgtcccatcagcctccaagtagctgggtctatgggcacatgccaccacatcccgctactttttatagtttttgtagagataggattttaccatgtagcccaggctggtcttgaactcctgagctcaagtgatccacctgcttcagcctcctgagtagctgggattataggtgcccgccaccatgcctggctaatttttttttttttaaatactgatgccatctggcgtcccatcagggaaaatcaaatcaaaatcatcacgatatactacttcacggtcattagtagtgcctatattaaaaaagggttaaagaaaaagaaggtgtggtcaaggatgtggggtaagtggaaccattatacatggctgagtgggagcaagatgcg

SEQ ID NO: 561713 - DNA, 1662 bp, Homo sapiens
tcgtgcggtgctggtatgttcggtggtgtctggtggaatacttgcgcgggagtgacgttgtcgtgggttcttattgtcgctttgttcgtttgcggcagcagggtgggtcgggtgtgttacgcctgtgcgtcgtgggctcgttgctcggtactttggggtgtcgtggctgcttggtctgtcgtcgtattgtccccttgtcttctatcggctgctcgctgcgtggtgcgtctggatcgtgggccgttcgtggtgctgctgtcgtgttctcttgccccgggataggtgacctcttgttgtgtcttggtgctgccgtgtatgtgtcgagttggggttgtcttcggtatggtgcgttagtgtctcggtcttcgtaggggcgggggcttgtttcttcgggtagtccgtgtgggctgagttgctgttgcctcgtgtgcgttagccactccagtgcctgacgatgtggtgcgcctggtgcggattggggtgtgtgccatgtgtgattggtcgggctgagtggtcggtgccgctactgctgtgtgtgtccgtgccggtattatgtgcgtgtgtgttgtcttgaacgtacggtcgcggtttcgggtcacgacgctgtggtctctaaggttggttcggatccctctggttggggccggtttggtgtcatgctcaggttccgatgctggtagcgccgctcttgtgctgtgtggatgtgcgttgcggtgtttgcgttgggggccccacgttgtggcgtgggtccgttgtcagttagggtgccacgggtggtcgggagctttgctccacaatgctgtggcgtttggcgctaggtgtgttccgtgtggtcgaggagtgcgcgtcctgcgtgcctcatcgcttgggtttgatggtcttgtgctgagctcgcgggatagtgaaggtgtctgtgattgaagcgtgccgacggtagcttgcttggtaggtagccctgtgtgttagtgcgtatacgtcgtgtgactagcctgcgttcttggggctgcctgggggtgaacgagtttgggcgtataggtactgcccaagttggtgagttcggcttggggaaggttcctatcttgaggggttcgggtgctttcggcctctgtgcgacgtctatggtagttggtctgttgaagtggcgcatgggcctgcggatatgatgaagatcctctgtgttcgggtatatctgtgatggatgccagcgggaccactgttggtgggcctggtgagagtgtatctatgttcgcgattggtggactcatgcatgcatgggctgtgtctttccgcacgcaagtaatgatggactgcatatatagcataagcgatgtatctgccaagcaagagtctggtgattttgaaggtatgtgctagtacgagtgtctctctgttagctaggtttctgacgttaggttatctacgttacctaatcgctgcagtcctgcacgtcaccgtatactatgtatttaaatgtatgttaactgtctgagaatgcgctacccaccaatgaatgaaatagacctttatgaaaactgtgcaatgtgtgtgcatgtttgtttttatgttcacttgtagaagacattgacagttaccattgaatgagatggatcagtggatattcaagatgaggttacaaattgttgtaagttcagccattatgag

SEQ ID NO: 561714 - DNA, 154 bp, Homo sapiens
cggaagaaatacctaggaatacagttacgcagggcgatgaaggatatctacaaggagaattggaaaacacggctcaaggaaatcagagatggccgggtacagtggctcaggccggtaatcccagcacttgggagaggctggggcgtgcaggtgg

SEQ ID NO: 561715 - DNA, 159 bp, Homo sapiens
aaaaaacaaaacaaaacaaaaaacagaagtttaggtaatcggataagaaaactttcgtcgtcctcctcctcctcctcttcttcttcctcctctttcttcttcactaacttcttctccttctctttctctttttccttctctttctctttctcctcctgg

SEQ ID NO: 561716 - DNA, 339 bp, Homo sapiens
ggcaaaaagaggaacgctgtgattacctaaagaatacactttctcacagtaagcaaagaattcaagaatgtgataaagtaatgaattgggatgtacaaggttatcttaacgcttatttgaaaccactttatttttttattttattttattttttcgagatgaagtctcgctctgttacccaggctggaatgcagtggcacaatctcggctcactgcaacctccacctcccgggttcaagcaattctcctgttcaagcaattagcctccccagtagctgggattacaggcgtgcgctgccacaccccgctaatttttgtatttttagtagagacgaggtt

SEQ ID NO: 561717 - DNA, 203 bp, Homo sapiens
gactctacaggatcttaccctggtgcgtcattaactggtactaagttggcaaaagagaggtagtagcagtgaataggagaaacagactaatctaacaattggataagtagccctagaataacgaagaaggcctaattaaaacttcaaaagccttataacaggtgattctaaccagtcataaaactgtcacctccctggatggt

SEQ ID NO: 561718 - DNA, 198 bp, Homo sapiens
aaattaaaaaaaaaaaaaaaggggccgaatttaagttgggggggaatttttaaaaaaaaaggaaaaaaaccccttttccttagggcttagggcccagtttgctttaaagggattaaaaatttgcttccaaatttaaaatttccggtttgggtctcctgcgggagtttgcaattgtggaaaaattaaaatcaatcttgg

SEQ ID NO: 561719 - DNA, 159 bp, Homo sapiens
  misc_feature (1)..(1): n is a, c, g, or t
nccccccccccttttttcttacccaaaagtccatttcttcccaaagagtattggactgggaatttcccccccttgccccactgacaagggttatggaagtgtctagatgccctaaaagggcttggggctaagcctcagcttgtgggcagggcgccgaac

SEQ ID NO: 561720 - DNA, 198 bp, Homo sapiens
ccccgactagcttaacaggcctgaacagtgaggggcctgtccctgttgctggcctgccgaaggcagctatgagtgctgcggtcctgactggacaacaccagtgtccagtgaagcgtgggaatccatcaaacgccaggatgtagctcagtgtgcatggggtgctgcttgtcgggctagtctggggggtgtactgatgct

SEQ ID NO: 561721 - DNA, 754 bp, Homo sapiens
agcgggaaagaccgacgcgatgaagcccagacctgcagggttcgtggataataaactcaagacagcgagtcatccagtatagactatggtcgagagaagaaagaaatgcttgtaggattcaggtagaaaagtatttagcataattagtagtgagaaggaacttaagaagtttaacagaattagagagatgaacatttggcaaaaagggcgagacaaggtgaagaggataatgagtatactgaaagctattctgatgatgattcaagtatggaagactacccagatccacgagtcagcaaatctactagtgaacatgttccctgcgtgtcttgtatatcggagaaggataatcctgatgtctgtttcaagatactcctgagatggagcaaagagaaaccacgctcttcaatcacgcactgaataagttccacaaatcaggctccattcccttgaagacccctgccaaagattctgaaggaggatggtgtatggactagaaagcccaagtgtagaagaacagacagtttgtccttggacctgtcatgtgagaaaagtaatcctaaggaagccaatacactgtagatacaggattcaaaagattcttctctatcggagagtgactatgaaacggaaaggcaaggctagagcaatacaggaagcgaacaggacgcacagaagatcttcaggaagtagatggagcaaattgaagctgtcctaccacagagagctaaagccggggggtagaatgccagga

SEQ ID NO: 561722 - DNA, 193 bp, Homo sapiens
tagcccgagagatgataggatgttacatgtggtgtatgatcggggtagtccgagtaacgtcggggcattcggatagggcgagaaagtgtagtggaaagaaagttagattacgcggatgaatatgatagtgaaatggatttaggcgtaagtgtggtctagggtgtagcctgagctgtcggggtaatcgggggga

SEQ ID NO: 561723 - DNA, 174 bp, Homo sapiens
gcacagctctgagatggaaagcacagattaaactgaaaatttcaacaacctcacagagcaggtcaggatagcatctagcgagtgagcgctcagacatagtagtgggtgctcaggcagcagtcaacgtcatcactgctggcattcccatcactcccccaatgcccacatggcggc

SEQ ID NO: 561724 - DNA, 163 bp, Homo sapiens
  misc_feature (5)..(5): n is a, c, g, or t
agtantgagatggctggctggagtttgggttgcattttctggtgtacccggatgctgaagacttcctggcggtgcctcctccccaacgttctgatcttgcactcaacaggcaaacatggtactgcaatatcactgctttattcaggtgagctcgcttgcactg

SEQ ID NO: 561725 - DNA, 722 bp, Homo sapiens
gcagccaaggcaggtggaagtagagctttgtcccggcagagcgggctctctggccgacaggtagcgcgtggttccgtcgccgacgcaaccaggaccggcccagtctcctacaagaagttccgagaagccagctggagattcacattttacctgcatgcgcttgcattgccggtcactggccgttcaattgtggataagccctggttctatgtacatgaagaaccggttgggagggatatccccgatacagagcactatcccttcccaggtatggggactacatgagttgaaggtttccttctagctggtccgctgctcttcaggcattgcctctgatgtcaagcgaaaggactttcacaggaacagatcatccaccatgtggccaccatcattctcatcagcttttcctggttgccaattacatccgagctgggactctaatcatggctctgcatgactcttccgattacctgcttggagtcagccaagatgtttaactacgcgggatggaagaacacctggaagcaagcatcttcatcgtcttcgccactgttgtttatcatcacccgactggtcatcctgcccttctggatcctgcattgaaccctggtgtacccactggagctctatcctgcttcttgggtattacttcttcaattccatgatgggagttctacagcttgcttgcatatcttctggggctacctcatttgcgcatggcc

SEQ ID NO: 561726 - DNA, 846 bp, Homo sapiens
ggcacccggaacaacaaagcaaggaagacggagtcgagcctcgggggctctagcaacgggccggggcgggagtccatggagactggggagcgcgccgtctcatcctcatccttggtcctccagcttctccttcgcatcgaagcaaccggagcaggctgccggcggtcctcagccaccgtccctcttcccacggatgtgatctccgggggaagcgctaatttttaaaacaaccccagtgggatgcagacagtgatgtcggcatgggacattctatttacaaatgtagtcggggttttgaagaaacaagagtgtcattttaacactttaagggaagatggttgcgaacggacgcaaatgtgtaattttactacaaggtgagtgtgcgggcacacggttactacggagggttaagaaaaacctagaatttacaggtctacaaattgtgggtcctcaggaaacattttattgggcacgggagcaccaaggtggaaggaaagaaggctaaaatttggggggtgccaagaacgcttttagaccggttaggtcgtgacagacaacctagagttccagggtacataatttcaccagattccagaggtgggtcaagcggtttctggcaggggtgtaacatgccattggcacaatccggtgtgcccaggacttccaccaaaggaatcgtgagagctcatggccagttaagaaccctgaaattaatcctggtgggtggtatcgggataaaattctctaggactacatcaccgctttggtcacaggacgttccagtaagggggcaatgtaagggggggcaggggggaaaattacccttggttggacggcgagaaattt

SEQ ID NO: 561727 - DNA, 143 bp, Homo sapiens
agcctatgtatccgaggattcgacctctagggacttccacagtggtaggagggctgccctttttattttttttggttgtggctgagaatgctggagatgctcagtttctctccctcacaaggtaggccacaaattcgttggtg

SEQ ID NO: 561728 - DNA, 391 bp, Homo sapiens
cagaatttaaatttcgtaaaatatgcattgcaccagaataccatttaggccaaacctaactcttcgtgaaagtgaaattggcagtattccattatagtaaaggatagggtagttagttatatgaaactttaagctattggagtccaaaatcggttttatcagtaaatgataaagtcatatatagtcagatgctaaatttaagtatatatatatttacattgaagctaaactgttaagcaaacaatgcccatttgtcggctacagctcttccggagtctagagcctgttggtgttctgtcccactttaagaatttaattgctcacttattctgaaagctttgttcaaacaagatgatattaaatttgttttccctaaactctggaaaaaaaa

SEQ ID NO: 561729 - DNA, 255 bp, Homo sapiens
atgctgatacccgatcgacctcgtacatcgtgggatcgcatccagagcttacgaagggtgatgataatggtccagtgctcgtactactggtggggctcaatgggtgcaggagctggagacagttgctagactcctctggactgtgggccagccagtaggttcaggtctccctactgatcttcccactgtaggagttagacctcatctgaggggtggcatagtggtgaaagggacgacagaagggaccgatggggc

SEQ ID NO: 561730 - DNA, 877 bp, Homo sapiens
gagagaaagggaattcctaacttctgaggcaacacctatcaaacatcaggaagccattaagagattatcattggctgtacagaaacctaaagaggtgacagtcttacactgccaggtcatcagaaagtaaaaggaaagggaaacagaatggaaccaccaagcggatattgaagccaaaagagctgcaaggcaggaccctccattaaaaatgcttatagaaggacccctagtatggggtaataccctccaggaaaccaagccccagtactcagcaggagaaatagaatggggaacctcaagagcacatagtttcctcccctcaggatggctagccacagaagaagggaacaatactttagcctgcagctagccaacggaaattacttaaaacccttcaccaaaagctttcacttaggcattgatagcacccatcagatggccaaatcattatttatgggaccaggccttttgcaaaaactatcaagcagatagtccagggactgtgaaggtgtgccaaaggaaattaatcccgtgcactggcagtccaaagttttcaagtccctggtatctttaacctccttggttacagtctgtctcttccagaaattcgaagctgtgaaggctaccaaatagttcttcacactggaggcccaggatggcgtccactgagctaaactctagcggccgaacccctgggactggcctggtagccatgtgctcccaatggtcaatgggcatccaacggacagaccttcaccagggaaatctaaaatgtgacaaggcctaatattggccccgattcacgaggaaagcagctaagaacgggccgttgtgacagctttcccaaaaggcattggagttacctagtgaaaagtgg

SEQ ID NO: 561731 - DNA, 655 bp, Homo sapiens
  misc_feature (47)..(47): n is a, c, g, or t
  misc_feature (64)..(64): n is a, c, g, or t
  misc_feature (102)..(102): n is a, c, g, or t
  misc_feature (107)..(107): n is a, c, g, or t
  misc_feature (122)..(122): n is a, c, g, or t
  misc_feature (226)..(226): n is a, c, g, or t
  misc_feature (249)..(249): n is a, c, g, or t
  misc_feature (279)..(280): n is a, c, g, or t
  misc_feature (282)..(282): n is a, c, g, or t
  misc_feature (377)..(377): n is a, c, g, or t
  misc_feature (513)..(513): n is a, c, g, or t
  misc_feature (522)..(522): n is a, c, g, or t
  misc_feature (530)..(530): n is a, c, g, or t
  misc_feature (536)..(537): n is a, c, g, or t
  misc_feature (575)..(575): n is a, c, g, or t
  misc_feature (578)..(578): n is a, c, g, or t
  misc_feature (587)..(587): n is a, c, g, or t
  misc_feature (589)..(589): n is a, c, g, or t
  misc_feature (655)..(655): n is a, c, g, or t
ggtaaactcagtgaaatcccagttctgtgttcctacagatgtttcanccataccttccataganggttctctttaggttgatgtgacaacaccaaaaaagcntaaangctaacttaatagtnagcaattatattccagacttgactaaccctaagaacgattttgaaaggtaggaagatatacagagagtttaccagatcttatgccctgtttaaaaggcgggggngtatccccaaaatatttaagacnattatatatgctgatgcaactaattaaacnnangaccacttctaccattcctcatgtaaagccttttgggctaacagggatattttctttttgtgacaggggctctgttgcccacgttagggtgcggnggccccatcttggctcactgcaacctccacctcccgggttcaagcaattctcgtgcctcagcctcccaaatagttgggtctacaggggcatgccaacatgcccagctaatttttttgtttttttttgttttttttnatagagatngggtttcncccggnnggcccggctggggtcacaactcttgtcctcttgtgttnttnctctccttngnctcccaaagtgctgggattataggcgtgagcaactgtgcccggccaacattaatattttttattan

SEQ ID NO: 561732 - DNA, 244 bp, Homo sapiens
ggcaagctatccggttcaatgcactatcaaaataccaagacattcttcacagaaatagaaaaaaaaatcttaaaattcatatggaaataagaaaagatcccaaatagccaatgtaaccttgagtaaaaagaacaaagaactggaagtatcacactacctgtcttcaaaatatactactgtagtaactaaaacagcatggctgtggtctaaaaacccacatagaccaattgaaccggatagcttg

SEQ ID NO: 561733 - DNA, 242 bp, Homo sapiens
cggcaggagggctttcagtccctcccacttttggttcagttcgtgaagcttgcccttcacatcctttgcagcaaaatgcccttcctccaccatggcattccccttttgtgtaattgctttgatgcgtggttcatgtccagcaatttttgcttgtaaggcttgatgtttctttagcagattttggaccccattgccgcatttaccaacagaggtaaggatttaattggggtccggattttgca

SEQ ID NO: 561734 - DNA, 242 bp, Homo sapiens
gaagtatacgacacgttgctgaatacttgaagcttgccaacagtgcagacaaacagcaggctgcccgcatcaagcaagtctttgaaaagaagaaccagaaatctgcccaaactatcctccagctgcaaaagaaacttgagcactaccacaggaagctcagagaggtagagcagaatgggatcccccggcagccaaaggatgtcttcagggacatgcaccagggtctgaaggatgtaggagca

SEQ ID NO: 561735 - DNA, 386 bp, Homo sapiens
tacatagcgttcacacttccattcttccattcagttccacatatccccattttgttcactgccttgtctataggactgactgagaccacctctagagtcaggtgatagagccagagcattccatcatcttcaaaagcacatgcctctcacatgagattactctgatttattgaagattaatgtcactcagtctgtccttttttccattcctgtcatgactattgataggctccaatatttctacactgcactgcatcccatgtgtaatcacatgagacgttctgacactgctgcatggctcctgtagccgtcattgcctagattcacatgtgacgcgttctcgcaagtactatggacaacagagtcagagggattccaggagccgt

SEQ ID NO: 561736 - DNA, 127 bp, Homo sapiens
tatacagtgagggcagacaggacaagaggattacccttggtggttgtagcaaccgcaaggggagacttgggctgacaggcaggagttggggctgccaagggatgacgagtcctggaaaagactgctg

SEQ ID NO: 561737 - DNA, 152 bp, Homo sapiens
  misc_feature (14)..(14): n is a, c, g, or t
  misc_feature (68)..(68): n is a, c, g, or t
  misc_feature (88)..(89): n is a, c, g, or t
  misc_feature (102)..(102): n is a, c, g, or t
atttaaacagatcngggcatgcaaccaaaagcagtttaaatgaaatattttaaaataaaatatcgggnagctatttttagattttttnnggcttatgtttanactttaggaccctcattgtttttttattaaaaaaaattatttcctgtgca

SEQ ID NO: 561738 - DNA, 4421 bp, Homo sapiens
agcgggctgtctttatccgccatgttagattcaccccacagggatagcggcagagccggtagcggacggtccttgcattggcctccggcaggcgccccccgggggcgggaagctgcctcacagcatggaaccacaggttactctaaatgtgacttttaaaaatgaaattcaaagctttctggtttctgatccagaaaatacaacttgggctgatatcgaagctatggtaaaagtttcatttgatctgaatactattcaaataaaatacctggatgaggaaaatgaagaggtatccatcaacagtcaaggagaatatgaagaagcgcttaagatggcagttaaacagggaaaccaactgcagatgcaagtccacgaagggcaccatgtcgttgatgaagccccacccccagttgtaggagcaaaacgactagctgccagggcagggaagaagccacttgcacattactcttcactggtgagagtcttgggatcagacatgaagaccccagaggatcctgcagtgcagtcgtttccacttgttccatgtgacacagaccagcctcaagacaagcccccagactggttcacaagctacctggagacgttcagagaacaagtggttaacgaaacggttgagaagcttgaacagaaattacatgaaaagcttgtcctccagaacccatccttgggttcttgtccctcagaagtctcaatgcctacttcagaagaaacattgtttttgccagaaaaccagttcagctggcatattgcttgcaacaactgccaaagaaggattgttggtgtccgctaccagtgtagcctatgcccatcctacaatatctgtgaagattgtgaagcagggccatatggccatgacactaaccacgtcctgctgaagttgcggagacctgttgtgggctcctctgaaccgttctgtcactcaaagtactctactcctcgtcttcctgctgctctggaacaagtcaggctccagaaacaggttgataagaactttcttaaagcagaaaagcaaaggttgcgagctgagaagaaacaacgtaaagcagaggtcaaggaacttaaaaagcagcttaaactccataggaaaattcacctgtggaattcaatccatggactccagagccccaagtctcctttaggccgacctgagagcttgctccagtctaataccctgatgctccctttgcagccctgtacctccgttatgccaatgctcagtgcagcatttgtggatgagaatttgcctgatgggactcaccttcagccaggaaccaagtttatcaaacactggaggatgaaaaatacaggaaatgtaaagtggagtgcagacacaaagctcaagttcatgtggggaaacctgactttggcttccacagaaaagaaggatgttttggttccctgcctcaaggccggccatgtgggagttgtatctgtggagttcattgccccagccttggagggaacgtatacttcccattggcgtctttctcacaaaggccagcaatttgggcctcgggtctggtgcagtatcatagtagatcctttcccctccgaagagagccctgataacattgaaaagggcatgatcagctcaagcaaaactgatgatctcacctgccagcaagaggaaacttttcttctggctaaagaagaaagacagcttggtgaagtgactgagcagacagaagggacagcagcctgcatcccacagaaggcaaaaaatgttgccagtgagagggagctctacatcccatctgtggatcttctgactgcccaggacctgctgtcctttgagctgttggatataaacattgttcaagagttggagagagtgccccacaacacccctgtggatgtgactccctgcatgtctcctctgccacatgacagtcctttaatagagaagccaggcttggggcagatagaggaagagaatgaaggggcaggatttaaagcacttcctgattctatggtgtcagtaaagaggaaggctgagaacattgcttctgtggaggaagcagaagaagacctgagtgggacccagtttgtgtgtgagacagtaatccgatcccttaccttggatgctgccccagaccacaaccctccttgcagacagaagtccttgcagatgacatttgccttgcctgaaggaccacttggaaatgagaaggaggagattatccatatcgctgaggaagaagctgtcatggaggaggaggaggatgaggaggatgaggaggaggaggatgagctcaaagatgaagttcaaagtcagtcctctgcttcctcagaggattacatcatcatcctgcctgagtgctttgataccagccgccccctgggggattctatgtacagctctgcgctctcacagccaggcctggagcgaggtgctgaaggcaagcctggggttgaggctgggcaggaaccagctgaggctggggaaagactccctggaggggagaaccagccacaggagcacagcataagtgacatcctcacgacctcacagactctggaaacagtgcccctaatcccagaggtagtggagcttccaccgtcactgcccaggagctctccttgtgtacatcatcatggttccccaggagtggatttaccagttaccataccagaagtttcttcagtccctgatcagatcagaggagagcccagaggctcatcaggacttgtaaacagcagacagaagagctatgaccactcaaggcaccatcatgggagcagcattgctggaggactggtgaagggggctttgtctgttgctgcctctgcatacaaggccctgtttgctgggccaccagtcactgcacagccaataatttctgaagatcagacagcagccctgatggcccatctctttgaaatgggattctgtgacaggcagctgaacctacggctgctgaagaaacacaattacaatatcctgcaggttgtgacagaacttcttcagttaaacaacaacgactggtacagccaacgctattgaggagtgaccttgtattaaataactgcctgctgctcagagatgatctttattctgtcattggggtatgggatagaagcccttgcttatttttaatctgatgaatctgtatagagcccatcgttgagttaccaagacaatacctgctacagtattttggggagcaaactaaagaccagaacttaaattttcactttagacattggatgaatagtatgaagacagtttttcagttgatttggataaaactattttagtgcattgacaagtgtaacttcaacttcatatagaaccatttttctttctgcttttattgaaactgagtatttttctttggctaatgtggattttttatggggatatctgttaattttcaggttttgaaagacattaacctcggaagttgtttttaagaattattctcataattcttattctcataatttctgtaatccacctcaagcttcatagttatttggcattgaaataacacccagagcatgatagaaatgttgttactcttcctctctcaaggagaaagtaattttcctgcaatacttaataattggcaccgttgctttctaaagactccatggtgcattcaagagtatccaacttcaagggaatctccgcatttcaatgaaaggaggaagagtgtgctgataaacctaccagcacctattgagcaatgtctattatagtaattttgcatacatttttatttaagggaaaaaatataggtattgtgaaatattttgctaatcttatagaaaaggaaaaaatcccgttatttaaagggaaaagtaaatttaacagttgccttttttcttaatgtcagggcagatcttattttacagtacagtgggggaaatagaaaacatgtgaaaggcaaaaggcaggctcctaaattaatgtcagtgaagttcagggtgggcaaatgagtgtgtgtgaggtataggaaatgctgatgacttctttaatgcttgaagtccgttcacaggtatctagccctagaatgcctagaacaggaagaggcagctggtgttctgcaaaacttggacaggggcaaagttgctgaaaaagttttggtttaacccgaagataagtggaaaagagcttgtccatgaacccaggttctcactctgtttacagaagtgtgttgagtacagttggtgaaggaagaggtaacaaaaaatgctaaatattttatccatgaaaatgacttccagaaaaggaagaatatgaaccccagaccgaaggggaaaagatagttaatagtattatctaacctggttggtatttgtaatgaatggtgattttaattagtcattagccataatgatgtttatttacagtataactcctgaatgctacttaaataaaccaggattcaaactgc

SEQ ID NO: 561739 - DNA, 1066 bp, Homo sapiens
actttctgctagtccccccgggggttactcgttcgccccccttgtgtgcgatgttggcccctcgccgacttctctcccctgatgcgggggcgcgcgttgtggcccgtgtgggaagcttgtcgctgcgcctttcgcacttggccgccccttggtggcgtccacacggtgtgccccctgtgtggcgcccctgggtggcctatttggggcatcacggtcgtggcggttcgtagaccggcaagtggggtgcccccacagagggggggtggtttcttgtgctactgttatttaataagttgtggctagttacactctcaagctgaggactggggcgtccaccatagagagacattgccaccacagcttgagaagaaagacccaccctttatccacgcgtaagactctgttagagagagactatttggttgtaggacacaagaagatatgtgtaaacacagcgttggaggtccgctgagaggtctaacatctgggattgttgtctgtgaaaacgattgtgtgcttaaatgtgtgacagaaagagaggggcacacaggagagatatacacgcgttggcacagatatatgtagagagggaacacaaatcccacttgagaggtgtgagaccccacggcaagaactcgtggtggccccgaaacggaggagttggtaacctctgtgaataagacacctcgagaagacactctttggcggtgtgaatgtaatgcggtgggtcacgagagatggtagagaaataaacttccaacttgtgcgccacttcatcttcactcggtgttctttaataactgaaagctcagtgcagttggccttagaatatcccagcactttctttcttggtttggtgaatgctgtgtgtaataagcaatggtagaattgtcttggagacaaaatatagtgatccttgggacaactggtgtttcagtaacattcttggataacgtcacactcgatcaagaataattttttatttttaagaaagcatgaaccccgccataaaaatacatatttttgagtcttaaaaaaaataaaataaaatagaaaaaataaaaag

SEQ ID NO: 561740 - DNA, 237 bp, Homo sapiens
gcagtagcgctggtccaccatattaaatatctcccatgaaaagatgctcagcatcactaaccattaaaaaatgcaaatcaaaaccataatgagatactacttctcacccattaggaaagcttattttcctctttttttttttttttttttttggaggcagggtaccccaagtggggaaaaaggtcagggtgggggggatcctcaaaagtcgcaccgtagggcttgtgcaacgcgtgg

SEQ ID NO: 561741 - DNA, 4654 bp, Homo sapiens
agtaattgctgtaccaaggtcagaatcgccacctgaggcctgaatatcagcgtaagatagtgtccaaagcagtcttaagaagaggtcccattaccccactctttccgccctaatggaggtctccagtttagcctcacagcatggaaccacaggttactctaaatgtgacttttaaaaatgaaattcaaagctttctggtttctgatccagaaaatacaacttgggctgatatcgaagctatggtaaaagtttcatttgatctgaatactattcaaataaaatacctggatgaggaaaatgaagaggtatccatcaacagtcaaggagaatatgaagaagcgcttaagatggcagttaaacagggaaaccaactgcagatgcaagtccacgaagggcaccatgtcgttgatgaagccccacccccagttgtaggagcaaaacgactagctgccagggcagggaagaagccacttgcacattactcttcactggtgagagtcttgggatcagacatgaagaccccagaggatcctgcagtgcagtcgtttccacttgttccatgtgacacagaccagcctcaagacaagcccccagactggttcacaagctacctggagacgttcagagaacaagtggttaacgaaacggttgagaagcttgaacagaaattacatgaaaagcttgtcctccagaacccatccttgggttcttgtccctcagaagtctcaatgcctacttcagaagaaacattgtttttgccagaaaaccagttcagctggcatattgcttgcaacaactgccaaagaaggattgttggtgtccgctaccagtgtagcctatgcccatcctacaatatctgtgaagattgtgaagcagggccatatggccatgacactaaccacgtcctgctgaagttgcggagacctgttgtgggctcctctgaaccgttctgtcactcaaagtactctactcctcgtcttcctgctgctctggaacaagtcaggctccagaaacaggttgataagaactttcttaaagcagaaaagcaaaggttgcgagctgagaagaaacaacgtaaagcagaggtcaaggaacttaaaaagcagcttaaactccataggaaaattcacctgtggaattcaatccatggactccagagccccaagtctcctttaggccgacctgagagcttgctccagtctaataccctgatgctccctttgcagccctgtacctccgttatgccaatgctcagtgcagcatttgtggatgagaatttgcctgatgggactcaccttcagccaggaaccaagtttatcaaacactggaggatgaaaaatacaggaaatgtaaagtggagtgcagacacaaagctcaagttcatgtggggaaacctgactttggcttccacagaaaagaaggatgttttggttccctgcctcaaggccggccatgtgggagttgtatctgtggagttcattgccccagccttggagggaacgtatacttcccattggcgtctttctcacaaaggccagcaatttgggcctcgggtctggtgcagtatcatagtagatcctttcccctccgaagagagccctgataacattgaaaagggcatgatcagctcaagcaaaactgatgatctcacctgccagcaagaggaaacttttcttctggctaaagaagaaagacagcttggtgaagtgactgagcagacagaagggacagcagcctgcatcccacagaaggcaaaaaatgttgccagtgagagggagctctacatcccatctgtggatcttctgactgcccaggacctgctgtcctttgagctgttggatataaacattgttcaagagttggagagagtgccccacaacacccctgtggatgtgactccctgcatgtctcctctgccacatgacagtcctttaatagagaagccaggcttggggcagatagaggaagagaatgaaggggcaggatttaaagcacttcctgattctatggtgtcagtaaagaggaaggctgagaacattgcttctgtggaggaagcagaagaagacctgagtgggacccagtttgtgtgtgagacagtaatccgatcccttaccttggatgctgccccagaccacaaccctccttgcagacagaagtccttgcagatgacatttgccttgcctgaaggaccacttggaaatgagaaggaggagattatccatatcgctgaggaagaagctgtcatggaggaggaggaggatgaggaggatgaggaggaggaggatgagctcaaagatgaagttcaaagtcagtcctctgcttcctcagaggattacatcatcatcctgcctgagtgctttgataccagccgccccctgggggattctatgtacagctctgcgctctcacagccaggcctggagcgaggtgctgaaggcaagcctggggttgaggctgggcaggaaccagctgaggctggggaaagactccctggaggggagaaccagccacaggagcacagcataagtgacatcctcacgacctcacagactctggaaacagtgcccctaatcccagaggtagtggagcttccaccgtcactgcccaggagctctccttgtgtacatcatcatggttccccaggagtggatttaccagttaccataccagaagtttcttcagtccctgatcagatcagaggagagcccagaggctcatcaggacttgtaaacagcagacagaagagctatgaccactcaaggcaccatcatgggagcagcattgctggaggactggtgaagggggctttgtctgttgctgcctctgcatacaaggccctgtttgctgggccaccagtcactgcacagccaataatttctgaagatcagacagcagccctgatggcccatctctttgaaatgggattctgtgacaggcagctgaacctacggctgctgaagaaacacaattacaatatcctgcaggttgtgacagaacttcttcagttaaacaacaacgactggtacagccaacgctattgaggagtgaccttgtattaaataactgcctgctgctcagagatgatctttattctgtcattggggtatgggatagaagcccttgcttatttttaatctgatgaatctgtatagagcccatcgttgagttaccaagacaatacctgctacagtattttggggagcaaactaaagaccagaacttaaattttcactttagacattggatgaatagtatgaagacagtttttcagttgatttggataaaactattttagtgcattgacaagtgtaacttcaacttcatatagaaccatttttctttctgcttttattgaaactgagtatttttctttggctaatgtggattttttatggggatatctgttaattttcaggttttgaaagacattaacctcggaagttgtttttaagaattattctcataattcttattctcataatttctgtaatccacctcaagcttcatagttatttggcattgaaataacacccagagcatgatagaaatgttgttactcttcctctctcaaggagaaagtaattttcctgcaatacttaataattggcaccgttgctttctaaagactccatggtgcattcaagagtatccaacttcaagggaatctccgcatttcaatgaaaggaggaagagtgtgctgataaacctaccagcacctattgagcaatgtctattatagtaattttgcatacatttttatttaagggaaaaaatataggtattgtgaaatattttgctaatcttatagaaaaggaaaaaatcccgttatttaaagggaaaagtaaatttaacagttgccttttttcttaatgtcagggcagatcttattttacagtacagtgggggaaatagaaaacatgtgaaaggcaaaaggcaggctcctaaattaatgtcagtgaagttcagggtgggcaaatgagtgtgtgtgaggtataggaaatgctgatgacttctttaatgcttgaagtccgttcacaggtatctagccctagaatgcctagaacaggaagaggcagctggtgttctgcaaaacttggacaggggcaaagttgctgaaaaagttttggtttaacccgaagataagtggaaaagagcttgtccatgaacccaggttctcactctgtttacagaagtgtgttgagtacagttggtgaaggaagaggtaacaaaaaatgctaaatattttatccatgaaaatgacttccagaaaaggaagaatatgaaccccagaccgaaggggaaaagatagttaatagtattatctaacctggttggtatttgtaatgaatggtgattttaattagtcattagccataatgatgtttatttacagtataactcctgaatgctacttaaataaaccaggattcaaactgcaagccagccaggccgttcattatttaaaacgttttaatcggggcttccgggtagaaggtggagcggcagggtgtaattgggttgatgggtgggacctgtcttgaccatcggagttttataatcgagggccaggagggcccgggttgctctcctggttatgtatgtacttgtacataaccaccttaagaatggtgaaataaatgttcttggaaattcc

SEQ ID NO: 561742 - DNA, 4770 bp, Homo sapiens
agtaattgctgtaccaaggtcagaatcgccacctgaggcctgaatatcagcgtaagatagtgtccaaagcagtcttaagaagaggtcccattaccccactctttccgccctaatggaggtctccagtttaaggtaaataaaaggattgttgggaggtggagggaaagaactactatttccaacatgcattgcggaacgaaaggccttggccacactgttccttggaaactgtagtcttatggagaggaacatccaataccaaagcgggcacaattctcacggaaatccagtggatagattggagacctccgcgggcttatacatgtcaacagtaatggattggagtgttgttatgttctcctatcttgagagcagagactaggccaaaaaaagatacctacaactcctaggaagactacgattcccatccagccccacgagtctcgggcaagtagtcctctaagcctcacagcatggaaccacaggttactctaaatgtgacttttaaaaatgaaattcaaagctttctggtttctgatccagaaaatacaacttgggctgatatcgaagctatggtaaaagtttcatttgatctgaatactattcaaataaaatacctggatgaggaaaatgaagaggtatccatcaacagtcaaggagaatatgaagaagcgcttaagatggcagttaaacagggaaaccaactgcagatgcaagtccacgaagggcaccatgtcgttgatgaagccccacccccagttgtaggagcaaaacgactagctgccagggcagggaagaagccacttgcacattactcttcactggtgagagtcttgggatcagacatgaagaccccagaggatcctgcagtgcagtcgtttccacttgttccatgtgacacagaccagcctcaagacaagcccccagactggttcacaagctacctggagacgttcagagaacaagtggttaacgaaacggttgagaagcttgaacagaaattacatgaaaagcttgtcctccagaacccatccttgggttcttgtccctcagaagtctcaatgcctacttcagaagaaacattgtttttgccagaaaaccagttcagctggcatattgcttgcaacaactgccaaagaaggattgttggtgtccgctaccagtgtagcctatgcccatcctacaatatctgtgaagattgtgaagcagggccatatggccatgacactaaccacgtcctgctgaagttgcggagacctgttgtgggctcctctgaaccgttctgtcactcaaagtactctactcctcgtcttcctgctgctctggaacaagtcaggctccagaaacaggttgataagaactttcttaaagcagaaaagcaaaggttgcgagctgagaagaaacaacgtaaagcagaggtcaaggaacttaaaaagcagcttaaactccataggaaaattcacctgtggaattcaatccatggactccagagccccaagtctcctttaggccgacctgagagcttgctccagtctaataccctgatgctccctttgcagccctgtacctccgttatgccaatgctcagtgcagcatttgtggatgagaatttgcctgatgggactcaccttcagccaggaaccaagtttatcaaacactggaggatgaaaaatacaggaaatgtaaagtggagtgcagacacaaagctcaagttcatgtggggaaacctgactttggcttccacagaaaagaaggatgttttggttccctgcctcaaggccggccatgtgggagttgtatctgtggagttcattgccccagccttggagggaacgtatacttcccattggcgtctttctcacaaaggccagcaatttgggcctcgggtctggtgcagtatcatagtagatcctttcccctccgaagagagccctgataacattgaaaagggcatgatcagctcaagcaaaactgatgatctcacctgccagcaagaggaaacttttcttctggctaaagaagaaagacagcttggtgaagtgactgagcagacagaagggacagcagcctgcatcccacagaaggcaaaaaatgttgccagtgagagggagctctacatcccatctgtggatcttctgactgcccaggacctgctgtcctttgagctgttggatataaacattgttcaagagttggagagagtgccccacaacacccctgtggatgtgactccctgcatgtctcctctgccacatgacagtcctttaatagagaagccaggcttggggcagatagaggaagagaatgaaggggcaggatttaaagcacttcctgattctatggtgtcagtaaagaggaaggctgagaacattgcttctgtggaggaagcagaagaagacctgagtgggacccagtttgtgtgtgagacagtaatccgatcccttaccttggatgctgccccagaccacaaccctccttgcagacagaagtccttgcagatgacatttgccttgcctgaaggaccacttggaaatgagaaggaggagattatccatatcgctgaggaagaagctgtcatggaggaggaggaggatgaggaggatgaggaggaggaggatgagctcaaagatgaagttcaaagtcagtcctctgcttcctcagaggattacatcatcatcctgcctgagtgctttgataccagccgccccctgggggattctatgtacagctctgcgctctcacagccaggcctggagcgaggtgctgaaggcaagcctggggttgaggctgggcaggaaccagctgaggctggggaaagactccctggaggggagaaccagccacaggagcacagcataagtgacatcctcacgacctcacagactctggaaacagtgcccctaatcccagaggtagtggagcttccaccgtcactgcccaggagctctccttgtgtacatcatcatggttccccaggagtggatttaccagttaccataccagaagtttcttcagtccctgatcagatcagaggagagcccagaggctcatcaggacttgtaaacagcagacagaagagctatgaccactcaaggcaccatcatgggagcagcattgctggaggactggtgaagggggctttgtctgttgctgcctctgcatacaaggccctgtttgctgggccaccagtcactgcacagccaataatttctgaagatcagacagcagccctgatggcccatctctttgaaatgggattctgtgacaggcagctgaacctacggctgctgaagaaacacaattacaatatcctgcaggttgtgacagaacttcttcagttaaacaacaacgactggtacagccaacgctattgaggagtgaccttgtattaaataactgcctgctgctcagagatgatctttattctgtcattggggtatgggatagaagcccttgcttatttttaatctgatgaatctgtatagagcccatcgttgagttaccaagacaatacctgctacagtattttggggagcaaactaaagaccagaacttaaattttcactttagacattggatgaatagtatgaagacagtttttcagttgatttggataaaactattttagtgcattgacaagtgtaacttcaacttcatatagaaccatttttctttctgcttttattgaaactgagtatttttctttggctaatgtggattttttatggggatatctgttaattttcaggttttgaaagacattaacctcggaagttgtttttaagaattattctcataattcttattctcataatttctgtaatccacctcaagcttcatagttatttggcattgaaataacacccagagcatgatagaaatgttgttactcttcctctctcaaggagaaagtaattttcctgcaatacttaataattggcaccgttgctttctaaagactccatggtgcattcaagagtatccaacttcaagggaatctccgcatttcaatgaaaggaggaagagtgtgctgataaacctaccagcacctattgagcaatgtctattatagtaattttgcatacatttttatttaagggaaaaaatataggtattgtgaaatattttgctaatcttatagaaaaggaaaaaatcccgttatttaaagggaaaagtaaatttaacagttgccttttttcttaatgtcagggcagatcttattttacagtacagtgggggaaatagaaaacatgtgaaaggcaaaaggcaggctcctaaattaatgtcagtgaagttcagggtgggcaaatgagtgtgtgtgaggtataggaaatgctgatgacttctttaatgcttgaagtccgttcacaggtatctagccctagaatgcctagaacaggaagaggcagctggtgttctgcaaaacttggacaggggcaaagttgctgaaaaagttttggtttaacccgaagataagtggaaaagagcttgtccatgaacccaggttctcactctgtttacagaagtgtgttgagtacagttggtgaaggaagaggtaacaaaaaatgctaaatattttatccatgaaaatgacttccagaaaaggaagaatatgaaccccagaccgaaggggaaaagatagttaatagtattatctaacctggttggtatttgtaatgaatggtgattttaattagtcattagccataatgatgtttatttacagtataactcctgaatgctacttaaataaaccaggattcaaactgc

SEQ ID NO: 561743 - DNA, 409 bp, Homo sapiens
tttatttttaatctgactatggcataacattacaagacggaggcaaaaatatttaacccccaaatatatttccttgccctaccttgaacttgccctgcagagtctcttgtgaggagaatccacatcctataaagaagcccctttcccctttgttttccttcctttctttccagtccaggagatcatcaactaagagccaggcaccccttttaagtcgataagaaacagtttacaacctgctctctctctctctgaagtctgctgaggagcttcccctgcacaataaaacttggcctccacggatcctttatctttaacctggaacattcctttccattggatcccgggtctttcagcttaagctcaaacccaatttgttcaaccaggaaaatgttttaaattttacctt

SEQ ID NO: 561744 - DNA, 3151 bp, Homo sapiens
agcgggctgtctttatccgccatgttagattcaccccacagggatagcggcagagccggtagcggacggtccttgcattggcctccggcaggcgccccccgggggcgggaagctgcctcacagcatggaaccacaggttactctaaatgtgacttttaaaaatgaaattcaaagctttctggtttctgatccagaaaatacaacttgggctgatatcgaagctatggtaaaagtttcatttgatctgaatactattcaaataaaatacctggatgaggaaaatgaagaggtatccatcaacagtcaaggagaatatgaagaagcgcttaagatggcagttaaacagggaaaccaactgcagatgcaagtccacgaagggcaccatgtcgttgatgaagccccacccccagttgtaggagcaaaacgactagctgccagggcagggaagaagccacttgcacattactcttcactggtgagagtcttgggatcagacatgaagaccccagaggatcctgcagtgcagtcgtttccacttgttccatgtgacacagaccagcctcaagacaagcccccagactggttcacaagctacctggagacgttcagagaacaagtggttaacgaaacggttgagaagcttgaacagaaattacatgaaaagcttgtcctccagaacccatccttgggttcttgtccctcagaagtctcaatgcctacttcagaagaaacattgtttttgccagaaaaccagttcagctggcatattgcttgcaacaactgccaaagaaggattgttggtgtccgctaccagtgtagcctatgcccatcctacaatatctgtgaagattgtgaagcagggccatatggccatgacactaaccacgtcctgctgaagttgcggagacctgttgtgggctcctctgaaccgttctgtcactcaaagtactctactcctcgtcttcctgctgctctggaacaagtcaggctccagaaacaggttgataagaactttcttaaagcagaaaagcaaaggttgcgagctgagaagaaacaacgtaaagcagaggtcaaggaacttaaaaagcagcttaaactccataggaaaattcacctgtggaattcaatccatggactccagagccccaagtctcctttaggccgacctgagagcttgctccagtctaataccctgatgctccctttgcagccctgtacctccgttatgccaatgctcagtgcagcatttgtggatgagaatttgcctgatgggactcaccttcagccaggaaccaagtttatcaaacactggaggatgaaaaatacaggaaatgtaaagtggagtgcagacacaaagctcaagttcatgtggggaaacctgactttggcttccacagaaaagaaggatgttttggttccctgcctcaaggccggccatgtgggagttgtatctgtggagttcattgccccagccttggagggaacgtatacttcccattggcgtctttctcacaaaggccagcaatttgggcctcgggtctggtgcagtatcatagtagatcctttcccctccgaagagagccctgataacattgaaaagggcatgatcagctcaagcaaaactgatgatctcacctgccagcaagaggaaacttttcttctggctaaagaagaaagacagcttggtgaagtgactgagcagacagaagggacagcagcctgcatcccacagaaggcaaaaaatgttgccagtgagagggagctctacatcccatctgtggatcttctgactgcccaggacctgctgtcctttgagctgttggatataaacattgttcaagagttggagagagtgccccacaacacccctgtggatgtgactccctgcatgtctcctctgccacatgacagtcctttaatagagaagccaggcttggggcagatagaggaagagaatgaaggggcaggatttaaagcacttcctgattctatggtgtcagtaaagaggaaggctgagaacattgcttctgtggaggaagcagaagaagacctgagtgggacccagtttgtgtgtgagacagtaatccgatcccttaccttggatgctgccccagaccacaaccctccttgcagacagaagtccttgcagatgacatttgccttgcctgaaggaccacttggaaatgagaaggaggagattatccatatcgctgaggaagaagctgtcatggaggaggaggaggatgaggaggatgaggaggaggaggatgagctcaaagatgaagttcaaagtcagtcctctgcttcctcagaggattacatcatcatcctgcctgagtgctttgataccagccgccccctgggggattctatgtacagctctgcgctctcacagccaggcctggagcgaggtgctgaaggcaagcctggggttgaggctgggcaggaaccagctgaggctggggaaagactccctggaggggagaaccagccacaggagcacagcataagtgacatcctcacgacctcacagactctggaaacagtgcccctaatcccagaggtagtggagcttccaccgtcactgcccaggagctctccttgtgtacatcatcatggttccccaggagtggatttaccagttaccataccagaagtttcttcagtccctgatcagatcagaggagagcccagaggctcatcaggacttgtaaacagcagacagaagagctatgaccactcaaggcaccatcatgggagcagcattgctggaggactggtgaagggggctttgtctgttgctgcctctgcatacaaggccctgtttgctgggccaccagtcactgcacagggtctctggggcttgctgtcattccttcatctggccaaaaaatgcttcttcctgaaagccccgagtgaagcattctcctggttctaagtacagttcattagctccccggtttcccttttctcctccttcaagtacacagataactaatctaaaatagggccttcccagtccgaaccgttggtatcaagtacacaggagtgccatagccttgaatctaattacctagtactttgaataaatctggaaagactagtatgcttgcaagatgatacaaatgtataaaataaacatttaaattat

SEQ ID NO: 561745 - DNA, 531 bp, Homo sapiens
  misc_feature (531)..(531): n is a, c, g, or t
tgaaaagggaatttcccttttgttccccaggctgaaaatgggccaattttggctaaaaaaaccctttgcctccgaaattaaaaaaatttttctgtttaaacctcccaagtggtggggataacaggcctcccccccctttcctgggtaatttttttttttttaagggagggagggggttcttcctttgtggggagggttggtttataaccccccgccctgaggggaacccctccgtctggcctccaaaagggggagaattacaagggtggaccacttcccttggtaggggggggtatataaaaagagtacttcctttttaattcgaaatgtgtggttaaaaaaaccctgttgtgcgatatcatataactgggagggcccctgttcgccaaaaataatgtttggcctacccccgttaataggagggaaaggggggatattaatatgttatttgtttgagtgtgaaaattggggaggaggggcgggcagtggaagttgtgatattttggttgtgttatcatggggcggattgan

SEQ ID NO: 561746 - DNA, 4715 bp, Homo sapiens
  misc_feature (2977)..(2979): n is a, c, g, or t
  misc_feature (2984)..(2984): n is a, c, g, or t
agcgggctgtctttatccgccatgttagattcaccccacagggatagcggcagagccggtagcggacggtccttgcattggcctccggcaggcgccccccgggggcgggaagctgcctcacagcatggaaccacaggttactctaaatgtgacttttaaaaatgaaattcaaagctttctggtttctgatccagaaaatacaacttgggctgatatcgaagctatggtaaaagtttcatttgatctgaatactattcaaataaaatacctggatgaggaaaatgaagaggtatccatcaacagtcaaggagaatatgaagaagcgcttaagatggcagttaaacagggaaaccaactgcagatgcaagtccacgaagggcaccatgtcgttgatgaagccccacccccagttgtaggagcaaaacgactagctgccagggcagggaagaagccacttgcacattactcttcactggtgagagtcttgggatcagacatgaagaccccagaggatcctgcagtgcagtcgtttccacttgttccatgtgacacagaccagcctcaagacaagcccccagactggttcacaagctacctggagacgttcagagaacaagtggttaacgaaacggttgagaagcttgaacagaaattacatgaaaagcttgtcctccagaacccatccttgggttcttgtccctcagaagtctcaatgcctacttcagaagaaacattgtttttgccagaaaaccagttcagctggcatattgcttgcaacaactgccaaagaaggattgttggtgtccgctaccagtgtagcctatgcccatcctacaatatctgtgaagattgtgaagcagggccatatggccatgacactaaccacgtcctgctgaagttgcggagacctgttgtgggctcctctgaaccgttctgtcactcaaagtactctactcctcgtcttcctgctgctctggaacaagtcaggctccagaaacaggttgataagaactttcttaaagcagaaaagcaaaggttgcgagctgagaagaaacaacgtaaagcagaggtcaaggaacttaaaaagcagcttaaactccataggaaaattcacctgtggaattcaatccatggactccagagccccaagtctcctttaggccgacctgagagcttgctccagtctaataccctgatgctccctttgcagccctgtacctccgttatgccaatgctcagtgcagcatttgtggatgagaatttgcctgatgggactcaccttcagccaggaaccaagtttatcaaacactggaggatgaaaaatacaggaaatgtaaagtggagtgcagacacaaagctcaagttcatgtggggaaacctgactttggcttccacagaaaagaaggatgttttggttccctgcctcaaggccggccatgtgggagttgtatctgtggagttcattgccccagccttggagggaacgtatacttcccattggcgtctttctcacaaaggccagcaatttgggcctcgggtctggtgcagtatcatagtagatcctttcccctccgaagagagccctgataacattgaaaagggcatgatcagctcaagcaaaactgatgatctcacctgccagcaagaggaaacttttcttctggctaaagaagaaagacagcttggtgaagtgactgagcagacagaagggacagcagcctgcatcccacagaaggcaaaaaatgttgccagtgagagggagctctacatcccatctgtggatcttctgactgcccaggacctgctgtcctttgagctgttggatataaacattgttcaagagttggagagagtgccccacaacacccctgtggatgtgactccctgcatgtctcctctgccacatgacagtcctttaatagagaagccaggcttggggcagatagaggaagagaatgaaggggcaggatttaaagcacttcctgattctatggtgtcagtaaagaggaaggctgagaacattgcttctgtggaggaagcagaagaagacctgagtgggacccagtttgtgtgtgagacagtaatccgatcccttaccttggatgctgccccagaccacaaccctccttgcagacagaagtccttgcagatgacatttgccttgcctgaaggaccacttggaaatgagaaggaggagattatccatatcgctgaggaagaagctgtcatggaggaggaggaggatgaggaggatgaggaggaggaggatgagctcaaagatgaagttcaaagtcagtcctctgcttcctcagaggattacatcatcatcctgcctgagtgctttgataccagccgccccctgggggattctatgtacagctctgcgctctcacagccaggcctggagcgaggtgctgaaggcaagcctggggttgaggctgggcaggaaccagctgaggctggggaaagactccctggaggggagaaccagccacaggagcacagcataagtgacatcctcacgacctcacagactctggaaacagtgcccctaatcccagaggtagtggagcttccaccgtcactgcccaggagctctccttgtgtacatcatcatggttccccaggagtggatttaccagttaccataccagaagtttcttcagtccctgatcagatcagaggagagcccagaggctcatcaggacttgtaaacagcagacagaagagctatgaccactcaaggcaccatcatgggagcagcattgctggaggactggtgaagggggctttgtctgttgctgcctctgcatacaaggccctgtttgctgggccaccagtcactgcacagccaataatttctgaagatcagacagcagccctgatggcccatctctttgaaatggggagaagaaaaaaaaaattttttttttttttcccccccttttggggggtttgggaaaaacccgaagggggnnnccccnattctgtgacaggcagctgaacctacggctgctgaagaaacacaattacaatatcctgcaggttgtgacagaacttcttcagttaaacaacaacgactggtacagccaacgctattgaggagtgaccttgtattaaataactgcctgctgctcagagatgatctttattctgtcattggggtatgggatagaagcccttgcttatttttaatctgatgaatctgtatagagcccatcgttgagttaccaagacaatacctgctacagtattttggggagcaaactaaagaccagaacttaaattttcactttagacattggatgaatagtatgaagacagtttttcagttgatttggataaaactattttagtgcattgacaagtgtaacttcaacttcatatagaaccatttttctttctgcttttattgaaactgagtatttttctttggctaatgtggattttttatggggatatctgttaattttcaggttttgaaagacattaacctcggaagttgtttttaagaattattctcataattcttattctcataatttctgtaatccacctcaagcttcatagttatttggcattgaaataacacccagagcatgatagaaatgttgttactcttcctctctcaaggagaaagtaattttcctgcaatacttaataattggcaccgttgctttctaaagactccatggtgcattcaagagtatccaacttcaagggaatctccgcatttcaatgaaaggaggaagagtgtgctgataaacctaccagcacctattgagcaatgtctattatagtaattttgcatacatttttatttaagggaaaaaatataggtattgtgaaatattttgctaatcttatagaaaaggaaaaaatcccgttatttaaagggaaaagtaaatttaacagttgccttttttcttaatgtcagggcagatcttattttacagtacagtgggggaaatagaaaacatgtgaaaggcaaaaggcaggctcctaaattaatgtcagtgaagttcagggtgggcaaatgagtgtgtgtgaggtataggaaatgctgatgacttctttaatgcttgaagtccgttcacaggtatctagccctagaatgcctagaacaggaagaggcagctggtgttctgcaaaacttggacaggggcaaagttgctgaaaaagttttggtttaacccgaagataagtggaaaagagcttgtccatgaacccaggttctcactctgtttacagaagtgtgttgagtacagttggtgaaggaagaggtaacaaaaaatgctaaatattttatccatgaaaatgacttccagaaaaggaagaatatgaaccccagaccgaaggggaaaagatagttaatagtattatctaacctggttggtatttgtaatgaatggtgattttaattagtcattagccataatgatgtttatttacagtataactcctgaatgctacttaaataaaccaggattcaaactgcaagccagccaggccgttcattatttaaaacgttttaatcggggcttccgggtagaaggtggagcggcagggtgtaattgggttgatgggtgggacctgtcttgaccatcggagttttataatcgagggccaggagggcccgggttgctctcctggttatgtatgtacttgtacataaccaccttaagaatggtgaaataaatgttcttggaaattcc

SEQ ID NO: 561747 - DNA, 123 bp, Homo sapiens
  misc_feature (16)..(16): n is a, c, g, or t
gaggatcacgatgtcncgtgggctggcttgagtcccccagatcccagaaggaagatgcagcaccttttcgggggttgtgcctaattttgtttcacaatctgagttcaaattaacggacatcgt

SEQ ID NO: 561748 - DNA, 351 bp, Homo sapiens
  misc_feature (60)..(60): n is a, c, g, or t
attgaacgaagagtttgatcctggctcaggatgaacgctgacagaatgcttacacatgcnagtcaacttgaatttgggtttttaacttagatttgggtggcggacgggtgagtaacgcgtaaagaacttgcctcacagctagggacaacatttagaaatgaatgctaatacctgatattatgattttaaggcatcttagaattatgaaagctataagcactgtgagagagctttgcgtcccattagctagttggagaggttacagctcacctaggccattattggtagccggcctgagagggtgaacggccacaaggggactgagacacggcccttactcctacgggaggc

SEQ ID NO: 561749 - DNA, 4408 bp, Homo sapiens
agcgggctgtctttatccgccatgttagattcaccccacagggatagcggcagagccggtagcggacggtccttgcattggcctccggcaggcgccccccgggggcgggaagctgcctcacagcatggaaccacaggttactctaaatgtgacttttaaaaatgaaattcaaagctttctggtttctgatccagaaaatacaacttgggctgatatcgaagctatggtaaaagtttcatttgatctgaatactattcaaataaaatacctggatgaggaaaatgaagaggtatccatcaacagtcaaggagaatatgaagaagcgcttaagatggcagttaaacagggaaaccaactgcagatgcaagtccacgaagggcaccatgtcgttgatgaagccccacccccagttgtaggagcaaaacgactagctgccagggcagggaagaagccacttgcacattactcttcactggtgagagtcttgggatcagacatgaagaccccagaggatcctgcagtgcagtcgtttccacttgttccatgtgacacagaccagcctcaagacaagcccccagactggttcacaagctacctggagacgttcagagaacaagtggttaacgaaacggttgagaagcttgaacagaaattacatgaaaagcttgtcctccagaacccatccttgggttcttgtccctcagaagtctcaatgcctacttcagaagaaacattgtttttgccagaaaaccagttcagctggcatattgcttgcaacaactgccaaagaaggattgttggtgtccgctaccagtgtagcctatgcccatcctacaatatctgtgaagattgtgaagcagggccatatggccatgacactaaccacgtcctgctgaagttgcggagacctgttgtgggctcctctgaaccgttctgtcactcaaagtactctactcctcgtcttcctgctgctctggaacaagtcaggctccagaaacaggttgataagaactttcttaaagcagaaaagcaaaggttgcgagctgagaagaaacaacgtaaagcagaggtcaaggaacttaaaaagcagcttaaactccataggaaaattcacctgtggaattcaatccatggactccagagccccaagtctcctttaggccgacctgagagcttgctccagtctaataccctgatgctccctttgcagccctgtacctccgttatgccaatgctcagtgcagcatttgtggatgagaatttgcctgatgggactcaccttcagccaggaaccaagtttatcaaacactggaggatgaaaaatacaggaaatgtaaagtggagtgcagacacaaagctcaagttcatgtggggaaacctgactttggcttccacagaaaagaaggatgttttggttccctgcctcaaggccggccatgtgggagttgtatctgtggagttcattgccccagccttggagggaacgtatacttcccattggcgtctttctcacaaaggccagcaatttgggcctcgggtctggtgcagtatcatagtagatcctttcccctccgaagagagccctgataacattgaaaagggcatgatcagctcaagcaaaactgatgatctcacctgccagcaagaggaaacttttcttctggctaaagaagaaagacagcttggtgaagtgactgagcagacagaagggacagcagcctgcatcccacagaaggcaaaaaatgttgccagtgagagggagctctacatcccatctgtggatcttctgactgcccaggacctgctgtcctttgagctgttggatataaacattgttcaagagttggagagagtgccccacaacacccctgtggatgtgactccctgcatgtctcctctgccacatgacagtcctttaatagagaagccaggcttggggcagatagaggaagagaatgaaggggcaggatttaaagcacttcctgattctatggtgtcagtaaagaggaaggctgagaacattgcttctgtggaggaagcagaagaagacctgagtgggacccagtttgtgtgtgagacagtaatccgatcccttaccttggatgctgccccagaccacaaccctccttgcagacagaagtccttgcagatgacatttgccttgcctgaaggaccacttggaaatgagaaggaggagattatccatatcgctgaggaagaagctgtcatggaggaggaggaggatgaggaggatgaggaggaggaggatgagctcaaagatgaagttcaaagtcagtcctctgcttcctcagaggattacatcatcatcctgcctgagtgctttgataccagccgccccctgggggattctatgtacagctctgcgctctcacagccaggcctggagcgaggtgctgaaggagctctccttgtgtacatcatcatggttccccaggagtggatttaccagttaccataccagaagtttcttcagtccctgatcagatcagaggaggcaccatcatgggagcagcattgctggaggactggtgaagggggctttgtctgttgctgcctctgcatacaaggccctgtttgctgggccaccagtcactgcacagccaataatttctgaagatcagacagcagccctgatggcccatctctttgaaatgggattctgtgacaggcagctgaacctacggctgctgaagaaacacaattacaatatcctgcaggttgtgacagaacttcttcagttaaacaacaacgactggtacagccaacgctattgaggagtgaccttgtattaaataactgcctgctgctcagagatgatctttattctgtcattggggtatgggatagaagcccttgcttatttttaatctgatgaatctgtatagagcccatcgttgagttaccaagacaatacctgctacagtattttggggagcaaactaaagaccagaacttaaattttcactttagacattggatgaatagtatgaagacagtttttcagttgatttggataaaactattttagtgcattgacaagtgtaacttcaacttcatatagaaccatttttctttctgcttttattgaaactgagtatttttctttggctaatgtggattttttatggggatatctgttaattttcaggttttgaaagacattaacctcggaagttgtttttaagaattattctcataattcttattctcataatttctgtaatccacctcaagcttcatagttatttggcattgaaataacacccagagcatgatagaaatgttgttactcttcctctctcaaggagaaagtaattttcctgcaatacttaataattggcaccgttgctttctaaagactccatggtgcattcaagagtatccaacttcaagggaatctccgcatttcaatgaaaggaggaagagtgtgctgataaacctaccagcacctattgagcaatgtctattatagtaattttgcatacatttttatttaagggaaaaaatataggtattgtgaaatattttgctaatcttatagaaaaggaaaaaatcccgttatttaaagggaaaagtaaatttaacagttgccttttttcttaatgtcagggcagatcttattttacagtacagtgggggaaatagaaaacatgtgaaaggcaaaaggcaggctcctaaattaatgtcagtgaagttcagggtgggcaaatgagtgtgtgtgaggtataggaaatgctgatgacttctttaatgcttgaagtccgttcacaggtatctagccctagaatgcctagaacaggaagaggcagctggtgttctgcaaaacttggacaggggcaaagttgctgaaaaagttttggtttaacccgaagataagtggaaaagagcttgtccatgaacccaggttctcactctgtttacagaagtgtgttgagtacagttggtgaaggaagaggtaacaaaaaatgctaaatattttatccatgaaaatgacttccagaaaaggaagaatatgaaccccagaccgaaggggaaaagatagttaatagtattatctaacctggttggtatttgtaatgaatggtgattttaattagtcattagccataatgatgtttatttacagtataactcctgaatgctacttaaataaaccaggattcaaactgcaagccagccaggccgttcattatttaaaacgttttaatcggggcttccgggtagaaggtggagcggcagggtgtaattgggttgatgggtgggacctgtcttgaccatcggagttttataatcgagggccaggagggcccgggttgctctcctggttatgtatgtacttgtacataaccaccttaagaatggtgaaataaatgttcttggaaattcc

SEQ ID NO: 561750 - DNA, 254 bp, Homo sapiens
  misc_feature (60)..(60): n is a, c, g, or t
attgaacgaagagtttgatcctggctcaggatgaacgctgacagaatgcttacacatgcnagtcaacttgaatttgggtttttaacttagatttgggtggcggacgggtgagtaacgcgtaaagaacttgcctcacagctagggacaacatttagaaatgaatgctaatacctgatattatgattttaaggcatcttagaattatgaaagctataagcactgtgagacagcatatacagggccgagctcgacga

SEQ ID NO: 561751 - DNA, 2830 bp, Homo sapiens
agcgggctgtctttatccgccatgttagattcaccccacagggatagcggcagagccggtagcggacggtccttgcattggcctccggcaggcgccccccgggggcgggaagctgcctcacagcatggaaccacaggttactctaaatgtgacttttaaaaatgaaattcaaagctttctggtttctgatccagaaaatacaacttgggctgatatcgaagctatggtaaaagtttcatttgatctgaatactattcaaataaaatacctggatgaggaaaatgaagaggtatccatcaacagtcaaggagaatatgaagaagcgcttaagatggcagttaaacagggaaaccaactgcagatgcaagtccacgaagggcaccatgtcgttgatgaagccccacccccagttgtaggagcaaaacgactagctgccagggcagggaagaagccacttgcacattactcttcactggtgagagtcttgggatcagacatgaagaccccagaggatcctgcagtgcagtcgtttccacttgttccatgtgacacagaccagcctcaagacaagcccccagactggttcacaagctacctggagacgttcagagaacaagtggttaacgaaacggttgagaagcttgaacagaaattacatgaaaagcttgtcctccagaacccatccttgggttcttgtccctcagaagtctcaatgcctacttcagaagaaacattgtttttgccagaaaaccagttcagctggcatattgcttgcaacaactgccaaagaaggattgttggtgtccgctaccagtgtagcctatgcccatcctacaatatctgtgaagattgtgaagcagggccatatggccatgacactaaccacgtcctgctgaagttgcggagacctgttgtgggctcctctgaaccgttctgtcactcaaagtactctactcctcgtcttcctgctgctctggaacaagtcaggctccagaaacaggttgataagaactttcttaaagcagaaaagcaaaggttgcgagccaataatttctgaagatcagacagcagccctgatggcccatctctttgaaatgggattctgtgacaggcagctgaacctacggctgctgaagaaacacaattacaatatcctgcaggttgtgacagaacttcttcagttaaacaacaacgactggtacagccaacgctattgaggagtgaccttgtattaaataactgcctgctgctcagagatgatctttattctgtcattggggtatgggatagaagcccttgcttatttttaatctgatgaatctgtatagagcccatcgttgagttaccaagacaatacctgctacagtattttggggagcaaactaaagaccagaacttaaattttcactttagacattggatgaatagtatgaagacagtttttcagttgatttggataaaactattttagtgcattgacaagtgtaacttcaacttcatatagaaccatttttctttctgcttttattgaaactgagtatttttctttggctaatgtggattttttatggggatatctgttaattttcaggttttgaaagacattaacctcggaagttgtttttaagaattattctcataattcttattctcataatttctgtaatccacctcaagcttcatagttatttggcattgaaataacacccagagcatgatagaaatgttgttactcttcctctctcaaggagaaagtaattttcctgcaatacttaataattggcaccgttgctttctaaagactccatggtgcattcaagagtatccaacttcaagggaatctccgcatttcaatgaaaggaggaagagtgtgctgataaacctaccagcacctattgagcaatgtctattatagtaattttgcatacatttttatttaagggaaaaaatataggtattgtgaaatattttgctaatcttatagaaaaggaaaaaatcccgttatttaaagggaaaagtaaatttaacagttgccttttttcttaatgtcagggcagatcttattttacagtacagtgggggaaatagaaaacatgtgaaaggcaaaaggcaggctcctaaattaatgtcagtgaagttcagggtgggcaaatgagtgtgtgtgaggtataggaaatgctgatgacttctttaatgcttgaagtccgttcacaggtatctagccctagaatgcctagaacaggaagaggcagctggtgttctgcaaaacttggacaggggcaaagttgctgaaaaagttttggtttaacccgaagataagtggaaaagagcttgtccatgaacccaggttctcactctgtttacagaagtgtgttgagtacagttggtgaaggaagaggtaacaaaaaatgctaaatattttatccatgaaaatgacttccagaaaaggaagaatatgaaccccagaccgaaggggaaaagatagttaatagtattatctaacctggttggtatttgtaatgaatggtgattttaattagtcattagccataatgatgtttatttacagtataactcctgaatgctacttaaataaaccaggattcaaactgcaagccagccaggccgttcattatttaaaacgttttaatcggggcttccgggtagaaggtggagcggcagggtgtaattgggttgatgggtgggacctgtcttgaccatcggagttttataatcgagggccaggagggcccgggttgctctcctggttatgtatgtacttgtacataaccaccttaagaatggtgaaataaatgttcttggaaattcc

SEQ ID NO: 561752 - DNA, 87 bp, Homo sapiens
gaatctgaggatcccccaacgatggtcctcagctgcagaacacttcactgcagctgaggaagagaaaagttcagtaactcgctggtt

SEQ ID NO: 561753 - DNA, 124 bp, Homo sapiens
cggaccgggtcgttactacggttcgcgttatgacggttggtacggggtggaacgggacaacaacactgggtaggactggggacggagtaggctggcagtagggtggtgagtggattgcttggcg

SEQ ID NO: 561754 - DNA, 107 bp, Homo sapiens
  misc_feature (15)..(15): n is a, c, g, or t
  misc_feature (49)..(49): n is a, c, g, or t
  misc_feature (98)..(98): n is a, c, g, or t
gccaaagcacatgcnggctccctggttgttcctctcaaacctgtgctgnccaaagattagtaaccagttatacccagtattttgaggttttattatgncttttaata

SEQ ID NO: 561755 - DNA, 1039 bp, Homo sapiens
  misc_feature (586)..(586): n is a, c, g, or t
ttagttcgtggaagcagtaataggttttcttcacccagagcagatggaaggacagcacaattacctattagtgctggaaggaatgatagcgatcatcagatgaaaatcccgagagatagaaagatccgtgccctagactaactgccagcttgagtcgacaaatggtcgttacaccgacgtggaaatgcaacgctggcaaggactcgtagacatacacaaatgatacacacaacatacataccgtgaagttcatcgaggccactacaggagtctcgacaagaaaccgtctgaaaatcctgtgtaactagaaacgaatatgtatcctgcgaacgttcatcacaactcacccctagcctggtgtcacgtgatggaggtaattggatgctgaagtgttagtatgcaggatatgtatgagctctgtttccagaactcaaatctatggaaggatcatgactagcgcttcagcgatgttgaggaggggcggacaagttgatttgcatgtcagcagaaagtggggcaaaggccaaatgaccaggcttgcagggaaaacttacatgctggatgagccaagatgtaccctagctgncagtgtactcctggcactgtctgcttactggcatttgctgcggggctgggaagatcatactagagacatcaggtggcaaaacgctgcgatgtgttataggctccatgattcgtgattcattacatgagcaggaagaattgactctaaccctagcatggtacgagccaaatgtaataaacgatgctggaatggaaaccctctggaatataaaaccagggcttccaggtaatctaaatgagaggagggcagtcatctgggaatggaacacacctataagggggatacccacacattcaggtccacacaaggagaggctcgggacaagcacagacaccacaaaggaggacacacagtaaacgcccaacagtacaaagacgcaagaaaaagccaagggacagagggacgcgaagaccagcgaaactggagaggaacatcaacagaacaagtgtggcc

SEQ ID NO: 561756 - DNA, 121 bp, Homo sapiens
ttcatctcctaccagagtgttgtagtcagctcctttatgtgggagatagaccagaataattctctaacacttgttgaatatcctaaaaacaagggctcccatccccccttcctgtgtatat

SEQ ID NO: 561757 - DNA, 196 bp, Homo sapiens
ccgtgatggctcccaggtgacacacccctcttcctgttacgacacttcctcagtatcacagggtacgccaactctcttcctgtcactgacacatatcctcagcatccacaggtgacaccacctctcttcctgtaccaatgcttcctcattatacacacgtcacacctgggaggacatcacacctgggaggacatca

SEQ ID NO: 561758 - DNA, 872 bp, Homo sapiens
gaggctcagctctttcaaacttcagtaaagtacctatatctagtcctgtcagaaggaacaagagcactaggtaaggaaatgattaagcccatttcctctttgcccttcccaaaatgcttaaacatctgaagggattcttaggcattattgcaatttgcaaactaggaatacccaggtacagtgagataactcgccctttataccacctcataacaagaaatgcaagcagctaaaactcagtccctgactatgggaacctggggctcaaaaaggctttaaccagttaaaacaagccttgctataaagcaccagcccttagtcttcccataggaaagacattcagtctctatgtagcaaaaaggaagagaatggacctgggagttttaactcaggctcaaggtccagctcaacagccagtaggttacctaagcaaggagcttgagtagatggctaaagtacggcaagatttgctctgagcagttacagcagtggattactggtgtcagatggcaacaagttaaccaatgaggaacgagtttaatgtatataacccaataatgcggaagaatggtgtctactaagagaagtccatggccaaaagataatcacctactcaaagatcaggatctgcatgtagaggaatctacgaggcagttaagaaaaactgtactgactgaaccaagaacattcatccagaggaaactgaagaacctgaatatgcgcttgaaccagacatggcaagctatggcacgcaagaaggacccaagaggaaagtcccctagaaaacccagaagccagaaatgcgaggaaacggcataaagttaaccacagaagactacaggacgacaggcacggatcgcaccagacgaaag

SEQ ID NO: 561759 - DNA, 437 bp, Homo sapiens
aagttacaagagaccacatccacccagggattagggttcaagtagcagctgctaacccttgcatcagcccttgtgggactcccaacacaagacaaagctcaggatgctggtgatgctaggaagatgtccctcccctcactgccccacattctcccagtgctctaccagcctcatccatcaaaccagtgaatttcttaatcttgcctcacagtgactgtcagcccaagcggcatccaccatgcatcaagttggagaaaagggtacccaatcagtagagagcgatattggagctttttgttcactcaatccttggatttttttctctccctaagagactctctttttagggggtatgggatacggacaccccacatagtgtctaaagatcctcaacttctttgattttttaaatcatcatcattactatttttaattaa

SEQ ID NO: 561760 - DNA, 783 bp, Homo sapiens
tacccattctaagtcgcgatggcattcctaatgcttatccgaaacgaacaaattctagggctatatacaactacgcaaaggccccaacgtgtggtagggcccctacgggctactacaacccttcggctgacgccagtaaaagctcgttcatactactgaagccccgcgcatcaccgctatagcctctaatctcgcctcttgggtcaagcacttgctaagccttgaggaccatcgcctattgtatatctaggccaagcttcctagtcctgagccgtattagctcacatccctcctgatcaagggatgcagcatctaaactacaaagctcacggccctggcatacgcggcgacacatgtctgagcgaggtaggcgccatagagccaattctccactcattggttgctcggactcggcaagtgcgtgacagcgcaagccaatgcggcagcactttcattggggccctatgcccacgttgatgacaaagagccggttaaaggctattctgagcgcggtaacaacacgccctgaagagacctggacccgaggccgcccaatcacactgggttggagggttccacctccgtataaattctcgcccttgcaagcatgggatgggaccgcatgcacatcagcaggtagtcactaaatccagtcgattgtaagcctccaagggaatacaaaccgcggcaaatttcgatggaccacaatttcacttcaaaaaaccgcttgacgtccccttggggtgtcacaaggataattatacaatgtgaacaaaacgccca

SEQ ID NO: 561761 - DNA, 245 bp, Homo sapiens
ctataacctaggaaacgggatattgcaggaattctcgattacacgggcggcgcagtaaaccgagatacggatttcagcactggtgctcacgatgtcgacggaacttgtacaaggcaggcatgcaccgtattggtgaatacacgtcgaccaggctccagtgttaacgatctgtggaggtcagcacggtgctcaccgtgtcgacggaacttgtccagggaaggcatgcaccgcacgtgtgaatacac

SEQ ID NO: 561762 - DNA, 244 bp, Homo sapiens
taaaaaaaaatgaggtctcattatttggcccaggttggtctcaatttccgggcctcaagtaatcctttcgcctaggcccatagtatgggaataacgggcgtgacccattgcgcccaggtttaactagtttcccatctattttaaggccccctcaagatttcttcggggggcctccatttccaccaagtcacaccttttaactcaccagtgttctctaaagtcctctcctcaagccttgcagttc

SEQ ID NO: 561763 - DNA, 192 bp, Homo sapiens
ccaaggactcaggtaggcgggctgactgaagcgatgcctttggcaatcaagacctgcaccgacccgtgtgccttgacgatgctgaacgctacggtcggggtgtcggggaccggaaaccactcgatcatgtcgttgtttcagaggggctgcccctctggtgacgcaaacacgatggttgtattgccgtcaaag

SEQ ID NO: 561764 - DNA, 402 bp, Homo sapiens
tctctcatttattcttgatcggacttcctgaatgttggattacttcactgtttttaaagaactaccttttggtttcactcatgtaatctgttttattatgtgctgttcatcttttcttttatctttatctcatacctttacttactttagttgtattctgatgttcactttctatcttcctgagttgtatgtttagatattttacagtctttcttgttttctaataatttcttttcttctgagtggccttttatctctgtcgatcagggccatggtaaatggctctatcctcatcatgaacatgcacactggtaatagttacacatgtccttaagagagcgtcaggtctttacaagaacgattttgcctttccgagttatgagatatgtgtgtgcataatct

SEQ ID NO: 561765 - DNA, 143 bp, Homo sapiens
tgtaactgtctctgattgcggctctgcgtgtctctggtgctgtgggtagtctggagtcagggtgctctggtgaagtggtgtgatggcaacctgggaacgatggtccccaggtcgcgatggtaacgtggacaaagggagagcgc

SEQ ID NO: 561766 - DNA, 904 bp, Homo sapiens
agcgggttgcggggcgcgctctcgagaggcggcggcggcccagtggtgtcccgtcggtctcggcgccgggaagaggcggtgtgcgctgcccgacggtggcgggggttggcgacggagcgcgttggtgccaggaccggggtccgaggcgcgctctccgcccacagaaatgagccgtcagactgctacagcattacctaccggtacctcgaagtgtccaccatcccagagggtgcctgcctgactggcacaactgcatccaacaatgacttggcgagtctctagagtgtccagtctgctttgactatgtgttaccgcccattcttcaatgtcagagtggccatctttgtcgtaagcaactggtcgcccaaagctcacattgtttgtccaacttgccggggcccttgtgggcatccattcgccaaccttggctattcgagaacgtggctacttcagtacttttccccctgtaaatattgcgtcttctgggatgtgacattaactctgcaacacaacagaagaagcaagaccatgaagagctctgtgagtcaggccttattccttgtccgtgccctggtgcttcctgtcaaatggcacggcttctctggaatgctgtattgccccaatctgatgcattcagccctaagtccattacaacccctaccagggcagacggcatctacctcccccttgcctaccggcccttaaagtcttccctggctgctgttgacctgcctgcatcactggcagtcccctggacctgggcctatccactccactggtagcccttcgacgcagcccggcaacaaatcgactgggcacaccgacccgcccctcgcactccggaccaccgcctctacgaccaccgccagaccagcccacacaatgcgcaacgcccctgcactcc

SEQ ID NO: 561767 - DNA, 103 bp, Homo sapiens
gcggccgcctactactactactgctcgaattcaagcttctaacgatgtacggggacatgtgtaatcaataaacgatttaattctcttgaatgaaatgaaaaaa

SEQ ID NO: 561768 - DNA, 307 bp, Homo sapiens
agttaataagagtttaagtgatcaagttaatacagatgtgaggtaaatctcacttggaaatcagagattcttaagtttaggggattagattaaaaataattctgtttgaaagtttggcataaaatgtatgtatatgtgcatgtgtgcatagcttttaaaaaaaactggaagggtgtggtttgcactaaagaacgatactttgcttgctcgtgctttcatttctgttgtcacgttgcctgaatttgttggatggggcctctattttcggatccatgatctaaataaaggatgcgaattgtttccacta

SEQ ID NO: 561769 - DNA, 299 bp, Homo sapiens
caccgatgtgatacgcggctcgatctgactacgcggctcgatctcactacgcggctcaggctggtcttgagctcctgacctcaagtgatcctcccgcctcggcctcccaaaatgctgggattacagtcgtgagccacagcacctggccatgtttttaaaagaaggaggaaatactcacgacaattacagtcctcgtttctgcaactggtcacatggctcgtagctggtattgatgactgccttcttctactacccattctgtattcccttagccttcagcaagccgcgtagtcagatcg

SEQ ID NO: 561770 - DNA, 410 bp, Homo sapiens
cagtggcggatacatgtcattataaatttgtccaaacccatagaatgcacgaagcaatagtgaaccctaatgtacactatggacattgggtaatatgttaatgtagtttcatcaatcgtaaaaaatgtaacactttagtgggggatgttgataatgatatacgctatgcatgtgtgggggtaaagggcatatgggatacatctgtatcttctcaatttttgctgtgaatctagaactgctctcaaaaaataaaatcttaaaaaaaaacaacaacaaaaaaacccaaaccaggccaggcactgtggctcgtgcccacaatcctacagttctgggaggccgaggcaggaggattgcttgagaccaggagcttgagatcagcctgggcaacatagggagaccctgtctctaca

SEQ ID NO: 561771 - DNA, 207 bp, Homo sapiens
tatatgtatatatgcggtgagtctatgatggccagctttccgtgctattctagagcgcgtgtgaaagacgtcagccttccatcatgagctcatcgcttacgtcttattctctccagtctacacgcttggtgccctttcctattgcacgtgatttttcccggtttgtccgttttcgtattcgcgcgacgggttctcactctgtcatcc

SEQ ID NO: 561772 - DNA, 173 bp, Homo sapiens
cgatgtggcctgcggatggtaatttaagatcaaaatgaacaagggacaggcagttctgtttgtccttcccatgtcgtgtggaacagccttgacatcctaaagccaggctcacgacaaccaatccggaggatggctcccactcagtgaggcacacccagtgctgggcacatgcg

SEQ ID NO: 561773 - DNA, 346 bp, Homo sapiens
ctgtcctgtcctgtcagctgtgcttcctaaagatcactagagtctgttcatacctctgggccactgtcatccttggcctcgattactgcaatagcctgataccttgcctagagacttatttccttctcagcctttctctgccatgtatcagcgttgacttcagaacacagatcttattacattatgaattttttttctaagcgacaaggtcttggcatgttgctcaggctggacttgaattcctgggcttaagcaggcttactggttcaagctacttaatagcccggaccacaggcatgtgccatcatacccaggtaccttaataaatttaagtgggccttccaat

SEQ ID NO: 561774 - DNA, 318 bp, Homo sapiens
ccccccaattccccgggaaccccccccccccttttttttccccccaaaaaaaacccggggcccattccccccccgggtttttaattttggcccggggggggaaaacattttcccccgggaaacccttttgccctttggcccttttttgggcccccttaaacacaattttttccaaaaaaccgggttgggcccgccccgaatttcccggaattttttccccccccccccccaaatttttttccctttaagttttttttttaacccccccccttttgggggttttttttgccctttaaaaaaaaattttttttttcccca

SEQ ID NO: 561775 - DNA, 416 bp, Homo sapiens
cgctgttatacagccgcatataagctagctaatgacagctgacacctgagtctactgttttcggccagcctcgatgagacccgatttcggtcatcgcgagatattgtctactactaagagatatcaatctgttgtcgttacattcattcgacagtgtcagcttttcttttacacaggagaaattgtccaaacgaccaacattgaggttacttcctcagcttcaaacccgggacagttgttggaaccaacggtgccacttcagctgtcgtcagcattgtggcctcagttgatacacacccaattacaaaccgattctctcggtcctatatgcctcagaagtgtgcagacgggctgtatttagacgggcgcttctacacatacctgtgtccaggttcaggagtatactgtatgtctgt

SEQ ID NO: 561776 - DNA, 855 bp, Homo sapiens
cgcggccgctgggggtgcaacccaagtcgggcttgtctgttgcccccggtgttttaggtttcagcaccttagtatctctggtttaaatcctggcacaccgattgcgctgttcgacccagcgtccacgcttcaagctgcgtcgtttggggtgtgcaagcaggaattttctgccccctggcccagcaggtacagatgggtggccactgctcatactgaagggctccagactgaatgggcccagaaggacctggagaccagagtgggagaaggcaccaggccgacttccccccgtgggtaaaacacacaacccctgcgtggagaaacaccccctgcactggggaacaacaacgtgcgctttgtgtgtgtgcgtgtaaccacatttgtaatatggttttattcccccgagttaatatgcccgggcacttgtttaaatgtcacccccactttgggggaagaaaatgggtttagtgagcactaaatattcccttgtggacactcctacttacttaactgccaccccctgttgacactttggattattgctatagtgtttccgtaaacaccctttgtggactgaatccactctatgtggattttatttttttcaatctttgttaaggtataatttaacactagagtaagttactgtttttaaaatgtatagttccaaattttgaccaaacacatactgtttatttacccccggttaatacatacaaccagtttcttttattttcttctaatcatttgtaccccctttatactcaaccctttttccagcccctggcaggatgattttttctgtttctatagttgcctttttgacagtgtcatataaatggaatcataccaata

SEQ ID NO: 561777 - DNA, 104 bp, Homo sapiens
actctagtaggatcccccaatggcagccgcaagattaggttgaacttcagtgtcctcccctgggcatggcaagctccttctctgagggcaggataatccgacag

SEQ ID NO: 561778 - DNA, 557 bp, Homo sapiens
  misc_feature (70)..(70): n is a, c, g, or t
aataaactagctctattttcaggctaaggatgaaacataaaaaattattcctcatagtcttttagcccanatttgtgtcagccaagtaggccagggaatcctgaaccttgaattggtactaatattcttccagatggataggatatagcggtatctggaagagacatccataaatctctggaataagattacaatagcctaagctgcaaatcaaatttttctagtatgaaggccaactcatagtcaaagttaaccaaatacacaaaaccagcagaaacagaaaactgatacacaaagacccaagatattaaaattattagaatagcctctgaaatagctgtactttttttaaagaaattaaagatgagtttaaaaataattgctgggaacatgaaactgtaaaacatgcatatcagatttttttaaagtagaactttggaaactgagtaatacaataccaaaattaatagtagatagctttaacatgccttcagagaaaattagcaagttgggggagataggccagaaaaagtataccaaatgcaatagagacagga

SEQ ID NO: 561779 - DNA, 147 bp, Homo sapiens
  misc_feature (35)..(35): n is a, c, g, or t
  misc_feature (50)..(50): n is a, c, g, or t
  misc_feature (58)..(58): n is a, c, g, or t
  misc_feature (61)..(61): n is a, c, g, or t
  misc_feature (72)..(72): n is a, c, g, or t
  misc_feature (79)..(79): n is a, c, g, or t
gcagataactacaactcacattgcatgcccatacntattattctgcgctnaactgtantcntaggcacagcnctatacntccttattcgacccgatctgggccagcctagcgaccttctaggttacgaccacatctacgacgttatc

SEQ ID NO: 561780 - DNA, 432 bp, Homo sapiens
  misc_feature (6)..(6): n is a, c, g, or t
  misc_feature (69)..(69): n is a, c, g, or t
  misc_feature (82)..(82): n is a, c, g, or t
  misc_feature (93)..(93): n is a, c, g, or t
  misc_feature (111)..(111): n is a, c, g, or t
  misc_feature (166)..(166): n is a, c, g, or t
  misc_feature (237)..(237): n is a, c, g, or t
  misc_feature (265)..(265): n is a, c, g, or t
  misc_feature (273)..(273): n is a, c, g, or t
  misc_feature (280)..(280): n is a, c, g, or t
  misc_feature (283)..(283): n is a, c, g, or t
  misc_feature (287)..(287): n is a, c, g, or t
  misc_feature (297)..(297): n is a, c, g, or t
  misc_feature (308)..(308): n is a, c, g, or t
  misc_feature (311)..(311): n is a, c, g, or t
  misc_feature (313)..(313): n is a, c, g, or t
  misc_feature (325)..(325): n is a, c, g, or t
  misc_feature (327)..(327): n is a, c, g, or t
  misc_feature (334)..(334): n is a, c, g, or t
  misc_feature (347)..(347): n is a, c, g, or t
  misc_feature (369)..(369): n is a, c, g, or t
  misc_feature (422)..(422): n is a, c, g, or t
cttctnacattttcaatgtctaacactgatatttgtttctgcgccaccttttgcaacagcctttttccnaccacagaagcanaataaattctngcttgttctctggttggntggcttcttttcactttgctggcattttctctgccatgtgcttctgctggctttnagcttgtctggtcaagtcttcaatgtccaccagcatggcatcctgctctgtgtgccgctcatctcgggtgngaagcagctgggccaactcttcattcangctttctntctgggngtngcgntctttggctntctcttgtagntgnanaatagtcatgtntntcaggtnggtgggttttaanattcttttcatcaagcattcanttatatgaggcatgtgtggcagaagatcagcgacgggagacattttcatgttntgtttctcaa

SEQ ID NO: 561781 - DNA, 418 bp, Homo sapiens
  misc_feature (9)..(9): n is a, c, g, or t
  misc_feature (49)..(49): n is a, c, g, or t
  misc_feature (127)..(127): n is a, c, g, or t
  misc_feature (222)..(222): n is a, c, g, or t
  misc_feature (227)..(227): n is a, c, g, or t
  misc_feature (374)..(374): n is a, c, g, or t
  misc_feature (406)..(406): n is a, c, g, or t
cctgttatnaaaacagcctgtccagattccttgccattccagcaaaacnacccaaaggcctagtgtttgcctagatactgttcccagctgatggagagacgatagtgcaagagtcaaaagtcccttnccccggccgggccgcagtggccctcacgccctgtaatccccagcactttgggaggcccaagtgaagtggatcacctgagttcaggagttcaaganccagncctggccaacatggcaaaaccccatctctactaaaaatacaaaaattagctgagcatggtggtgcatgcctgtaatcccagctacttgggaggttgaggcaggagaatcacttgagtctgggaggcagaggttgcagtgagccgagntcatgccactgtactctagcctgggcgacagngcgagactttgt

SEQ ID NO: 561782 - DNA, 421 bp, Homo sapiens
atccactctatagcctttgagaaactgccccaaggatttgcaaggctaagatgctatatctggaggtacctatatgcagaataaacccattgacgacatcacttgtacagactggcaaagtcctcggtgtaacatctgacggagaaattgctcgctgtaagcagctcatctgtgaccccagctacgtacaagatcgggtagaaaaagtgggccaggtgatcagagtaattagcatcctcagacaccccatcaagacacaccaatgatgacaactcctgccagatcattattccacagaaccaagtcactcgaaagtcagatatctacgtctgcatgatctcctttgcgcacactgtagcagcacaagccagtacatagctatagtaagtacacctgtggaacccaaggagcctgcgaaggc

SEQ ID NO: 561783 - DNA, 844 bp, Homo sapiens
atattatactagcatttaccatctcagttctaggaatacaagtatatcgctcaacctcatatcctccctactatgcctagaaggaattacatactagtcgctgttcagttatagctactctcataaccctccaaagccacagttcccgtctgtagccaatatgtgtgccttatttgccagtacttagctcttgggccgccgtgccagaaggacacgggtaggggccataggccaataacataaggtcgtcaaaatccgtcccaagaccatctatttattgggccctaacgaacctaaccgtaacagattccacgcagtataaaccctaccctccaaattgggcctaaacaacttaaacttctgttcccccaaaccaactcttattgatttaacctacaccgagcttgggaacaatgggatcgttttcccaaaaaagaaaccacctttacatttggcaagttccatccatcaaagcgcaatcccaacaggcccttaattgtatctaggacatccaatccccgtcttgcctattgttttcaaaacaccagattgtcaaaaaccagacctcttatattagggctggttaccccaaaacctttatcattcgggaccccctaaaaaaagccccctcttcactaaattacataaccttaccctggaattccttaacccccttcacaattccattgggcaaaatgcccaaacgccaattttattccaggtggacccactttatcaacgaaaagagaattctacgcgttctatacctaatcctcccctaagaaagtctcctgtattcataacatcagcagccaaaggaagtaaccatattcgaataactgcg

SEQ ID NO: 561784 - DNA, 389 bp, Homo sapiens
ttgtgagaccccagagactcgagtctggtcctgaccaaacaatgtactaaaaccagctatgagtccacagagcagagggtgtacagttaggctgctcttcaataaccctgggaacctgtttgcatatcagactccctgtccctcctggagaatgatacagttgctctgaaaggaggtcagagcacctctctcacacatcctgtctgtgccagctgggaaaaggaaggctggctaaatagcagaatggatctaacagcacagcagcttcccttccacacccccagcctctggcatcagtacgctccttacaggaagggccccaaacagagccgaaggtgtggtctgaatccacagcgccactgtggccctcctgcctacattccatttct

SEQ ID NO: 561785 - DNA, 165 bp, Homo sapiens
tctgacaagcctcagtgagatgaacccggtacctcagttggaaatgcagaaatcacccgtcttctgtgtcgctcatgctgggagctgtagactggagctgttcctattcggccatcttggaaccgcccgattgtattcttttggtggtgcagtttgtcgggtacc

SEQ ID NO: 561786 - DNA, 155 bp, Homo sapiens
  misc_feature (100)..(100): n is a, c, g, or t
tcaagcttctaacgatgtacggggacatggaggtctgacgaacattatgcaatcccagaaacagcatagtaactcgttccaatccaatgcctccaccagncatgattctccagtatatttgtaaaaaataaaaaaaaactaaacccaaaaaaaaa

SEQ ID NO: 561787 - DNA, 350 bp, Homo sapiens
  misc_feature (11)..(11): n is a, c, g, or t
  misc_feature (43)..(43): n is a, c, g, or t
  misc_feature (68)..(68): n is a, c, g, or t
gatcgagatanaataatacacacacccaatacaggatgatagntcgtgtgacagacagagatatcatntgtcagattgcttatcgccgtatagagggggatatgatagtctgcgcagcggtatcacacgaacttgcacaatatagtgtgatgtgttgcgctgacaaattatgctgcagcatatttgtactggtctgctgctaggcccgcaggcttctcaataggtttggcatggacaagatctatgacggccaggtggaggtgactggtgcatgaattcattgtggaaagcattgatgttcagccaggtgccttcacctgctatttggatgcaggccttgccaaaaacta

SEQ ID NO: 561788 - DNA, 715 bp, Homo sapiens
gtgccgctctgaaaagctgagtatctatggtgatctcgtagtgcatgagtgaacgaggagctaatcagatatccttgcttcttctctagagctggtcacatctacaactgaatatcatgaacaatcttggcctctagctacctaaaagtgaatcttgcctcatttctgaatgtgtacagcactttcttcgttcaacatgacaaggtgctaataggcaccttctaaagatcccatgtcctcattagtagctcttatactagtggtttcattgggatattgggcctgtgtcaacatcacctataatgatgcaaataaaggttactcaaattctgtgcatgactgtatctgctatacctttatttggttattggttttgtagtaatttagtgacggtggatgttcgggagttgtattattattttactaatatcttgtagtctattttggttttttgctttggttattgttttttttcccttttcttagctatgagctgatcattgctccttctcacctcctgccatgatcctgtcagtttaccttagtttaacaagctgaataattagtaaaatgaatgcttctggtcgggattggcccccaatctgtatttgaaaatttccagggaattgatccttttaatgacactacatttttccgggaactggaactcccttacaccttttctttggcattcccacaaaccatacaaaaacaa

SEQ ID NO: 561789 - DNA, 127 bp, Homo sapiens
catagaggatcccctaggtatgcataagatgactccaccaattaacgatctgctgcctagacccacccccatcttaaagaacagacataaaaagtacaagagaatgtattgatcttgttggtcgtat

SEQ ID NO: 561790 - DNA, 349 bp, Homo sapiens
atcgaagctgtgtgttctgcccaaagatgatccaggcctcagtgcttctctggggctggtgtatagtctgttatcacactgctataaataactacttgaggcctgtcatggtggctcacacctgtaaacccagcactttgagaggctgaggcgggtggatcgtttgacgtcaggagttccagaccagcctggccaacatgggaaaaccccgtctctactaaaaatacaaaaattagccaggcgtggtgatgtgcgcctgtaatcacagctacttaggaggctgaggctgcagtgagctgagatcacacactgcataccagcctgagtgacagagtgagactctgtctcc

SEQ ID NO: 561791 - DNA, 159 bp, Homo sapiens
  misc_feature (101)..(101): n is a, c, g, or t
tagtcaggctcggtccctgcttcgtcgggtgaatagccgctgtgggaattttcatctcttggtcagccgctgtagatctcttcaagggagactcgaaggtncgtgggtgactgggggacttccttgcttctttcgggcgggctcttgggcagagcggga

SEQ ID NO: 561792 - DNA, 111 bp, Homo sapiens
ttcgagttcggtaccctaacttgtttttggaactagaatttaggggcagttggatgaaatttcaaatttagaaggggaataagaattttgtagtgctatataaagaaatga

SEQ ID NO: 561793 - DNA, 113 bp, Homo sapiens
tgcgccggctacgtgcagattttcttcagcctcttccacctctgagacagcaaggccaatccctcatcttcccttggaatcatatctgacacgcctccaaatctgcctaagca

SEQ ID NO: 561794 - DNA, 297 bp, Homo sapiens
tcacacgtcgctgggtttctacaagtctacagacagatactcttaatctagcagtgcagactattgcctcctatgattagtaaaccctataacgccccactcaagacctctataaaagtacagagcagccagaatgacatctctaaagggtagtagtgaatatcactgctgcactgcagactagtaggtggcttgtgaggacagactctgtggctcacctgcacacacggcccatccttcctctgcatcctgtgtgtcccaccatcctgcccgtctcatggctcctgccgcccaaca

SEQ ID NO: 561795 - DNA, 163 bp, Homo sapiens
acgatcgagctcgttacctggaaacgctttgggagaccacacaggaggatcattgagcccagaggtttgagaccagcctgggaacatagtgagacccccgtctctacaaaaaataaattaaaaaaaaaattagcctagctcagtgtggtggcatcgataaaca

SEQ ID NO: 561796 - DNA, 230 bp, Homo sapiens
tactctcaaccattcaacagctcatgggtacaggacattcatctcaatggcccagcaggtggcgcccgacccccatccagttcgcacacatgtcagcacagtcaatcagcagtgtggccacacacagcacatggcacccccagccaggcaacaagcacaagccaagcagacattctggcccaagcaagttttcattcatgcacatctggcaggcaagcaggcaggcactc

SEQ ID NO: 561797 - DNA, 800 bp, Homo sapiens
gattacagaccttggaagcaagaggattgcattcagcctagttcctggttgctggccgaagggactcgatgggacagttgaaggcatacttttgcaagagaagttggcttatagagaactcgtagagaacaacattggactatggatagacagttaactgactcagttcattgaggcaccgagatccgggcatgttcccttatgacgaacctgtaacatgcatggtgggcaagccatggacgttgggcttagaggctattttgcgatcacattgtaagaagaaaccggggtgggtggtggtctccaggtcaatcaacttctgtactgggctctgagccgacatagtcggttttcagactcagcaatgtaaggagggtatttttagtatcgcctccagttaacaaatacagcactggcatggttcgacgcgttctcctgcaggtgaccattgacggcaggaatgacatcgtcgatgctgaggtctggaagctcctgcccagatgtggcagtctctagaattagatttctgggaaggatgcagcctcaggtgccttgcattttctgcttgtactggaggagagaggaatctggtacctggagcgaatcaggagagagcaggatattacaaacaaagaatttcttaattctcatctcctgccaaagaagaaagcaccaagaaacatatacttatttacgcttgagactccatacaattgacagatctcggagtctatgaatacttacctgccagacgtcttcaaggatcttcatgtataaccacatcattgtggttcctcgac

SEQ ID NO: 561798 - DNA, 888 bp, Homo sapiens
gagtgtgctggtaccgaggtttgttgtcggcgtgccagtctctcatgtgccacccgtgtttgtttgctccaccccgggctttcttggggtccccccccggccatggctttttgaacctctgcctgggattcccacttgggtgcggtcgacccgcgctatggcatctcctcgggctgtcggtgtcctcttcgtgcgcccggcttgtgctcgtggtcccgagacagtcagtgcgggcgtcatcccccctgaaacctcctctacgcgcttcgtcttatggcaggtcgtggaacgctccttgggtaaggttccctgctgtggtcgaccgccgctcctccccgcgttgttgagtcccgccgaagttcccgaatgccggtccttctaaatctgcagaggcagtcaacaagcgtccgagcttcccctcatctaggtcaagccagactgctcccgatttacgcgagaggttcacccctcttaacccccacttatacttggtatttagagcggccaccagagcgggggtaaatatcgctcgctttaaagaacatgcggcgataacaaataaccgtgtcatttcctactgtctttcagaaaggcacttatataaggattcaccagtttgtcaggtgcctggaaagcgtcactaggtaacttctgtgatctatgatacaaaagattcccccagcaagtagttgtgaagccacacgcccggttgtgatggagaggtatataaaaacacgtccggcggataccataaacaagagtcgggaagcatctgtggtttcttgggtgcagaagaagaaatcaggaattataccgcgccccacagaactcccgcttggcaagtcccccccccccccccccccaaccagtcccctctgcaacaaaaca

SEQ ID NO: 561799 - DNA, 138 bp, Homo sapiens
atggttaaaaaggccaaaaaaaaaagggttctttttttttccctttttgtctaagaaggggccgtttatttttttttggcccgtttgatgtatgtgtgaaacaaagttgtcccccaataaacagggatttttttttta

SEQ ID NO: 561800 - DNA, 327 bp, Homo sapiens
atccccctcagaccgcgcccgactgtttgtcacatttcagcagcatagaaacagcctttacttccccgagagggtcccatcccctgaatggtccaacacgaaaatgtcctatcctgcttgttccatagtgcctactgacatcgctagattccaatgcccagccaacttctttttgtatttatagtacagacggggtctcaccgtgttagccaggatggtctcaacctccctacctcatgatccacccacctcggcctcccagagtgctttgaccacggtgccttagccaccgcgcccgggcgcggtctgtgacggggtaccgaggct

SEQ ID NO: 561801 - DNA, 120 bp, Homo sapiens
cgaggtatgctgctgtgacactgtggcacagctgaaaccgaggggtactgcgtatcctgcgcttctgcggagttcttccaactctgggtacctgatgctcgaaattctgtcaatccattg

SEQ ID NO: 561802 - DNA, 288 bp, Homo sapiens
  misc_feature (80)..(80): n is a, c, g, or t
  misc_feature (95)..(95): n is a, c, g, or t
tcagctgtaagccgacgcatccccggatcgcgcactcgtactagccacagaatgggtgaagattattgtaatggtgcttnttttaaacttaaaantaggtaaatatactaaacaaatgctaaaactcagttttaggatgaaaccattgttgatatccacatcagtccctgtttagaaaaattaaatgatttagttattacagtacggtggcaatgaaatacattagctcaaatggtaggcttcgaatatgttttgtatttcagcgagtctcttttcaataattaaggg

SEQ ID NO: 561803 - DNA, 873 bp, Homo sapiens
cgcggtggagcctacggtccctcagtgcctgctgctgaggaggccaccgaagctcggggactgcgaggagcctggcgtggccctggaaagactgccccgatcctggacgctggtgcagcgcatccaccagctgcagtgctgagctgcgctgcagtggcttcctgccgactggaggatgtgacgtgggggctgctggagtgggctcacgggttctggtccccctgccctgctcctgtggctgtgggctgtgttctcggcgggcgtgcctggaggagtgagcttgggtccttgtgctggctgcatgagtcagatggggcggggatttcggggcaccggtgtcctcaccttcacgatgaaatggccccacatgcactgtccccactacccgacgactcactcttcgtggcttctctctcctccccaagagcaggggtgggcctgtctcgcgttcccctgcgggagtcatggaatgcgtccttcctacctaccagtcctcccctctggtgtctggggacacttcctggggggcctttcaggtggttggcgccgtgtgcagggcctgagagcctgggggccgcggcctcaggggtccccacatgcctgcagcaggccacgtgccagtaacctgctgcagccggcctgactaccgacttctgcgcggctaccggagcacagttgcacgggtgtgacccaggggcttctgtcgccgcctcgccgggagggtgctggcgtgtggcaatcagagctggtgcgggttttcgcaggcagtccgctgctcgcccgtgcattgtgctccacccttgcaggagctggcgcagatccgcttgtgcactgtgtccctgcttctttcatgtctaccctcagcttgcgtgt

SEQ ID NO: 561804 - DNA, 311 bp, Homo sapiens
acaccttatgaaaaaaacccatcttccgctactctagaggtaggatggtgccatcccaatgatctccctcctgaagctgacccagaggatgagaccctgcgcaagctgtacgagcagcaccacgatggtgcaggacatgctggtgcccattaagtgcctgcagcaggccctgcacaccttccaaaacgatagtccacgtctaccccatctggctgtgtccgttcatcctgcccagacagaccaggacctagtgcaccccaagaggaaatgaggcagagctactcacatcgacataggagcatatggggcgc

SEQ ID NO: 561805 - DNA, 285 bp, Homo sapiens
  misc_feature (249)..(249): n is a, c, g, or t
agcactcaattattatatattacttattaccacttatttattactattaaatgggatctgtcaaaagaaacatgaggctgggcacagtgtctcatgcctgtagtcccagcactttcggaggcagaggcaggcggatcgcttgaggtcaggagtttgagaccagcctggccaacatggtgaaacccatctctactaaaaatacaaaaattagccaggcatggtgatgcacgcctgtggccagctacttgngaggctgaggcacgagaatcgcttaaacctgggaga

SEQ ID NO: 561806 - DNA, 200 bp, Homo sapiens
tcattgatagacaaggagcagagccacgggtgagctagaagtcgtagtacgtaagcctccatattgctggttgccaacattgatggtgttatggctgtggcgaagacaccttcccgggatctatcactcatcttgtgtgagctcggataatctcgctaatagtcattgtgtcgcagtactcttacatctgtgcttcgacg

SEQ ID NO: 561807 - DNA, 603 bp, Homo sapiens
caatttctgatggagacgagtgtgtggtcgtgatggagtgacacatgatgtagatcgggagaagccagcagagagtggagccagggctccatgaggagtgaggaaactggaggtggcaaggtggaccctcaggcatgtgaagccctgggcaggctattggtcttgagaaagggacctggtgacgcagagcagtgtgcagggatgaaggcaggcacgcaggctgcaggcacgcagcatgcagacacgctgagggagagcgcctctgaaactcccaggtggaggtgttgcggagtgtggcagtgggtctcaagctcccggaaggagccaatggctgcagttataaatctgtgagtgatttcataaccaaaactcgtgccttgtaactggagttgtgggtgcagacgaggtcacaggaggagagatgctgagtgagaagagaggactctggactgagactgaggaacaggcacatctgatggcaggtagaggacaatgagttgcaacagggacagaacagggaggtcggggatttcaggagggggaagatcatgaagcctcttgggaacccaggaagattgagtgtcaggggccaggcatgggatg

SEQ ID NO: 561808 - DNA, 295 bp, Homo sapiens
aaaatgcagccggagcctcagtccccagcagagcctgagtctcaccccctcacaggacagagctgtatctgcatagagctggtctcactgtggcgcaggccccggcgggagtgcctgtgctgccaggaagagggggtgctgatttgagggccaccactgcagatctgttaggtctgcttcctgcccaggaaggcgcctggcattgacaggagagaactacacgtctggtaccatttcatgaaagcctacttctagcacttatctttcctggtggtctttctttttcccatgattc

SEQ ID NO: 561809 - DNA, 238 bp, Homo sapiens
gaaatccccccccccccccccttttttgggcccgtttatttttctcccggccaaccccgtgtgggcccaaaatgtaaaagggggggggggaaaccttttttaaatgggttgttttcctttttttaggggccgccttgggtttccgtttttgtccaattttccctgggtttttccggggattgatttatgcctttaagggggggaggcccttttttttttataaagggcctttttccca

SEQ ID NO: 561810 - DNA, 316 bp, Homo sapiens
actctattagatccccgcatttgacgcgtctcctaccgaagactgcctttctcgattttatctttcgcacagcagttccggatggcgtgtgtgtgtcacttttagggagagtcatatattgattattgtatgtattccatattcatgtaaacaaaatttagtttttgtggcttaatagggctctaaaaggggccggggaaccgcgtattataattggttccagaggcctataatgaagctttatacgtgtagctatatctatatataattctgtacatagcctatatttacagtgaaaatgtaagctgtttatttt

SEQ ID NO: 561811 - DNA, 1605 bp, Homo sapiens
  misc_feature (1097)..(1097): n is a, c, g, or t
gggaaatatatgggcgatcaaagtagctcaatgaagctcatgccgcagcatcatcgacgcgacgctacgtgtcctcagcaggctttagtcccgctagctggcaccagagtgtccagcttggctgtggtcttcggaaggtacaagacgaggccagatgcgaggcgtcgatgttcacttgcgagcgtgtgcggcgacgtggaccctcgaggtcgcaagctaccgacagttggctatatctgtcctcgagaagagcgatgccagaatcgtgaacggattagtaccgatgataagtctcctatggacgaggggatctagcttgatgtatagacaggggagccgtgacaggtgatgaccggtttgtgagtcaagccctggcgtagtcaaccgggtgtgtcgtcgggcatctcgtctactcttacgagcgacgagccgactttaaaaggcgtgctagcattgacgattcaaggatttgcgtagggtatctggggcacccatgggccgtagaggacgcaatgctacgattcctcgagggccagggtcttccgttcgccaggataagaccatcccttggaaaaaggccttcgatgggaagcccattccaaatcgcgtgcctcgaggaatttcccgttatcgttacacacccattggggtgcctctgggtcacgcgacattcccccgttgttggaattctctgttcttggagggacctgttgcgctgcaatgccctagcgggtgcgcactgccgcctgggggggcacccaacggttgagtttgtcgttgggtcgcatgggattgggcgcgaggaagcaccgacagcaacaatgtgcccggcccgtccccaatgtgggaccccgaaacggtgtcctcgatatccccttctcttccagtgcaaattgctaagacgatggtgcccttttttgcggaacccgaatttcgattttatgccctctgaaagcgcttgacagtgcgacactacgtacgccaatgtacgccctccagaggtgtgcctattggaaaactggaaaaggccccctatgtaagccccatatagtggccgccaattacccaaaaggtgggtggtcggacgctccctggcnctttgttgactcgcattactggtgtgacgttgcaaccacggcaccctggtggcgctgacggacatgcaagagctggatttggcactttctcatcagcagttacaataatggactacttcccaaccctttcactgccacgcttcctttggaacggtatatgagtcttagcagcgagacgtcgatacgggaacggcaaaggatcgatggctaccacccaagcattagtacgcctgagttgggaccctttggcacgtgggacacgtactactcactgtttcacggcaaacaactttagttttgtatcacccgccacacttggggaacccacttgtagtagccgagtatccccgtagggtggggcgaccccgcacatgtgctcatatgggagttggccgctttgcagcataggttgctagctgagccacactcgcgcccgagagcgatccctgatgtacgcgcgccattggaaacggacccacagtagtggcgtcttgccactccccgacag

SEQ ID NO: 561812 - DNA, 223 bp, Homo sapiens
cggggcattcagagctactccagcctgggcataagagctactccagcctgggcgataagagctactccagtcctgtggcaataagagctccagccgtggcttacacgttttgaatcaactctttgagccatgcataattttgtaacatcacgtactgttcacttggaaaaatggttcattgaattcttccaattgaaatgcatttcattatactaatcacact

SEQ ID NO: 561813 - DNA, 747 bp, Homo sapiens
tccccctgggtccacctctgcctctacccgccggttggggtaaacaaagccaaaggaaaaaaaggaaaaaaaaaaaaaaaacaaaaccagccgtctctcagccgggtgaggtgccccagcgtcagaatgttatcagcagaggggtgaagaagatcttctggctggaccctcttcctcttctggctggagggcagttggcctcctggatctctgggccatgcccaccttcccctggtctggtcccccctgtgcacaatgtctcttacatctgggacgcccatctggtctccctcagctgtcacagtcctctctggggtggcccacgggtctctggaacaataaggccaacaagatgatatcggatgtgtcggtgtggggagaagggaggcccagatctctgtcttcggccatgatttggtagatctggcccagagactctcaggtgggtgctgggccctactcaggattacatctgaaatgtatgggcctcgtaagtacgggtgagggtttgggacacgtcgggaatccctaagggctgaaagagtgtttccaggtagggtctgaccctccgaatgcctttatgggggggaacacaaaccaaacagcagatgttgtgcctggatctgtgtccgtacatggggactggtctgtttaccccggggaatgcccaagaaggcctgtttgccccggggtctgtcactagcaaggcgggcggaggaccggagcccgtattagcgtcccgatcca

SEQ ID NO: 561814 - DNA, 905 bp, Homo sapiens
tggggggtgccctttttaaaaaaaaaaaaattcccccctaaaaaaaaaaaaaattcccccccccaaaaggggaagggggggaacgcagaacccccacactactcccaggaaaacaccgactcgtgctagcgccccgtcgccttcccacccccccgcccccccgcgcaagcaaagaaataaagagaaccctcctgcccgctacgacaaagaagacagggggcgtggggagtcgagcccccccacgcgcgctgcagaggagcgcaaattattacccacccacgaggtagtcctcctcgcaccaacacacaagcagacgcccacacgagcgggcgggcagtccctcccgcgagctcctctagctgcgtggggtgcccgaccgggtagctcctctcagtctgttcctacccagagagcggcgcgcccccccacacaacaaacacagacgtgtctgctcaagagcggttcgctgtgcctacaccacccctcctatagagagatcaatcacccgactgttgtccttatcggcgcgcccccctcgtgagaaagatcctatcctccgccgccagacgcttctgtgttgcagccatagttttagggcggggcaacgctctcccacacacacggtccctctcctctcttttcttcttccctctctcctctcttcttatgccgcccaactatcgtgtcggccccccccccgccacgcctgctgccgcgccgcctgctgcagccacccgcgccgactgagtaggttaagtatcgtcgcacccaccgcaggagcaactacacacccacggctgcggccacccagagcccacgcgctgtcccgccccccccctcccgcccggccaccgccaacacacaggcgccttcctatcaaggaagaacacccaccgccgcagcac

SEQ ID NO: 561815 - DNA, 1560 bp, Homo sapiens
  misc_feature (71)..(71): n is a, c, g, or t
gtccttgtttcctgcagggctggccctggctcgggcagggtggggcatcaccacctcactggccttgctgnaggcacagggctctgcggacctgcagccatctgtgaggcccgcggggatgggaggggaggagggtggcctgttggtttccctcagagggggcaggtggcctggagagagaggggctcaggaactgggagcctcgtgggtggggcagatgctccgcggcctggagtggctctgccggggcattggtgggacccctgctcaggccttctctctggctgccagttgtgtctaaaagactcttggaatctgagaacccggagtcgcagcgccctcgggcctgggccacacgcaggccctggtgggaccacccagcctggtattgtccacggacagcgttgttcacccagagccttacttgggagcctcactgaacgcctgctctggttgaaggtggggtgggggcggggcttggggcctccctggctcagcccagtgcggcctggcgctcctcccgcaggctctgcccccgggctccggtggtgcggggccctctcaggttgaactcgcctcttttgcactggaaggccctccctttggcctgagtacttttcccgttcacgcctcagtcccgtggacccagcctttgtcagtggcaggtgcctgaacagagggtggatgggggggataccggagggggtcttgtcttcccagccgcagtctaggaatgatgcgggggggtggacgccttctccatagtctttccccacctggagcaggggcttcctcagtggtgaggggagctgcctacaggttggaccgggaggcagtggcttggagaggcagctttccagccttggtggggaagaaagtgtccattctttgccttcctggagctcccagccagagctgagcttaggcacccgagtggagcctgcagctgagtctgtgcccgagacaggctgtcagagattccagaagcctctcctccccgccgccctccacccctgcctttcagcgttgtggatccctagaggtggccccctgcccgatccaccgtcctgaggcagagtgttgagcctcatacctgtaccaggtccccggccagctgggcccctcccaggcactgccaggaagccccagctgcccctggcgggtgtggtggaaatggcaggagggtgcaggtactcttggggccccagcggtgggagtgcaaaagacccaacgccaacacctggtgccttttgcagccagcgcccacccatccgtgcccggacccttgggaatgcccgcggctccagaggaaaaagcccagggacggggcctccgttgcggggggtcggctgcttcttgggaactttgtcgttcccggcgctggctggctggctggctgtaaagcacttgaagccccccgggcgacaacccctgaaaagcagaactggcctccctggccacagcagacttacccagcggtctacgtgtcccgggcacttcccggaggcttcccgtcccttcctcatcgggcaggagatggaaagaggtggagggaagaat

SEQ ID NO: 561816 - DNA, 1292 bp, Homo sapiens
  misc_feature (71)..(71): n is a, c, g, or t
gtccttgtttcctgcagggctggccctggctcgggcagggtggggcatcaccacctcactggccttgctgnaggcacagggctctgcggacctgcagccatctgtgaggcccgcggggatgggaggggaggagggtggcctgttggtttccctcagagggggcaggtggcctggagagagaggggctcaggaactgggagcctcgtgggtggggcagatgctccgcggcctggagtggctctgccggggcattggtgggacccctgctcaggccttctctctggctgccagttgtgtctaaaagactcttggaatctgagaacccggagtcgcagcgccctcgggcctgggccacacgcaggccctggtgggaccacccagcctttgtcagtggcaggtgcctgaacagagggtggatgggggggataccggagggggtcttgtcttcccagccgcagtctaggaatgatgcgggggggtggacgccttctccatagtctttccccacctggagcaggggcttcctcagtggtgaggggagctgcctacaggttggaccgggaggcagtggcttggagaggcagctttccagccttggtggggaagaaagtgtccattctttgccttcctggagctcccagccagagctgagcttaggcacccgagtggagcctgcagctgagtctgtgcccgagacaggctgtcagagattccagaagcctctcctccccgccgccctccacccctgcctttcagcgttgtggatccctagaggtggccccctgcccgatccaccgtcctgaggcagagtgttgagcctcatacctgtaccaggtccccggccagctgggcccctcccaggcactgccaggaagccccagctgcccctggcgggtgtggtggaaatggcaggagggtgcaggtactcttggggccccagcggtgggagtgcaaaagacccaacgccaacacctggtgccttttgcagccagcgcccacccatccgtgcccggacccttgggaatgcccgcggctccagaggaaaaagcccagggacggggcctccgttgcggggggtcggctgcttcttgggaactttgtcgttcccggcgctggctggctggctggctgtaaagcacttgaagccccccgggcgacaacccctgaaaagcagaactggcctccctggccacagcagacttacccagcggtctacgtgtcccgggcacttcccggaggcttcccgtcccttcctcatcgggcaggagatggaaagaggtggagggaagaat

SEQ ID NO: 561817 - DNA, 334 bp, Homo sapiens
gtagtaacaagacgaaaaacctcaggacaaagtagaaagtatatctttgtcaaagaacttggatttcatgagtaatgtctctacatattttgaagcagcatttagtgtatttacgagcagtatcaaattaattcatttctttccctgttaataaaaaaggtacattcacagaatcagtgtacttagaataaaaaataaacagaggaaataagaactaactcgagttaataacaacatctttaaggacaagtttggtcatttaaaaactaagtcttgttttgttttgcttgtttttaattactcctttcatacttaatatttcaaatatagctgc

SEQ ID NO: 561818 - DNA, 1241 bp, Homo sapiens
  misc_feature (1)..(1): n is a, c, g, or t
  misc_feature (5)..(5): n is a, c, g, or t
  misc_feature (19)..(19): n is a, c, g, or t
  misc_feature (24)..(24): n is a, c, g, or t
nggangtcagtagcacccntcggncttgagagcacacgcaggccctggatgggaccacccagcctggtattgtccacggacagcgttgttcacccagagccttacttgggagcctcactgaacgcctgctctggttgaaggtggggtgggggcggggcttggggcctccctggctcagcccagtgcggcctggcgctcctcccgcaggctctgcccccgggctccggtggtgcggggccctctcaggttgaactcgcctcttttgcactggaaggccctccctttggcctgagtacttttcccgttcacgcctcagtcccgtggacccagcctttgtcagtggcaggtgcctgaacagagggtggatgggggggataccggagggggtcttgtcttcccagccgcagtctaggaatgatgcgggggggtggacgccttctccatagtctttccccacctggagcaggggcttcctcagtggtgaggggagctgcctacaggttggaccgggaggcagtggcttggagaggcagctttccagccttggtggggaagaaagtgtccattctttgccttcctggagctcccagccagagctgagcttaggcacccgagtggagcctgcagctgagtctgtgcccgagacaggctgtcagagattccagaagcctctcctccccgccgccctccacccctgcctttcagcgttgtggatccctagaggtggccccctgcccgatccaccgtcctgaggcagagtgttgagcctcatacctgtaccaggtccccggccagctgggcccctcccaggcactgccaggaagccccagctgcccctggcgggtgtggtggaaatggcaggagggtgcaggtactcttggggccccagcggtgggagtgcaaaagacccaacgccaacacctggtgccttttgcagccagcgcccacccatccgtgcccggacccttgggaatgcccgcggctccagaggaaaaagcccagggacggggcctccgttgcggggggtcggctgcttcttgggaactttgtcgttcccggcgctggctggctggctggctgtaaagcacttgaagccccccgggcgacaacccctgaaaagcagaactggcctccctggccacagcagacttacccagcggtctacgtgtcccgggcacttcccggaggcttcccgtcccttcctcatcgggcaggagatggaaagaggtggagggaagaat

SEQ ID NO: 561819 - DNA, 293 bp, Homo sapiens
  misc_feature (39)..(39): n is a, c, g, or t
  misc_feature (48)..(49): n is a, c, g, or t
ggccggtaccgctctgttacttcaagcctatgcggctancgttattgnncatctggcggaagtcgtctaccaagtcatcaggaagcgactcacttagtgcgtcatatcccggtgcttgccaccagtcgctgctggttccggatcctttacgcatgccctcaaccaaggcctgaagatccttgggcatcacttcatcgggatcgcttgccggcaacggcatacgaatcttccacaaattcccgccctctatcagggcaaagcattgccccttgggtagggattccatttgggtg

SEQ ID NO: 561820 - DNA, 1231 bp, Homo sapiens
  misc_feature (71)..(71): n is a, c, g, or t
  misc_feature (1096)..(1096): n is a, c, g, or t
gtccttgtttcctgcagggctggccctggctcgggcagggtggggcatcaccacctcactggccttgctgnaggcacagggctctgcggacctgcagccatctgtgaggcccgcggggatgggaggggaggagggtggcctgttggtttccctcagagggggcaggtggcctggagagagaggggctcaggaactgggagcctcgtgggtggggcagatgctccgcggcctggagtggctctgccggggcattggtgggacccctgctcaggccttctctctggctgccagttgtgtctaaaagactcttggaatctgagaacccggagtcgcagcgccctcgggcctgggccacacgcaggccctggtgggaccacccagcctggtattgtccacggacagcgttgttcacccagagccttacttgggagcctcactgaacgcctgctctggttgaaggtggggtgggggcggggcttggggcctccctggctcagcccagtgcggcctggcgctcctcccgcaggctctgcccccgggctccggtggtgcggggccctctcaggttgaactcgcctcttttgcactggaaggccctccctttggcctgagtacttttcccgttcacgcctcagtcccgtggacccagcctttgtcagtggcaggtgcctgaacagagggtggatgggggggataccggagggggtcttgtcttcccagccgcagtctaggaatgatgcgggggggtggacgccttctccatagtctttccccacctggagcaggggcttcctcagtggtgaggggagctgcctacaggttggaccgggaggcagtggcttggagaggcagctttccagccttggtggggaagaaagtgtccattctttgccttcctggagctcccagccagagctgagcttaggcacccgagtggagcctgcagctgagtctgtgcccgagacaggctgtcagagattccagaagcctctccccctcctcctctgtgctgtcgacagcacagaggaggagaacgacaagctgcgccaggagttgcccagcacgccaacgccttccaccagtggatccaagagancaggacatacctcctcgagtgggtcctgtatggtggaagagtcggggaccctcgaatcccagcttgaagctaccaaacgcaagcaccaggaaatccgagccatgagaagtcagctcaagaaagatcgaggacctg

SEQ ID NO: 561821 - DNA, 3544 bp, Homo sapiens
cggacgcggggtaagaaactaaatccagagcttttaacaggtacttagaaataagtattgggtaatcactaagaggacattgactgcaccaaaccaaagctatagaaagaaatgattgactttttaaaatatattcacattaactgtcctaggatacttctcttgaggctttggaaaacttcttccttgaaatttgcatatccactccagttctgtcaccaaagattttaatcttcagatcgcaatttcctctctcccagaaaaaagtactacaacaggctcaagggatatgctttggtggtcaagggattacactatggttttccttctgttcacaatggtatttacaggagaccttgtcatcagaggacgtactgaactatctttatgactttggatttgatcagaggtttaaaaaatagaaaaaaataaacaacactacttgacactgtaaatgatctttaatagagtcatgacctggagactgatggagagaaagaaacttccatggaagagagtgagctaaatcatttagaaccaaacaaaggtcactggtgaaacatagggcagcatgtacacagtgcagatcagggttctgtatggccagagccaacagcagtgaccggtgggagagtcagacaactggccaatgaattcaagtgttgaaaaagccacagtctggattttgttgtgatttctggagtggttgaaacgcccatgcccatggcaaggaaaatgcttggaggctgatctgttgtgatagtgcctttcttgtcgtagtgagtactagattaataatttattcagttacgcttttctgtaccattgcctccagtcttctgaggaggtttgaagggacagtatccacttaggatgaagggacaggatattgctctggaatgctgtgatttgatgatatttgcactagattctaaactctcctttaaactggagcaactgactgagagaaaaaccaaggacagctcaaagttaaaagaaaccaaaagcagtattttctgacagataccatttctttttctccttctttttttcctggaagaaaacttcacactagttggctaccgagctcaactcttaccagttctttctctttattttttgtttccatatggaaccatctgtgtgaattagtcatcagttaggtatagttaacgtaaagagcccctgccattgaaactttgcacaccttctctgctttattgaaggcaagggccagtgggcagtgatagcaggggagggaccctccagaaccacccagccctccaggaggccaataagcatggatatcatgtcaggagctgagctgacatatatttactcagaggacattggggtctgtagctaatcctaaagaatgctccgcaacagaaggaaaccaatgcattgtagaaaacaaagggagatggtgcccgaagtctgcctgtttctcttctcttttctttcccatctcaccaccatgtcctctctaacagaattatatttcatctcatatattacatgttactagaaaagtcatttggttccttggtttctctctttatcagtgggctggaaattcctccaaattaaatataaataccagtagcagctcccctgtgtccagccagtttctcaaatgctgtccacctggtcttactgtccacctaacataacttggaggctttggctggctcaaccacctgttcactttattttgttttcatttccatttgaacttgaagtgaggctatggaaaggtggaaatcatgggcaaggtttggaggctgcaattctagggcatagcttgtcaggagtttatattatctaaaatatatctttctataccccttttcattttaatctgttgccctgattataatttctttatatttgtggttatttttataagaatagagtccatttgctatgtctatttgagtactttttttctattgtccccacatggatgcagtaccaacctgttaatgaaatatctttttattatattattaatatgtaattctactgtagaccaaaaatataaaaacaaatttgttcattttaaagatataaagaactagggagtaaaagattaaaagttgaaggaaaagacagaagagcagtggttaactatgttgagttagaaatctaagagtagccttacctgttttttaaccagtgcttgccaatcataccatagttggaattatgtaatcttggctccttcatacttatgttctataattcttgtttgtctatttgttttctttgatgtaattgaggttgcacatcatgctattcttggcaatgcctgattctattgtattgtacttttgttagtcatttcctttagaaagatggggggaaacgtttatttcttcttttaatttaaaatttgtttaatgcactggaaataaaattggacatatttcactgtttaaaaaatcagaaacaaaacaaagcaaaaccatgagggaaaaaaacagcaaataagcaacaggggaaaacagctatgaaaaaaatatatttgtactgaatacacatacaaactacatcccacatgaaagattaatatcatcaagtaagaaaaatacatagtttaaactacaatgctgaaaatataaaaggaacctggtagttcaatggggatggagaaaacagagcattcctctgagagcagagatcttgtcattattgcaattaatgcccaaacaggttaaatgtggaagaaagtatggaggaaataaccccagccttcctcataccactggatttccacatcaccttttaacttatgcttgagctcccttttgagaaaaaatatttaaaaacaaattggctatgtaacaaatttgtgtgtgtgtgtgtatatatatatgtatatgcttatatatatatatatgtatatgcttgagaaagtggtttttcaagatgtatgtgtacagtacacacatggacacgcttcagtcctctgacttcccatgtgctacctcatgtgtttctcttctcatgaggatttgcaatggatagttgtacaacctggggactgtcagtgactcattggtatcagcatatgctaaagaagctcttgaatccaatcttgaaacctgatctcccttcgtcaacattccccaataccaaactggcccgtttacccatacaaatgcacagtaaagggaagaacagcggtatttttcctagccaactgactctatcatttgtttaatgtttgctggtttttttctggttttgttttgttttagagcaggggtgggagtggctgtaacttcacaatcctaatacagtaaatgttttgcatcttccatgttttatgcaaaaacagacatttaaatcaataaataattgtgccctagactgaaggttaatgtttaggagaggaaaaaaattgttggaattttttctacatttttttgtgaagaatcttttttggaaaggaaggatacatatttttgttgtgtaatattttctatttttgaatgcattttattggtacaagactgtttttttggtgaagacattattt

SEQ ID NO: 561822 - DNA, 131 bp, Homo sapiens
ttataagacgacagaagggctagatctctagatgtttgaggagcacagaaggctatctaggcgaggggacagctgggccaccagataagcatgcgtgtgatgaacgttgagtgtcctgggtttagctgtcc

SEQ ID NO: 561823 - DNA, 421 bp, Homo sapiens
gtttgccgcggccccgtgcggtctgtcacaccctgtgtctaccattatgccctcaggtttggcttaagtttctgtggtaccatgcacgtttgtcagtgaccgtttgttgccggtgtcgagtgtgagaacactgtgacggatgtcaggagcttttagttttaaaaactgtctagatagtgataccattcatagagatcaggactaatacgttcacagtacatgataaatttaggttgattacatttgatatattttcaagacatctatgagtatatatctaagagataaaccacaagatgtacctggaattcgggaagaaagtaaacaagtaaacatttagaattgattagctcacagatagttgaagctatggaagcagaatgagatcttccaggaagaatgcagagaataaaataacaag

SEQ ID NO: 561824 - DNA, 290 bp, Homo sapiens
tgccagtcgattctataggatcccgtttctcctgaatctttgcacagcacatttgcaatattcctggttctctacatcttagatttctgtcacgtattcccgttttattgtataataatcttgtgatattcctcatcttaatttccctggctttggataataagtttgttaactgtaatcctccactctcacatttttaacacaataataatgtgaacctttaagggttgttagggattaattgaggtaatatctataaacttctgaacacagtaagaggagcttgtaag

SEQ ID NO: 561825 - DNA, 110 bp, Homo sapiens
tatacttcctccacgctttatacttctcaacgcttatacttcctcacggcttattacttcccctaggcttattatttcacaccgcgtaactagaaatcgagaccgttctg

SEQ ID NO: 561826 - DNA, 193 bp, Homo sapiens
tgttgctgtagggcgcatcgactcggtccgggctgctcgccctgcactgggctggcctcccagcacagccaggggccgctcaggtaggcggaggggtggtagacggtgaggcgcttctgggtggcactgggctcacttgtggtgagaaggtcgatccagtctatgggcctccacgcgagttgtgtggcctggg

SEQ ID NO: 561827 - DNA, 163 bp, Homo sapiens
taccaagaataaagagttgattgaagatctgatagtttgcatgtgcgtaggtagtgggtctacgtgtcattaggaaaagctgaaccatggaaataaagagaaaataaattgaactcggagctaattcatgccttggaattaaatatacatatatataacaaaa

SEQ ID NO: 561828 - DNA, 335 bp, Homo sapiens
  misc_feature (17)..(17): n is a, c, g, or t
  misc_feature (123)..(123): n is a, c, g, or t
  misc_feature (212)..(212): n is a, c, g, or t
  misc_feature (306)..(306): n is a, c, g, or t
caggttaagggccacgnaagaaggtggcgacgcgctgaccaacgccgtggcacgtggacgacatgcccaacgcgctgtccgccctgagcgacctgcacgcgcacaagcttcgggtggacccgntcaacttcaagctcctaagccactgcctgctggttgaccctgggccgcccacctccccgccgagttcacccctgcggtgcacgcctccnggggacaagtttctggggtttttgttgaggcaccgtgtttgaccttccaaattaccgtttaagcttgggagccttcggttaggccgttttcttncttgcccgtttggggttttccccaacggg

SEQ ID NO: 561829 - DNA, 726 bp, Homo sapiens
  misc_feature (50)..(50): n is a, c, g, or t
  misc_feature (118)..(118): n is a, c, g, or t
  misc_feature (131)..(131): n is a, c, g, or t
  misc_feature (144)..(144): n is a, c, g, or t
  misc_feature (152)..(152): n is a, c, g, or t
  misc_feature (155)..(155): n is a, c, g, or t
  misc_feature (159)..(159): n is a, c, g, or t
  misc_feature (177)..(177): n is a, c, g, or t
  misc_feature (183)..(183): n is a, c, g, or t
  misc_feature (189)..(190): n is a, c, g, or t
  misc_feature (194)..(194): n is a, c, g, or t
  misc_feature (197)..(198): n is a, c, g, or t
  misc_feature (221)..(221): n is a, c, g, or t
  misc_feature (244)..(244): n is a, c, g, or t
  misc_feature (285)..(285): n is a, c, g, or t
  misc_feature (292)..(295): n is a, c, g, or t
  misc_feature (300)..(301): n is a, c, g, or t
  misc_feature (306)..(306): n is a, c, g, or t
  misc_feature (309)..(309): n is a, c, g, or t
  misc_feature (358)..(358): n is a, c, g, or t
  misc_feature (614)..(614): n is a, c, g, or t
  misc_feature (617)..(617): n is a, c, g, or t
  misc_feature (622)..(622): n is a, c, g, or t
  misc_feature (706)..(706): n is a, c, g, or t
tatatggccccgtttcataaaggttactatattctatagagagtgaagangtggcctttctatcccagcttaccctattcttgttattgttcaaattctcctgaagcttgcataactngctgccatcaggnaaatgctattggntagcagangantgcngttctgttaatattaganccagcngggggnncttnggnncttgacattaaaaatctagaaanagaattaaaagaagggaaaaaanaaaaaaaaaaaaaaaaaaaagacttaagtaaaaaaaaaaanaaaaaannnnaaaannaaggnganaacgtcttttcagagatcatagcacatgaagaacccatggacactacanagactatgaacagttagcagaaaaagatctcgtgactaaagtggggatgacagcaaaaaaaaaaaatttacaaaaggaaaaaagttgagaatacaggaatatttacaagatgttaaaaaattattaatcttcagccaaaatgaggccccttcgcattcccaaaacctttgctttcttctcctttcgttcttgctcgcgtttcttccgttgctcttcctttgtctggagatggggttgtttgtaagttttcttgtanaanttaantctgttgacatgttgatttagataattattttctttagattgcccccatggttttagctttccagcagcagaattccccgtganggtctttaatttgtgtgtcc

SEQ ID NO: 561830 - DNA, 456 bp, Homo sapiens
tgaaaggaatggaattgaatggaatgggcatgaatggaatgaaattgtatggaatagaagagaatagaatggaatgcaatggataagaaaggaatggattggaatggaagggaatgtagtgtaatggactggcatggaataaactgcaatgctacggactcaaatggagtaaaaatgtatggaatggaatgccatgaaacggaatcgaatgtcatagaatgtaatggaatgcaaaaaaatggactccaaaatcattgactggaaaggctgggtgtcgaaaggaattgactccaatggaatggaatcgaatggaacggaagtgaatagaatcgaactaaatcgaatggaatggaattgataggaacggaatggaaaggaatggaatgatttggcatggaatagaatcgaatggactcggtcgacgcggccgcgaatttagtagtagtaggcggccgc

SEQ ID NO: 561831 - DNA, 130 bp, Homo sapiens
ggggaaccagagagggaaccagaggggagagacagagcagcaagcagttggattgcttccttgacgacggccagcattgaggcttcctttttccaccaactaccttgagtcttccttctttttgacttgg

SEQ ID NO: 561832 - DNA, 418 bp, Homo sapiens
gctggagtctccccgcacaacgctccctctgccgggtgggcaggggacgcggggtccaggacatgctcgccggcccccatacctccccacacatccgactcctgctcaaaatctggggctgccagcctgggggaagaggtccaggacacgcctcagccctcctcacccttggttctgcaggttggacggcctgagcaaggggcggtgggcccccaccgaagccactgctgctcacagcctgggacgcagccggcccaagaggcccagcggggaccctcccctgaggctagctggctgtgtggcaggtactgtcccaccccgcccagggggcgtgcctgcccccagaggcgctcttccagctgtgggagcaccggcagcagccaccaaagcactgcccgggggccaggtgggagcccaa

SEQ ID NO: 561833 - DNA, 118 bp, Homo sapiens
gctcccttgttcatatcttcccacatttgtagatacttctcaatagggttgtgcctatgtctagattctatcctctgctcacgttctgctttcatctgttcagagtaggatagacatt

SEQ ID NO: 561834 - DNA, 302 bp, Homo sapiens
  misc_feature (210)..(211): n is a, c, g, or t
tcttctccccgacaatatcatgttttaaaaatcccttcacatggtatctaagactccatgatcatctcaattacgcttgcatcttcattttggtgtgcttcggactcgtgcatgcctcaataataatgaattgcttatagtccccaatatattggcacaacagtttcttccattcctgtcctatttaattcaggtctacctctagaaggnncctacccaaattcccaattacctgttttagctaagctcgaatatttgcatcacaaatagaatataaggttaaggttccgttaacatattat

SEQ ID NO: 561835 - DNA, 197 bp, Homo sapiens
taagatattaatggccattttatattcacatggctcccatggttctccctccctcccatggtagcctggcggcccaggggagggatatgtcttccttatatgcttctgggaaaaccagggaacagacccggcgcagagagagtcaagagggggaagatgtaaaaatgggtgtcatggggctgggaacaaatgttctg

SEQ ID NO: 561836 - DNA, 442 bp, Homo sapiens
ggagagaaggagtaggagggagggaagtttcactcgccacacacacgcttttctagttcttcttacagtttatcgcggaccctctgacgttttactgctttaatttcgctgtcctacagatgcatcaagcccacctcacgcgtctgttctgcacatagtcacagtctcggcgtatacatcttgccccatagcttcagatcttctcgctccccattgtacctcgccgtcttcgccctgctgatcccactgctctctgctcgctcagtctcacttatactgctccaccgtctaggctgtgccccatccttcagcctccgcctctgctccgcctcgtccccaggccagctttaaccctttcctgccttttctcctgcctcgcttgacggttgtcctgcagcccctccgtcctctatgtccttaccacgattccttctcgtcccgc

SEQ ID NO: 561837 - DNA, 151 bp, Homo sapiens
agctcggtacctccttctggccacgctgctaaaggaatgtttattactgacacaatgagcagtcttgagaaatatgatgacgggcgagtaatgctgggcgatgcttacccaaggaagacatgaagcatgggcgtgtgatttcttgctccag

SEQ ID NO: 561838 - DNA, 146 bp, Homo sapiens
catagctggagcgctccagtcttcagaagggaattgctgaataggcacagagggcatctgtacaccgttcagacaacagtctgcaaccactaggatgtttacatagatactcaggagcgggagcagtccattcaccctgcaaattc

SEQ ID NO: 561839 - DNA, 944 bp, Homo sapiens
ggagctgtattggcatcataggaggcttcattcatgatttcccctattctcaggctacaccctagaacaaactacgccaaaatccatttcactatcatatcatcgggtaaatctaactttcttcccacaccattttctcggctatccggaatgccccgagttactcggactaccccgatgcatacaccaatgaaacatcctatcatctgtcaggctcattcatttctctaacagcagtaatattactaattccatgatttgagaagcccttcgctttcgaagcgaacaagtcctaatagtagaagaacctccataaacctggcagtgcctatatggatgcccccaacctacaaacattcgaagcaacgtataccataaacatctagaccaacaacaaaggacggagtcgaaccccccaaagctggtttcaagccaaccccatggcctccatgactttttcagacaaaacaacatcacaggcacacacccaaaacacctttttttggggcaccctggctctcgagagaagtttttaacaccactcgttggggggggcggggcccccacagatgtacatgcgacacatcggcgccaaccggggtccccaggagaaccccgggccagcacaacgtggtgtggtctcacccaaaaaaacaagcgcgcggggagacccgagccgtctggacacacccaagagcgcatcagcggccacacgggctcaccaggggagcaacggcatcgaataatcgccgcggcgggggaaaaaccaaacccagcaacgaacgcagacaacaaacacgaagaaagcaatttgcacagccacaccagcgcagtcaccgaactccgacgtaccacccgcaacgcaccaaccgcacacgccatctaaatcataacagccagataccacaccacgacaacacgcactctaccgccagcacagcacc

SEQ ID NO: 561840 - DNA, 1233 bp, Homo sapiens
cattagggttgaacttagaggcactagggcctgggcacatgcaagcttcatgccatgaatatccaccttccgggctaggctctgcaggctgaaggctatgccctccaagtctcctcctactgaaggcactgctgcggtgatgctctgactctgacgggttccgtacgaggaaggggcagacgtacacctctcacaagcaacatgacagttcacgcacctttgaccagggatgcacgaccacgtgggcaagagaacctgtgcagaagtctactgcgcggcgagcgctggtggctctacataacctgccaacgcacgacaactctcacacggaactctacctacccctgcggggcatccctattgaccccaacggcaactaacacgccctcactgaccactcgacgaactggcagccgagactaggcgccccctacacacacgggcccagactcactccccctcacgggccctgacccgacactgaacaacccccagagcccacccctgtctgaccccccaaactagggcccggcccgcacgtggggaaaccggcgcgacgccacctaccggtccaacctcaccggccataccaagccacgccgcgcccgcagccccacacatcaccaaacacggcgcccaccgcccacgcagaacgaaccccgtagacaaccaaaaccctacaccacacactccccacaggcatgaccaccatcaaccacaaagtcccccccggaaacccggcaccccataaccactggcaacccctggcgcaccaacataccccacacctacgacccacaccccacccgactcagcccgccacaccagaaaatccacccagacaaagcccaccgcgacgccacacccaccacccacccaagcaaactcacacaggagccatttcctcccccttacccacatccgatcacccacagcatccccctgccactctgacaccctctccctgtccaacctctctcaccctcaccaccactccactcctcgctccctcacgtgacaaacaacaacaagacggacagaccaccccccaggaacacacacgcacacaccccatcggtccaaccaccacaccatagaaaacgatcgcggatcgaggagacgaacagcagtcactcccaagcaccaatcacccgacactcaccccagacaacagcccgcacacacaaatgatcgaccagcccacgcacacccgacacccccacaccacaccag

SEQ ID NO: 561841 - DNA, 85 bp, Homo sapiens
tatgggtcgcggagggaactttggaggtggtggaggtaattttggccgtggtggaaactttggtggaagaggaggctatcctcct

SEQ ID NO: 561842 - DNA, 430 bp, Homo sapiens
tacttgcctttcttacctaccacgaggcttcttgcctgcaagcgccgccttctcatctgattaggcttgtagtgccgctgcagcagcagctgccttatccacccggagctatgcgatacctggcctggcgaagaatggtgttccggcgcatggtctatgcatatggatttagcttcaacatgattctacaagtttatcagagggttcttctttaggactactgcgatggatctatcttgcgtggagctcgaagggctctttggatctctgggcttatcaagattctgctaagatctgtattaatcatcttgtgcatgggaagattgtagttactcttgagggaagcggctttacgccaagtgccgtacaattcatctaacttccggaaagcactttcagtccaaatgcagaaacgtcccacatgcccacc

SEQ ID NO: 561843 - DNA, 914 bp, Homo sapiens
ctaaactttggcagttcctttgtctacaactgttacagtataacaaggttgtagacaaaggaactgccaaagttaggcccggtgcacacgggacagataagtcattcatataccactttcagtgtttacaatacacagcaattatgcctttaaatgattgtaacgcagcccggcaacaaaagcaacggttacagcaattatctaacaacgaggaattaactcaacatttcgggatgggtctccattgtgcaggccaaacattaaccgggctttacccaaaaaaagcgcacacataaatttacgcaaattattatccagtcaagctctaattattgtcgaacccggctacttacggtaagagatctaatacccttctccacctcttgcggtccaacattttgtagaccaacaaacaccctaattatatcaaccgccgggatcgacactaattccttggccacttaaaggacagcacacagcttgggtggctgggccattagaccaccatcacgagcgcaccgtcgaactcttctttcgtgggccccttaccaaaagttcccctacatgtgggcaagtttacaccaattttggggaccggctacacggcacccgatttggcctgtatcaatcttttaactggcccacgttggggaaaacgctaccagcgacgcagaacacgcgagcactgtgcttagaaacacatcaaacatagcaaccccaactacgaatactcgctataagaagtaaacgccgcctagtagcacctaaagacgcgcgttgtgataaaaacaccccctccgataaaaagagaacgactgttaccaaccatgcctgtgggcgagaaaagagaagttttgcgacatggtgcttcgggctgaactgctatgtgatcgtattacctcacggaactatag

SEQ ID NO: 561844 - DNA, 761 bp, Homo sapiens
  misc_feature (1)..(1): n is a, c, g, or t
  misc_feature (393)..(393): n is a, c, g, or t
  misc_feature (429)..(429): n is a, c, g, or t
  misc_feature (439)..(439): n is a, c, g, or t
  misc_feature (452)..(452): n is a, c, g, or t
ngccccgcccccgccgcgcccgctgagttgtctggccccgccgacccacggcccacgacccaccgacccacgaatcggcccggccgtcgcgtgcaccatgtctggctcctccagcgtcgccgctatgaagaaagtggttcaacagctccggctggaggccggactcaaccgcgtaaaagtttcccaggcagctgcagacttgaaacagttctgtctgcagaatgctcaacatgaccctctgctgactgggagtatcttcaagtacaaatccctttcagaccccagaaagtctgttcctttttgtagtaacaatgaatctttcaaaggtttcccaaaccactccttatgatccagtgaatattcaagagagctacatttgaagcctgtacaaangcttatccctgtaacacatgtgccataatatacaancttctacttncgtcagtccttancatctacctctctgaactttcccctgaaatttctatttcaccaaggggtaacttgtggttagtatacactggcagcagccatacacagtaagacaaccttaggttagtgagcgcagggcctcgaccaacacaaggaaccaccccggcggcatcttcttgtgtcgcgcgtggcgctcacacacaaccggcggctaaatcgcaacaggggcgcactgacgtgggccaaaaacggtgtgtcccctgtgcccccgactttctttgggtcaccacagggggtggacgaactgacgcccgtgatgccgcgtgtgg

SEQ ID NO: 561845 - DNA, 207 bp, Homo sapiens
  misc_feature (3)..(3): n is a, c, g, or t
  misc_feature (198)..(198): n is a, c, g, or t
  misc_feature (200)..(200): n is a, c, g, or t
ganagaaaacatagcaagacccactctatgctaatttttgtatttttggtagagatgaagtttcaccgtgttggccaggctggtcttgaactcctgacctcgtgatctgcccgccacagcacttcaagtggctgaggtggaaggattacttgaggccaggagttcaagaccagcctgggcaacatggtgagactcttncnccaaaat

SEQ ID NO: 561846 - DNA, 634 bp, Homo sapiens
gggagcaaatccctgagaggagtgcccccgcgacaagcccgccagcccgagcatgcaatgctcacaccaaataagggaagcatgtttctttttcctggtggccctggcgctgcccttccatcagtcccgcctctcccctcccatcagacccatcccgccacggagctttgtgtgagggatctcatcgctgtgatcgctcggagagcattggggagccctcagaacggccgcgggcaccgcatctgcgtcccccacaaggacccgtcggaacggctgaaaaagctgggatcgcgcaccacgggcatcggcgcagtgttcccgccatgctgctcagcccgccacgcagccacgctgccagcacggacgacgacgcacgacaccatgtcgcgggaggacaaacggcagggcaccggaccccccaccaagcgcggccgaacataggaccggactatgtcaagcccaccggcaagacgcatgagacgcatccagcctacccagcctccacagtcccatccctcaccagcacgcccccgaacaaaggcctccagcgccataaagggggacaaggagcgcacgccagggcagaagaccggagataagccggacacacaaaagcacccgtcacgacatcgcg

SEQ ID NO: 561847 - DNA, 202 bp, Homo sapiens
ctgaggtggaaagatcgcttgagtcccatcccagcctgggcaaaataggggatttccatctctacaaaaattaaaaacctagctgtgtgccggccgggcttgatggctcacacctataatcccagcactttggaaggctgaggtggttgcatctcctatgctcaggagttggagaccagccattggcaacacggcctctcag

SEQ ID NO: 561848 - DNA, 188 bp, Homo sapiens
tttctgtcagagaatctgtagttgtatattttaaatacttaagtaccactgaacggttgccaatgtatttgagcacttgatgttactgaagtgacaaatgcttctgaccatctctggctgcagagcagaaactggcagaatccgatcccatcgacccagcagtgtccccaacgcctgaggaccagcac

SEQ ID NO: 561849 - DNA, 143 bp, Homo sapiens
gcaaatgtacgggagcggcggaggatgcagtccattaacgatgcttttgagggactccggtctcacatccccactctgccatacgagaagaggctctccaaagtcgataccctgcgcctggccattggatacatcaacttcct

SEQ ID NO: 561850 - DNA, 173 bp, Homo sapiens
agcaggaacgtgaaccgattgactgaatgacggtagcatatcgcggctaaaagaggtaacccatactacctgtctatcggaccctgtgacctcaaccactgtatgtcaatcatgctggtgatgtccaacaatacacggcttaacgactaggccaccgcgcaaatggttcgcaa

SEQ ID NO: 561851 - DNA, 303 bp, Homo sapiens
  misc_feature (78)..(78): n is a, c, g, or t
  misc_feature (187)..(187): n is a, c, g, or t
  misc_feature (243)..(243): n is a, c, g, or t
cactttgggaggccgaggcgggtggttcacgaggtcaggagataaagaccatcctggctaacacggtgaaaccccgtntctactaaaaatacaaaaaattagctgggtgtggtggcgggcacctgtagtcccagctacttgggaggctgaggcaggagaatggtgtgaacccaggaggcagagcttncagtaagcccagatcgtgccagtgcactccagcctgggcaacagagcgagactctntctcaagaaaagaaggggagatagagcctggttttgaatatttttatatgtatttagtgt

SEQ ID NO: 561852 - DNA, 108 bp, Homo sapiens
gggggggaaaaaaggggggtttggtttttttttcaaaagggcccccaccaaagggggcctttcccttttttaaaaaaaaatttgccttccaaaaccccccccccccca

SEQ ID NO: 561853 - DNA, 266 bp, Homo sapiens
cgcgcgtaatacacacgaggtggacggggagaaaaaaaagacaggggtcgggttgcttcaacaactgcggttgagttttgcttttactatgcaagaaaagatggtgggttgtgctttccacattttgggagagggcggtcagaggaccatcatctaactacttggaccagatggaagaatatgacaaagtggaagagatcagcagcacaaacacaactgcttctgtattcacgaggttgtgagtgggctgcggcagcccgttggtg

SEQ ID NO: 561854 - DNA, 344 bp, Homo sapiens
cgggtatggtataatacgcctcacactcattctcaagccctgacaaaacacatagcctacctcatatccatctgcctacgacaacagcatagccctcgtagtaacagccattctcatccaagacccctgaagcttcaccgcgcgcagtcattctcataatcgcccacggggcttacatccctcattactatttctggctaggcaaactccaaattacgaaacgccactcacaggtcgcatcataaatccttctctcaagggacttcataactctaactcccaactaataagctttttggatgaacttctaagacaagcctccgttaaccccgaggcgctaccaa

SEQ ID NO: 561855 - DNA, 715 bp, Homo sapiens
  misc_feature (93)..(93): n is a, c, g, or t
  misc_feature (472)..(472): n is a, c, g, or t
  misc_feature (575)..(575): n is a, c, g, or t
ggagttttcttcatgactctttacagtacaagttttttgtttttgtttttttaatggtcagatggatagaacaacacaggttttgtttgtttngttttaacttttaaaaaaattataatagataaagggtctcactacgttgtccaggctgaggtgggaggattgcttgagcccaagagttcaagaccagcctaggtaacacagtaagaccccatctctacaaaaagtagaaaaattagcctgtcgccagggtggagtgcagtggcgcgatcagctcactgcaacctccgcttcctgggttcaagccattctcctgcctcagcctcccaagtagcgcggattacaggcatgtgccaccacctccggctatttttttttctatttagtagagatggggtttcaccatgttagtcttgaggtcaggaatttgagaccaggctgggcagcatggtgaaaccccgtctctacaaanaaatacaaaaattagccgggtgtggtgtcacgcacctgtattccaagctactcaggaagctaaggcaggagaatcacttggaacccaagaggtggaggtttgncaggagacgtgagacttgtagcaatatgcactccaaagctggccgacagagtgagactctggtgacgagacaacagagcgaaacagagaaaaaaaaaagaaagaacaacacagccagatcaaacagaaaaacaaaacagg

SEQ ID NO: 561856 - DNA, 793 bp, Homo sapiens
  misc_feature (612)..(612): n is a, c, g, or t
  misc_feature (779)..(779): n is a, c, g, or t
tgttaaattttttttttaaagtgttagtagatatgtaatactccttaaaattttttaaaattaatgtacatataacagtatatataatgataaaaatagtaatgtaactagttttctggttttttttaacatgaaaaacttattggaaggcacaatgatgacaggagaaagatctcaaaacaatatgagttctttgtatacttaaagactctttgatttatccatatagaggtagaagaattagaattttctattgaatttacagaacacaaagataaaagttacataaaattttctcacacatctgtcccaaagctattttcaggagatgagaatgaggggcaaggataaaaggaataattgaacataaagcagttctatgaatggaatgccacttaaaagtatgcctttattatcatttctcaaaataatttttgagccagtcattcctgttacatgctatgttgttcatactatataatcaaattcttttgcctcatttgtatttaaatgtattacgaaaaataaagtgggaaaatatactgaaaatgaaatacatgtagtctttagaaagtgactatgatatttgtataagagaagtttacatgattnttaggtgggaaagcactaactgaagaatatgatttataacaaaaataaaggtaacttattgcagtaatgtatcatgtcattcgtttcctaggagaaaatgaatcacatttaaaatactgaccccttctggttttcttttctcactacttgacaagtaaatccaattntgtgagctcattga

SEQ ID NO: 561857 - DNA, 285 bp, Homo sapiens
tgtaactggatagacggagtaattattacgctatcacagacgggagcctgcatgaaaagtgaaggggactcacccaagttcacgctgctgttactgggcggagatcaatctgtccggggttacctctgcctccggtgctgttggtccgactgtgcttccccaggaagaatctcgagggtgcaggtcataggtctcctgagccaatcgttcgctctcttgcccccctttttttgagacgcacttgctttgctccttgtgggcctcctattgcaacagggtctctca

SEQ ID NO: 561858 - DNA, 399 bp, Homo sapiens
  misc_feature (3)..(3): n is a, c, g, or t
aanatcgcgccgtccgccttgctgcgtcccctttcccggctgctggcccccgccagtatcccgagcggcccttcagtctggccatggctgctttgtagtttgcccagagttggcaataggggaggtgaaagttgggttcaccttgggcaccactgtcttcttgtggatctatctcatcaaacaacacaatgaagatattttagagtacaaaagcagaaatgggctggaataaacttctgaaacactaatgtagtatgctccgtatagtgattgtagctcttcctctcgattcaccatctgctcagctgcaaatctgagagaacacgtcatctgtgcatatatatcacgccagcatttcgtattttgctcatctacataacaagaaatacacatcaacaa

SEQ ID NO: 561859 - DNA, 153 bp, Homo sapiens
catctacattctctttcatcccatcatctcaagacttcttgggtcccttattcctgtcttcgtctgtatccgccgcgtatttgcatgtcatttgggctgttttctaaataatcccccattatgtcctctctgcacttacattgtctctgctct

SEQ ID NO: 561860 - DNA, 997 bp, Homo sapiens
gaccaggagaggactgatacgctgtgtgttgtgtaccaagcatgactgaaagtagcacaactctaataccattatctatatgctgagcccaccccagaaaaagaaacaacgcttgggagaatctgacactgaaccatcagaatatcgaagtcggtggagtcacaccaccaatttagtcataagagaatctggtgaacttgagttcgaccctggagctccaggaaaatggccttggctggtgtgtctgcgcagattcaactctgtggatacaggcaggctgccactcaggcgtaattcccacctagaggagagtatcacatccaccgaagaatcttccgaagaaaatgtcaactttttgggtcagacagaggcgcagtaccacctgatgctgcagcatccaggatgcagctgtgtgagctctccttctgcgggagtatgcataagtcaaagagaaacaagcggggccgggagtatgtggacagagtctgcctgtcctataatgtatggccaattgttgcaaacaaaaatttttcaagaattggtagaaggtgtgttttacatacctaacatgggaattgtgcaccgagatctgaagccaagaaaactattcgacttcatggcccgtgatcagaagtaaaaataggagaccattggtcaggcatgcaccggacatctacagaaggaacacagactggaccaaacagaaagcggggaaagaacacaagcaacatacgtccagagtgaggacatgtcagaacgctaccaccgaacaggtggagcgacagagtactacgcccagacgatatggtacgctcgggggagggcaggcaagagaaagcagcgaggacaaacaatgaagcacccacagtacaacagttaaaactggcagaggacgatcgcacacaacagggcaggccagcacataacagaaatagaagcacaagcaaaccatacagaggcgagaacacagggaagacacacgcaaagacaacagaaa

SEQ ID NO: 561861 - DNA, 304 bp, Homo sapiens
gcccctacggactaagggataacattaggagaaacaccttatgcagatgacgggttgatgggcgcagcaaggcaccatttcacgggtatacctatgtaacaaacctgcatgttctgcacatgtatcgcagaaattaaaaaaaaaaaaaaaggtactaccccatccaaactggggggaccctaccttgtttaaggtcaatgggggcattctgagccaacctacttctaattaacttttcactcatgcactttcatggctgacggggaaaggggtgtgaacagacagtcctgggggagggagctca

SEQ ID NO: 561862 - DNA, 331 bp, Homo sapiens
ccccttccccgggtggctggaataacaggcgcccgttaccatgcacagctattttttttggtagttttaatgggcatggggttccaccatgtgggccaggctggtctaaaactcttgtcctcaagggatccgcccaccttggcctcccaaagggctgagatcacaagcatgagccaccgtgcccggcctaaatgttctccaagcacattacattgtttagaaaaattaataaatacgttgggtgacaggttaacttattacctttaagggcttattaccgtttatcactttccctcccacatttattaaggttataattacccggggaggg

SEQ ID NO: 561863 - DNA, 469 bp, Homo sapiens
tgaatcccagaaaaatataaaccctgactcttgatccacctgcctcggcctcccaaagtgctgggattacagacgttagccaccgtgcccggcccagtggtatctctcttatgaggaaaaaggtcgtctcatatccataccaatttgtcaatttccttcatagttaccactgggttccgagctcagtcggtgacactatattttatccacattgaatcagatttttcaagctaatcatggattgcatctggttgagtctggaacaagccagatcaacagggataaataatgtagcaagtataatctgggaagtacctgaaaaattataggtaatataataaaatggttttctgggctagaagttagtgagaggcatacggagaatctagagttgggctttcatgggtggactaagcttacttaccccgctcttcccgtgcgccctattcggtgtacgtattcttcaata

SEQ ID NO: 561864 - DNA, 177 bp, Homo sapiens
ttcctgtttatacaagcagtcgcactgaggacgtttgcccatagtacttacacagggattgggggaatatttatagtaggcgccgatagtccgttcttcccgagatggtgaatcaggtaggattatgcattttatatctcttcttatcttagacaacgatgtgaacatggagacagt

SEQ ID NO: 561865 - DNA, 1067 bp, Homo sapiens
ggacaaacattcgccatgagcgtctatgctctgtcttttccgcgtgagattgggcttgagtgtaatcctgtgtgttcgaatgatagtcactatctaggtatgagctgcatcgaaagatcatctttgtcatctagtttgttgagctatcccgatgctctcaggcgtacacagtacagctggagagaagtgaagggcagccattagagcgataaagaactaacatccagtgttctgtgactgtagggtacagtccgatctgtaaacatgcctggaacgatagactacctttggaaccagagtctatctgtatcatatagtctaacagtatcatagatcgaccgctgtgggacgtaacagtcttcgatattcaggtacctcctcttattcaaccttccctacacatgggggattctgacgtaaacagtctggtctgctgagtggcttccccagtttgcacgatagttgaaaacaaatattgcagctcttggatcgacagatagagaacatacgcataaaagcatgttccaaagaaagtgatacttgctgaacagaagctatggagtggtctttaggcattaaagactacatgggtccaaaataatatatttgcgattactacatgagggtggttaagggtcatcaagccacgtgccttcagatagtacagatggcacatatccttcgaacctgggtggacgtcaggatggactcctaaaccaatagacgtggcatgcacctaaccaagagtagcacaaaatctacgtaggtgcaacgaatacgcaagattcccaacgctcccacggaacaaaaacacacatccaaagaacccacccggaacagatacggcaacagggccaccaactgaaaaaaggtggcactgaaaaaaagtgtacagaaagcattctcacagggtcacgaacaaataaggccataatagaagtcagggagaataatgccacagaagtgaacaaaggtaccagaacggagagacaagcagagttaaaacagaaggggagagagttaaatcacggaacgaggtaccggagagacgaggggaaatccaacga

SEQ ID NO: 561866 - DNA, 654 bp, Homo sapiens
tgcagtggctcacgcctgtaatcccagcaccttgggaggccaaggagggcggatcatctgaggtcgagagttcgagaccagcctgaccaacatggagaaaccctatctctaccaaaaatacaaaagattagcagggcatggtggtgcatgcctgtaatcccagctactcaggagctgagacaggagaatcacttgaacccgggaggcggaggctgcggtgagccgggatcgcaccactgcactccagcctgggcaacaagagcaaaactccatctcaaaaaaacaataataactttcttcagttcaaaaataacctaatagccatttcaggactaagtccacccaccccaactcaataattctaaaatcacttggcttggacatctctgctcattagcagacagtgcaagtgctggaccatctctccaatgccactctctcaccgaatcaacaataaacactaggactttcccccccgaacacttgtccccttctacaataggacgtatcctataactccaataggaagctatcctatacctcccccgctatcccccctcggcccaatcccctacggacctcccagcgaccctgacactcgcttcctcatgcccccctcccgtccctcccgcctgctgctcccctgcctccgcc

SEQ ID NO: 561867 - DNA, 159 bp, Homo sapiens
taccctgctgtacatagtattgatgtctgcactgccagcgtgctcggacatacttctggtgggcactgtgcggaaacttgaggatgaactcagtgcagctgcatgcacttgaacaggcatggcctgtcctcctcacttcagtgcaatgtccactcgacc

SEQ ID NO: 561868 - DNA, 256 bp, Homo sapiens
  misc_feature (28)..(28): n is a, c, g, or t
  misc_feature (44)..(44): n is a, c, g, or t
  misc_feature (139)..(139): n is a, c, g, or t
  misc_feature (161)..(161): n is a, c, g, or t
  misc_feature (188)..(188): n is a, c, g, or t
  misc_feature (195)..(196): n is a, c, g, or t
  misc_feature (201)..(201): n is a, c, g, or t
  misc_feature (207)..(207): n is a, c, g, or t
  misc_feature (211)..(211): n is a, c, g, or t
  misc_feature (224)..(224): n is a, c, g, or t
  misc_feature (231)..(231): n is a, c, g, or t
  misc_feature (242)..(242): n is a, c, g, or t
catttagtaatctacgaaggaaatatcnaagtgtttttcaagcntgttatattcagtgtgtgccgcaggattgaaataaatgacaatgtaattatgaattcatgttttagagctgtttactcattagtaaaggaccgcnatgttagtaagaaacctatganatgtatgttaagattcttagtattgtncagggannaagcnaatgcntganaatatgtcatgtnctgaaanttaaacttacntcggtttcggttat

SEQ ID NO: 561869 - DNA, 199 bp, Homo sapiens
gcttggctcctaagctcaaggatacacagctattacttcttctcattagaaaacatcatctgcgtacggggcagtagagacacacagaagaggaaaaccagccaccccaatctaccctcagaacagtgtgggtttgggtccattttccaccgtctctcaggactgagacctggtggacccttcctccaggccacagcca

SEQ ID NO: 561870 - DNA, 217 bp, Homo sapiens
gacgacgagcctgggtaacataatgaaagacctgtctctactagaaagtacgagaataagctgcgggtggtggcgcactgatagtcagtcccagctactccagaggctgaggcatgagaatagcttgaacccagggaggcggaggttgcaatgagcctaatgagcctagatcgcgccactgcactctagcctgggcgacagagcgataccctgtctc

SEQ ID NO: 561871 - DNA, 496 bp, Homo sapiens
  misc_feature (25)..(25): n is a, c, g, or t
ttaagggagcaccggagaaaaggangaaaccggaagcgagaggatgcaggagatgatgatgataaggagggcgccattggtgtgaggaacaaggtggctgggggcaaaatgaagaagcggaaaggccgctaatgctttagaaagacttctgctcgcctgctcgccagctgtgagattctgtccagagaccactcggccagctgggagaacgttcctcgggattgcagtgtcattgcaatgggacaacttttacagtgttgacacaggactggccgctcttcagcttgcattcctcacctgtgacacaagtgccgtgtgctcttcatgctgcacctctgccttcccacctgcaagccacggcctggcggatggagagcgctgactgtagttaactgtaaagcttctacagaatggtgtgtacgccaccttatctcagccggcattcagcctgatgtgggtcaataattattatgattaaagatgtatttttattaaa

SEQ ID NO: 561872 - DNA, 1010 bp, Homo sapiens
ggtcccctatatctgtctgtgggtggggacattggggtccggaccgttcagcaccaagacatggcagccccttgagcggatgactatggtcattgaggagtgtgcaagggtgcctgacaagcgatacgttccgtcgacatggtcttcctcagcgaacaggaatgtggtgcagtccgaagccaggttgctgacacggatgtgtctcacaagagcccagaagcaagcggtagacaaaggcacaggaagcaagcagcggcctgctgatgcgtgtggacctccctgcagccccgggggcagtcccatatgataagcagttacctgtgtacgtgaacaccacaaagccatgatcgctggccttgccctgctgagaaacccagagctaggtcctagagatcccacttgtgcatatgtaggctggataaggccatgggcggcaggccagccatcccacctctttgtccacgatcaatattccaaagtccttgcatttgatgctggtgcagatcgaatccctccatgttggcacgttggccatccagtggtcatggctttctcccagagtgacctgaatgcaggtccagattggcaagatggccttgaacctatataggccagcttgggccaggagcgccgcgaagaagcacgggactatgcctaccgacgttcatactggtcggacgttcgccagtacaggatccaagaactgggcaactgacttggtccggcccccaagtcattatgccgggaacgactctgaagcgctaaccaggaggggtaaaatagcctttttggactccctgcaacggcgtgtatcaatatagtccccaacgccttgtgtgtggcccgaagagaccatgggaggagcaactaaaaggccagatagctgggatgggccaccaacggcgcacagtattcccaccacgcaaaaaatatcgcgcggaactatatctgagtagcacgtagtcagagaaccgctatttcgtctaacgacagccctgctagcaaaacgt

SEQ ID NO: 561873 - DNA, 236 bp, Homo sapiens
  misc_feature (58)..(58): n is a, c, g, or t
  misc_feature (78)..(78): n is a, c, g, or t
  misc_feature (84)..(84): n is a, c, g, or t
  misc_feature (158)..(158): n is a, c, g, or t
  misc_feature (210)..(210): n is a, c, g, or t
gggttctatgctctttcccatacccggtctccgcctcatctctctcaatatgaatttntgttcccgtgagaacttctngctctngatcaactccacggatcccgcagacagctccagtggctggtgggggagcttcaaggctgctgaggatcgagagncaaagtgcatataattggccacattcccccagggcactgtctgagagctggngctggaatatacgaatgtgccagtat

SEQ ID NO: 561874 - DNA, 144 bp, Homo sapiens
gccgccgccgagtcgcgcggaggcggaggttgggtgcgtcaagattcaacttcacccgtaacccaccgccagggccgaggaaggctatggctggtgggaggtgtactgggacgttaatactggctttacaagagtgttcggaag

SEQ ID NO: 561875 - DNA, 875 bp, Homo sapiens
  misc_feature (131)..(131): n is a, c, g, or t
  misc_feature (514)..(514): n is a, c, g, or t
gactcgtgggtaacttgcttttgggagtcgcatcggtatggcgtacgggctgcaatgattggcctccgtactcatcctcaacagacgacatggaccaatgttagggagccgatgtgcctccggtatgctangactctgtgtgccgattatctgtcacctggacgtaatggacgggcattctatgttcccaacatcacctttgtgtcaccctgtgtgtagaaagccttcgaaagcagctagtgccatggaccctttctttgacatgcatcatgatggtgtccattgccattacatcagtaggggtaatagccgaagtggctgttagcaggagccaatcagtacacctttcatctcgaggctactgatgaacccaggggctttgcattcatagcacagtcgggagacatggcgatcgcaaggttggcgcttgccatcaagaccagagaaccgtcagattgagtatttggcaccatgggcgtaatcagtattgatattgtgccttggttaatgacangtggaaccggggttcggagggcagagattcatggaagatatgatgccaaaggttcactggttgaggacccagtttcccatcgttggatatagagctcgatggtggagtaggtctgacactgtccataaatgtgcagaggcaggagctaacatgatttgtgttcggcagtgctatcatgaaggagtgaaagaaccctaggattcttgggatcactctaattgcgaaggtggttggttcacgaagcctggttcaggaaacgttctcctggaccggggaaaccagtatggagcccgggggttcccggttccttgaaatcttcccctttactgggaaacgcgaattttgacttacaattcccaag

SEQ ID NO: 561876 - DNA, 152 bp, Homo sapiens
gtaaagataccacagagtgcaggcacggagttggtctgtgaggcttatttgatgtaagaccagcaactaaagtcaaggcagggtcatctgtgataatacagatgtcaccgcaggaatcatgctggcatgtggactcctcataagagtcgacc

SEQ ID NO: 561877 - DNA, 588 bp, Homo sapiens
gcttctgcatctagggagacatcgtctttgaattgttctgtgttgggctgtaccagcccagatgtttgacgtctgggagaaattgagagatcaagctgtgagacatgggagaaatatttaggaaataatttcgcatgtgtgtgataggtgcgggtatgactagggagttatctgtgtacaaagaaataagaagtcgatgaactattcccgcagcaggtgtcttttcagtctgggaaagacatccataaagaagcagtacagaagagtgccacatttatttttatatctatatgtacttgtcaaagaaggtttgtgtttttctgcttttgaaatctgtatctgtagtgagatagcattgtgaactgacaggcagcctggacatagagagggagaagaagtcagagagggtgacaagatagagagctatttaatggccggctggaagtgctgggctgacggtgcagtctgggtgctcgcccactctgtccactatctgggtgcatgatcttgagcaagtccttctggtgttgcttctccattgtaaccaaaggtgttgctgacacacaggggggatctctaagtcaccgg

SEQ ID NO: 561878 - DNA, 323 bp, Homo sapiens
  misc_feature (182)..(183): n is a, c, g, or t
cttggaacccgccgtcgaagccgccatgaaactcggaacctgccatgtcgaaacagcaggctggcacgtcacaagattctaaaagcacaaggcatgccgaggctatggcacacagcccttggggaagccgagtttggtcgatctcaagaccacaaggactacacctaaaccaccccggccgnncgcgaatcgcggctgtgagatgagaacaaaagaggtctcataaaacatgccgccatcgaccagcagtactgaggccataacccacactgggccacgatcaaccccccgacaccccattcgggtacgcggtgtcatcagcg

SEQ ID NO: 561879 - DNA, 181 bp, Homo sapiens
acagacgcctccgataacgtacgtaacgagcgcctccgtaacgagcgacccccgtaactgagccttcctgtaacgatgcgcctccgataacgagcagctcgacccatactcctgcacacatccggattcgaggtgatcatgaacaccgacatcccatttcgactcaggccgcagggcaaaa

SEQ ID NO: 561880 - DNA, 1085 bp, Homo sapiens
ttttctcgctagttgatagtgtttggtctgtctctgtattctgtttgtctcgtctttgtttctgcctgccttcgctggtctgttgtctcgctgggctgttggtctggccgttccggtagtgcgtttgtcgtggctctcgtgctgggctcgctgtgtttctgtcgtctgcttggttgctgatttgtgtgtagattctgcgtgtttgttatctcgtctcttctcgtgctggctgccgttctctggtttcctttgtcgtcttccgtctctcctcggtctcgtcactcttttgctcattttgcttcgttgcctgtgtgtttgtgtgtgtggctttgcctctggtgtcgagtcgtgcatctgttggtgtgtggtttctgcttctgtttgtcacgtgttggtcagttctctttcttgcagtggtcgtcagtgtggtcgtcttgtgcttgcagcggggtgtgttgcgtgcgccggttcgctggtgctgtgccgtcatgcatgtcggttctgctggttcatgctcgctaggccgttccgtcgggctcggcgcgttggtttgcacgcgcatgctttgtgtccttctccctcccggtagtttgacgctgtgctcactctcggcttcagggatgacaagctgtcgtcagtcttcgtccctctattcggggcccctctggtgttccaatgggtctttgattcacgcgcagggtcttgtgttgttgccatcttggtcacagggttgacacgtagttccattgctccgtatgtgggctctgtaggggttgcgatgcgacgggctatggtggttgtgacattggaggttgatcaactgtgggccttcaccattccactgcaggtcctggcgtggttcgtgatggcgttgatgtggtggatgatgcacatgcctgaccaggcatatctacccggaatttctgctgccgccgccgccgctggagtaggactcggcgtgcgcaggagatgccgctgctgccccgtgacgagtgtctaacttcccgggataatcctggtacatgatccccggtgggggccgacgaggaaacagggtgttttgcttcccacgtcctctccacgcc

SEQ ID NO: 561881 - DNA, 646 bp, Homo sapiens
tcggcccggcagtgtaactttgtgcaactgcctgtacccgtcatccagcagctctaccactaggcactgtggcctggactgctccaggatggtgctgcggtacctggtgccagctggacgacagtgagtttagagagagaccctgcagaaagctgcacgctgaccaggagacatctggaccatcgacctggcctacctgatgcaccactattggcgtgaggcaccgcattctgtacccagaccctgggtgtcgcacaagggctacaagaaccagtccttctacaggacgcactattgacacagcaagagacccgggtgaatcagagtgtttgcacaagcaaaggcctagcacaggtagctaggtcggcagcaaatgcacagtgagtgtgaaggacatccaggcgcacctggctcagggccatgtcggccatcgtgctggtgaactacgggggtgctgcactagtgacctgtgctccagcccatgtcaagtactagctgctacaccacacagatggccaccacatgcttctgccgcactcctgactaccagggccacttcatcgtgctgcgtggctacaaaacgggccactggctgcatcttctacaacaacccagcctatgccgaccccggcaatgtgccagcagc

SEQ ID NO: 561882 - DNA, 428 bp, Homo sapiens
actaatacatactaaaaaagttaattaagataatataactttgaaaaactgacttataatgaaatagaaatatttaatagcccagtaaccctggaagaacctgaaaaagttttcaaggctgggcacagtggctcacgcttgtaatcccagcactttgggagactgaggtgggtggatcatatgaggaggctaggagttcgaggtcagcctggccagcatagcgaaaacttgtctctactaaaaatacaaaaattagtcaggcatggtggtgcacgtctgtaataccagcttctcaggaggctgaggcacgaggatcacttgaacccaggaggaggaggttgcagtgagctgagatcatgccagggcaacagaatgagactttgtttaaaaaaaaaaaagtgacttgatttaagggaaaaaatgactgg

SEQ ID NO: 561883 - DNA, 450 bp, Homo sapiens
  misc_feature (5)..(5): n is a, c, g, or t
tctcntcttatgaataatattccactctccgatcatacaatgacctatcccagttatcaaaccattcctctctttgcacatatcctttaaccacaatgagacatttgaactgttaactttttcaaatatcagcttttgtctttctcattatctttcctgttcaaactgaactccgtaagtgatctcttaaattaaccttatacaagtattcttgatcttctgtcactcttgcctttctggacacttgtcacacaaaaccatacttaagaattaatcctaacatattcctgaacccttctcacacctgatttgctggacatctgtttaaaatcattcaagtatgctatattaattgatagtctttatttcaagtgatagaaaatctaccccattatcttaggctaaaaactgtaaaacactgatgaaagaaataaatctcggatatggatg

SEQ ID NO: 561884 - DNA, 1386 bp, Homo sapiens
gtgctgtgctcatggtgcatgactgcccatgggagcagtgagctggcccagctgtgaggcttggtgttgggctgggaccgagccagctacgactgccctgggagctggcactgtggctgtgagctgtgctgctcactgcacctggaggagatgcaacataccatctctacctgacgaagaaaagagtgctgcctgtggtcaactgccattggcctgtacatgcgccacacttgagggtgcggacacaagagtggagacaagaagtcggggacggaacttcttaccggaaaaaggtgatggggaaccaggcggatcggacgcagccttggcaagagcaagaaggggctgagccagcatcctgtgatgcccgtcctgctggaacctggggagagcccccagagttccacgattcttactgacacctcaacagcacgagagtcgatgccagagaaaggccacagtgactcacagacctggcaagggacggcagtggagggattgaccatcgtacgagagcacccggcaacctatcggcgcgactcacatggaagcagagcacacacccactgagaactcactctcactgccagccctacatgcacccttgagaacaaagtacgcagtgaagcggggaaacccaggcgttgtgttgagaatgcaacaccgcctgcgacagatagcggaggacagttcatcccacgcgagaggcacgcacagatagaagcactgagcagatccctaggacgcacacacaagacagagctaacacaaccgcacaggagagacgccgcagaaccgacgacaagacgcccggagcgaccgtggagcaaagaagcgaggcgaagaccaggcgcagggcactgaggacgcgtgtaacgcatgagaagcgacaacagaaacccagtcacgaggcagagcggatacaaccacaaacagcacaagaaacaccggtgcacacagcagtgcgccacgcgagcagggggcggtggacgcactcggcgaggagaatgcagatcaacgcaaagggtggggggagtacggagcacctgggtaccccgagtggggccacataaggaggaggagaggcgaggaggaagcagaaaggatagcagaagacaactaaatggtacagaccaatacacccacccgtacacacgaacaccacagtaaactcgacgacattcatcttcctcatatttgtgccactagcccaccctataaacacaagagtagaaacaaggaaagaaacagaatcctacacctcgaaagataccctagcaacaacatatataccacacacgaacacaaccagacatgaagcaacatctcataacattctaacgcctccttatacgaacacacgccgacaagacaaactacatataa

SEQ ID NO: 561885 - DNA, 147 bp, Homo sapiens
ccaagcccctacgtctgtgtgaaggcaagaacagctgggctgcgggaacagcatgcgtacgcgtctcatcaactccactgcggaagaagtggccatgcgcaagttgatgcgcacagtgactgtggttgaggacgacgagaatgagga

SEQ ID NO: 561886 - DNA, 190 bp, Homo sapiens
  misc_feature (179)..(179): n is a, c, g, or t
gcgtttttaagtaaaccccgatatcattaccaatccctcatggaaaagctatacatcaaagaaaacatctgtgtgtcaaagagagaagagagaaaaagtggcatcagtgaatgagttgatcaggtttgctcatctactaccgcttgactaagtctgttcatgtaatctacacatttcanaaggaagctgt

SEQ ID NO: 561887 - DNA, 121 bp, Homo sapiens
agtcaactactacaagtttttcacctgctgcgtccaaggcttcctgataagctgtcttgctctcgatctgcttcaccatcttggctgctggtgtctgacgtgcggctgtatggaccgatgg

SEQ ID NO: 561888 - DNA, 211 bp, Homo sapiens
acacggtactcgcttttctcgtcggttcggtctcggacggcgtcggggcacgtggggctcgtacaaccggcctgatggggcttgtgcggtgtgtgatgctcgggtagcctccgcgtctgttggcgccctcaaatgtgcatagtggggattttcttatccgtttgttggttaggtagttaaggatctagggctgttagaagtcctaggaaag

SEQ ID NO: 561889 - DNA, 487 bp, Homo sapiens
  misc_feature (232)..(232): n is a, c, g, or t
  misc_feature (260)..(260): n is a, c, g, or t
  misc_feature (384)..(384): n is a, c, g, or t
agcggctgggcagaggaacccgtggtggacgagggcgggggctgaggagggcggagagctggggcttgggtctgagacaggactgctcctaatgcgtttgactgccgattttggagaagcttcattatctgtgtgatgcctatggttggtgaccacacgatggataatatgcctaccatgctcagtcacagtggtgtaaatatgtttgacacaacctcggagcaacagcgcntccaatcgctcatgcgacgcgattcccnatcgcggtctgactctagacacgcatgataccgactaagcggtggacttgctcttgggctcttctttcaccccgatcatgtaaggataagacgtaagcctttcgattgccgtctaactttggangacacatgggttgtagacctatggatgggagtgtcgatgcgcaccacagggtcactagagcggacggctgtggatatcccgatgggggccaaggagagttagc

SEQ ID NO: 561890 - DNA, 80 bp, Homo sapiens
acggccgtgtattactgtgcgagaaaaggtggttattactacgactttgactactggggccagggaaccctggtcaccgt

SEQ ID NO: 561891 - DNA, 1284 bp, Homo sapiens
tctccgacccggtgtgtgtcgccccctttggggggtgctcttccagagacgtattggatcgccggtggtattctcgctccgccgtggtgtttttaggggtgttctctgtgagactcttgtggcacgagtaatttttggtccttggggcatttgtttttctgacggccactgtccccctgtgtgtggggtgaatgagatgtgtcttccatgaaaagcgggggggacggttgtgtgttgctggcgccgttttttgcgggggacaccgagatttgttcttggggtgtaaatatgaatagccccagggggccattttaggagggtttgatttattagaactgacctttttttcttaagggccacaagaggcttgagggatatatggggaaattaagatatttaggggagagcagagataaaatagtttgacttggccttgggggtgaaccaatggggcacccagtgaaaaggtgggtgggtttctttgcccagggatagtggaggttgaaccccggcccacgccgtgtgaaatatggggggtttgtgagaggtgagagtaatggggttttgtaaaagtgacgaggttttcttggcgccccacactgaaatatttgtgtgagcgcagccccatatatagtgatgggaaatttgtaaaatccggttcgccacacagcccccaagagttgttatggacacccccccagggaatgggttattgggagattttctacataggtgtgtaataagcgctccaaaatgggggaataaaagccactggaatagcttgggagatgggccaccccatttatccctctcggaatatattctcttatagcgccacttttttccatatttaaaagagcttctcttgtttatagaactctatattagaagactctttaggccaaaataccaaagggatatttgcgcggccaaaataagaaggcgctctatttctgacattctttatattgaaagtgagaacacctcgtgataacttgtgtttcttctccccacagcggaattaagtgatttgaaaatgtttacattgcctccgagtaaagtgtttccacacagttccctgagaattcttggccgaaggttttactgtattgttgccaccaactttaagataaatattttgtctccaatagtcaacattttttcactggaataaaaaatttaactgggtccaagaaaacacacctctttgaaaatacccactgtctctgtgtgtttcgagctgttttttagagcgccaataaagatggctgacgcagtttccca

SEQ ID NO: 561892 - DNA, 243 bp, Homo sapiens
  misc_feature (99)..(99): n is a, c, g, or t
  misc_feature (160)..(160): n is a, c, g, or t
  misc_feature (205)..(205): n is a, c, g, or t
  misc_feature (219)..(219): n is a, c, g, or t
ccgctctctctctctctctctctctctctctctctccagcaatccaaaagagtctcaaggatccttcaaataacttcaggctccataatgggagaagtnaagaacaaagacttaaggaacagcttggcgctcaacaagaaccagtgaagaaatccattcnggaatcagaagcttttttgcctcagagcatacctgaagagagatncaagatgaagagcnagcccctaggaatctgcctgataa

SEQ ID NO: 561893 - DNA, 357 bp, Homo sapiens
atagtctcagctgtcactgttgaaacttatgccattagtttattcacttttgtcttgcgatttattattacctttcctgtttttaaaacactcaatgtcactaaaacctttatcatagcaaatttttaggttatttaatttttcaatattgagtaaatggttatttgtttttagaaggcattctatttaagctccactctattttttatatttttcccaagttcacgttgaacaatccttcaaacattttatctcagcaaatagtcgctataggaggtaagatcaacaattattgacgtctcggaaaggtatttaatataccatacatacttgactcatacgttctggggtttgaca

SEQ ID NO: 561894 - DNA, 243 bp, Homo sapiens
acctgtatccaccaccttgggagggattgcgccactgcactcctgcttgggtgacagagcaagactgcatctcaaaaaaaaaaaaaagaattatttaaaactgactctatgggtaggtttaaaaaaagttattaagccaactagtgaccttctttcgatgacatattctcttgatgtacgttttcttgtaatttttggagacggagtcttgctctgtcgccagattgattgccggttaccgag

SEQ ID NO: 561895 - DNA, 498 bp, Homo sapiens
ctcactctccttcaagcctgctctttccctcagtctgcccctactccagcctgcccctaacaggaccccacaggccagacaaaaccgtgggactaattaacacagaattccatctgaagtcattttattatctgaagagttggaactagatcccagaaaaagaaacacagacaaccaaaggaaacactcaaaaatactagtctgggccaggagtggaggctcacgcctgtaatctcagaacttttggagggccgaggcaggtggatcacttgaggtcaggagttcgaagaccagcctgggcaacatggcaaaaccccatctctactagaaatacaaaaattagcctggcatggtggtgggtgcctgtcatcccagctacttgggaggctgaggcaggacaatcgcttgaacccaggagatggaggttgcagtgagccaagatcacaccactgcatttcagcctgagcaacagagcaagactccatctcaaaaaaaaaa

SEQ ID NO: 561896 - DNA, 176 bp, Homo sapiens
  misc_feature (120)..(120): n is a, c, g, or t
ccatcatagtccacccccaggtttatggaggggtcccctactattaggacttttcgcttcgaagcgaggctctcaatcatgaaaattattatattactgctgttagagaaatgaatgagncccgttaacccaagggaattttggaagtacaggatgtttcatgtggtgtatgcatc

SEQ ID NO: 561897 - DNA, 231 bp, Homo sapiens
taccctccgcgaatttgtttagaggagctctccaactgcaggtgactggcaagaacggcaggaataaatagttttttaatgaaaatctcttgctacatggcttaagtgctacatggcagtcaagaaatccttggagatctgccctgagcatccgattatggctaccttaaggcactcggcagaggctgatcagagcgacgagtctgttgagggatctggtcatcttgcttt

SEQ ID NO: 561898 - DNA, 356 bp, Homo sapiens
cccagactgtcgacaggttgcaagaatgtgtgctatgaccacttattcccggtgtcccacatccggctgtgggccctccagctagatcttctgtctccaccctcagcgctgcttgtggccatgcatgttggcctactacagtgcacgaaaccactcgcaagttcaggcgactagagaagagtgaatgatttctatgactttgaggacattccatacatgccatcatacggttcggatagaggggtcgcttgtgtgtgtgcgttcacctagcggcatctttttccgcatcatctttgcagcagtctttatgtatatcttttacttcctttacagtgggttccacctgccctgggtgt

SEQ ID NO: 561899 - DNA, 144 bp, Homo sapiens
tactgaccggataatgtttgcactagtagatccgtctctcattcaagcgggaaactgcgaggggctgagcaggtgctgagaccatgacccatgttttaccagaggggcaagtatttttttttcctctccaaaagggaactttaa

SEQ ID NO: 561900 - DNA, 243 bp, Homo sapiens
  misc_feature (164)..(164): n is a, c, g, or t
  misc_feature (218)..(218): n is a, c, g, or t
gggggtgaatggtaccactgctattgcctaagggtgtagtctgaactgaagccagttgccgaccgtttccccaagaaggttggagacagaagcgttcatcagtcctgaacccctccttatccaacccagcccctctctccagccagttcaaccctgggaaacancagcccaatcactcattcagaagccctctgagcaaaatggtgctccggattctnaaccaatacagcagcactgtttaag

SEQ ID NO: 561901 - DNA, 212 bp, Homo sapiens
  misc_feature (124)..(124): n is a, c, g, or t
ccactgcaactcacagtgtgtggtgttttcacttcgatggtacccacttggtcttcgtccaagatactcttgccgttgagctggtactcgtggtcacttgccacaaagcaaaatgggatcatcntccggaacttctcgttcaccagccgggtctccgacgtctcatcaaattccttctgggggtacacgtcgactgccattggggcagcggg

SEQ ID NO: 561902 - DNA, 453 bp, Homo sapiens
tcaaaaagaatgatacaacttttatttcccatggatttaacagatactttggctacatagttaatgtattttaatgaaattttttccattggtatgaagtccatccagccttatacaatttataagggtgatatgttgggtagtgtatctataatctttaaaaagtttagagttttgggaagtgtacagtatatgaggtaaaatcaagattactttaaaaatggttttctcctcttgcactaaatttttgcagtgaggctcaaatggcaagtatactattaaatgacttttactatcaaaaataggaagttcattgtgaattactatgaaaaacataagccactgtaacttgacacagtggcactttttaccattttcagactttcacctattattataaatctctgggctattacactcagactcatttgtcactgccaaatgtggcacttt

SEQ ID NO: 561903 - DNA, 1194 bp, Homo sapiens
gggctcggcgcgtcggcgcaggtttccgcagactgagggtggcagctccgcggcggcgtccggggtctccagtatgggcttgacgctccggtgctcgcacaatcccccgactcggcatggcaactgggcgtcccatccactgccacggagatccgcggcagagcgccgacaacgcagaggcgcgccgacagagagtgacatggagccccacttgccccatgtgaagatggaatagaaagaaagagaagggacccgacaagtagataaggaacgcaatgacacagggatgacgcagagtcacacgagcccgaaaaaactcctgacgaaaagacatccagagtgaacgacgaaacaggcaaggaagataagagcaagacacgggaacaagaccacgacaaccacgcggtaccacaccaggggggaaacagggaagacaagaagagggcgagcaacgaggataggaaggaccctcacgtgcaggaaaggcagaggcataggcacaagagcaacggaagccgaccggacccaagcgcacgtggggcagacggaaaaagtcgcatggaagtcagagacggatctcgcggcaccataggggtggaatataacaattggatccggtcgcacggcagcgaactggcagtgcagagtgcacacgcaaagacaatgaacaaggcgatgagcgcgaggcgtggccaaacagcgcgcgacgtcatcgacaatgcggaccgacagaaacagtacgcacagggagatgagtagacacggaaggacgaccagaagagggggacctgacacacaaggagcgcgcaataggcgccccgaaggcggagtggataacacgtcaatgcgtaacagccagcagagtcacaagggaacgagacgtacagacccgcggacttaggcgcaagcgaaggagacaggcgcgacggagaggcaggcaagtcaaccagtacccagccgaagggagagacactaaaggagcgacaggaacacaccgaccaagagagggagacaccgaaagagaaagcaccagggcacgaaacagaggacgggacagacaaacgcggccaccaaagaaaacacaccccacgccacaaagaaacaatgagcagctacaacgaaaagacgacagcgaaaccacacaccacacatggcatggacacagacagcaaactagagagcgcccaaatcaca

SEQ ID NO: 561904 - DNA, 934 bp, Homo sapiens
gaacaggtgagactggactcgaccgaactgaaggaagggaccaaaacctcggtgaactctgcaaccctctcccgaatactcctcgctgttgccggcggcttccagcctgtcaaactcagagggtgctgcctggatccagtccccagcaggataaccgacctggggtacaaacgtcggagggctacccaaatgggcaggagcaatgccgcctggagcactattcgtgatcccaaggactacccctttctccacctgctcctcctccctctgactcggaacctgcaaggatttttcttaggcgagcgccttccccattcctggaagatcccccggaatctctccaagcacgaggacagcaacgtccctctaagacgctactgcaccatgtgctagtgcgcgcagtctcagagatggggcatgtgacgtggcgaggaacagggtgtcttgtcacagcgggatgaacaaggctagccgtccccctaactaatcctagactgagacgcacgtcaggcgcacgcccgcaataggcggcgaggtgacaagtttggagtgcgccccctttcagtactgcgcgttctaagacttttggcggagactttcttggcaaaaaaccattccccaaagctacgccttcccctgctgagtaattagccccattagcgcccggagatttcgacaaggcgttgcgacgagcccgcgatgctcgcgcaatgcgtcctcccaaaggcaaattagagtgactcacaggcgacgcggttgatcgagtttaccaggcttagtacagccgagacgtggggatcggggatagcaagtcgaccggttagaacctgggtcggccggccacttcgcgggtcctagaaggtcagtgtagcgcgccgccagtagttgcctttccttcttcccggatttcgcgactatagcgactaggtcccct

SEQ ID NO: 561905 - DNA, 838 bp, Homo sapiens
tttgtttcaattgggcatttaagtttagtagtaaaagacaattgaaacaaaagttctgagaccgttcttcgagccgcgcatgttgcgcatctgcaatggatggtcgtgcggaatagctccagttgctgatcacgaggacataagcagaccgtacagcactgtagcccaataacttgaaggcccgcaattccttccgcgtacaacggactgattcaccgcaagacatgtgggcgtggagccggcagcgacgagctaagtgtgtcgtggtggtcattaagcggagatccggcgcagaggaagactgccacctcctatgtgcggaccaccatcaacaagaatgctcgcgccagctcagcagcatcagacaatgatccgcaagaacaagtatccgcccgacctgcgcatggcagccatccgcaggggcccgcgccatcctgcgcagccagaagcctgtgatggtgaagaggaagcggaacccggccacacaaagagcatactgagccccctgaccacagagcaaaaaagatccggaatgggcttttcctccaaagctacagcaacaaaacaggcgacgcatcagaaaaacgagaggaacagacaacagacggacccaacaacccccgaaagaagaggctgattctggaacaccacggtagcaggaacccgaaacagacaaagagggcaaagacacagagagcgaaaacaaaccacgaaagaccagagcaaaacgagccacaaacaccgaaagacagcgaccaatacaaacgggaaacggcaaaccaggaaacacaaaccaacgcggaaacaacgaaatccgccgaaaaccatgggggccaca

SEQ ID NO: 561906 - DNA, 1125 bp, Homo sapiens
  misc_feature (384)..(384): n is a, c, g, or t
aaacctcaccatgagattatctctccgtgcacagataacatattatgaaaaatggttcttgattcctgtttatgtgctccttgagacctgctgtgtccctaaaccgacagggtgtctttcctcgacactctcaggtgggtagcgaactggctttgtatggcggtgcgtcaacggtagcatgtggcctcatataaagtgcgtcacatgtaggatttggtgtggctaaaagaactggaagtatttacaccaatcagcagtacataagcaatgacatactctgctctgtttactccaaccaagtaaatacaatgaattgactgcgctaatagtgtgactcttgccgaatgtcaaagttgtactgcgataattactattcatgccgtntgacccgggtagtgacgtacattattctgctacacatgtatactgctatctaatagccaattcgagtatgttgcgtgtagtgtggacatttgccacctggattggacgagaattccgggggtaatttttcgcactgtcacagcactgacggtgggccactgaatgtagggagcacctattaaagctcctagcacattgtacatgcctcgtaatccttacaaacctaggcttatacccctcttgatctcgaggaccaccagcaactgcttgctaatggatttgcgtagctatcataactacttgcacatgcgtctttgtaactggttagtctcaggatgcctatgtcactcccattgcgtggcaaatgcgtaagtagttcatagccctgttcgctatgtagtgcaacttaaatgaccattttccgtacagattagcccgtaattaattccttgaattccttaatatcaaaactgctatgtgactaccataaattgcgtgcgtcaactggaaaagtatattttcttaggccactagaggataagataattccactctgattccaaatattcccaatgatcttttgggcccaaaggaagctaaatccatgtttaccttaggtatgggcaaattgctgagaatcacattctcacattttgccacaactttataattgggcacatctatttccagtggttttccaccggggcttccccctgaataaaaatgattttcaattacaac

SEQ ID NO: 561907 - DNA, 753 bp, Homo sapiens
  misc_feature (437)..(437): n is a, c, g, or t
tatttcaagaaagtggaaacatttcatttcaaaagaattcatagaattcatagcacactaagaatgtagagaatgaacttttttttttttggagatgggagttttggctctggtccccaggctgggagtgcagggcggggaggtgggctcactggaaacctcggcctcccagattcaggtgattctcctgcctcacgttcctgagtagctggggattacaggctgtgtgccaccacagcgggctaatttggtatttggggggagacgggttttcaccatgtgggtccggcatgtctcgagctcttgacctcgtgatccgccggcctcggccctccaagagtgcggggataacagggcatgagccatggcgcctggggcaagaatgaactttcttactgtacttgaaccttttgtaccaaaattgacgttgactgacntgacttgttacaaggaaaaacgaaaaaaagactcataattagggcaaattgtgtaaaaatattctcttaaagttagaaacaattccataatggtacaagcacaggttgtttctgttcaagcaattccagaagagggtcctaacaaagcatatgagataaaaatgcaggcaattatgaaagatgggtggatcaagaaaaagaacctaagtgtcatttggcaggacaggattaactaatagaaattcaatttttataaaggatagtgactaataaagtagcagttatgaatatagtatatttaaagattatattacag

SEQ ID NO: 561908 - DNA, 454 bp, Homo sapiens
  misc_feature (170)..(170): n is a, c, g, or t
tgcaaatgacttaagactgaatattgatacgtggaatagaatatataactatctaagaggtattatgaatatagcagatatctcatttcctaactaagatgagtactaaggaatataatcggatcgaggatatgcagaagctagtctccagtacatcctcggtttagatnaatcttttcatgaatccacatgattgtagcactcataagtggatccatgagttttcgccgcatgctaaacaactggagatattagccaatacctagatactatatcatcgaaagcatataggagctcagaactacgtacatgatggtatacttggttcaatgagccatataatagtggcagatcatgatgtggatagggaatgcaccattaatataccaaaagacacatcctctactccttccagccccacgattactagtgcagcaggatatgatggaaaggt

SEQ ID NO: 561909 - DNA, 258 bp, Homo sapiens
tacctaatgctgtcatgtgtttgtgttcttaatggctagttttattactaaatgagtcagacgagttatatagtagaacagttacagtaagctgagtgttaatttattattgaagatgaacaataatattttttacatgaactccgtacagtttagtttttcttcagtctattgcagtttgcagttttgtcctaggccttcatcttcactcgctactcactgatttgcccagaacagcttccacagccatttaggtgt

SEQ ID NO: 561910 - DNA, 110 bp, Homo sapiens
ctgacctactgactacgtgacaactggacttttggcgtacggtatggtctacgggtgtacgcctgacgacatacggggacaatcacgtgaactgacagcgctcctactga

SEQ ID NO: 561911 - DNA, 1028 bp, Homo sapiens
cgccactctttcttctctggcacaaccctcctgccgccactgcacgacgcccacacgctggcacgcgacaccgacagcgaactgccgcacggcctgcaagccgcacaacacgaacgacaacgactgacggcagcacggctccacacgctaacaccgcctagccttgcttgcacccgctggcaacggcccacacggagccacgacacacatggcacactgcccacgcacgcctggcgcgactgcctggctaccaacgcctccgctgcgcgcacctgccatgcttacctgctcctacgcagcctttgctcctcacacttgcgactcctacgaacacttcaatcggccccctcttgcactctgcccgattcaccttctgcacgaccctcaccctttgcctcactaacaccaacaacttgccccatgttctggcttcctcttgccccttggaccctgctgcaccactctcttgtgcacctacttttcctgatgcttacactctctgctgcgcccgcacgttgctaaccacacccactactacactaacactcactcttcctttccgcccggctcctctacgccttgacacgcacacttcaacacctcctacaccacccactactcaccacccctcacacatccacagatcacacaccctctgtgtgctcggccgcagctctagcgcccccacgacaacacaccctcttcacaccaccaaattctcgcagtagcgcacacccgccccccccaccccccccccctgcaccgcgggcccaagcagtggtccctccgcagcgacagacacccgggtccacacaactagacgcgcacgcgcatatccctccgctcatcataacacatacgcgcccgggtcgatacaccacgcaaccgctatcgagaacaaccctcaaccgtcgaccctccagggcacacccccaacgcgcccctatcaccacgcagcgtcctcaacagagcctccccttaaagattgcccacgacccttgcggtccccccctctacgcccacacacc

SEQ ID NO: 561912 - DNA, 134 bp, Homo sapiens
  misc_feature (15)..(15): n is a, c, g, or t
  misc_feature (39)..(39): n is a, c, g, or t
agattgaacagaatntattggctgtctttgaagtgtctntgggtatggcttttggcaggggctgtctgggttcctccgctttgcttgtttttgggctgctgctgcagcctttaaggcccttctgtcgtcttctc

SEQ ID NO: 561913 - DNA, 332 bp, Homo sapiens
ctgaggacccagaataaatcgttgctcgaatctacccgtgaccatggcttctccagaatccaggcaaaaggacgggctcaggtatctccagttcacagaggaaaaagccgagtggctgggaacctaatcataacaaagtcagaagtactccactgtatcaaaagaaagcacttaaccaactaggaacacgagctatgacaaagactacctcagtggtgaactgggtgatcatctgaagatgcaaatccaggtttcgcttcattaattcaccatccagagatcaaataattacaacgaaaaacaactatagataggtagaactatatttaccc

SEQ ID NO: 561914 - DNA, 3443 bp, Homo sapiens
cccaccttagccgtgggggatagaagagagcgggagggggcggttcccgttccaccgcggagccggatgtttgccgagccttgacaggcgtggcagagggagcagtgcccgagcgcggtttctcttaaggttctgcagggcaaggctgtctgggacaggcttggccatggatccgctctcagagctgcaggatgatctgaccttggatgacaccagcgaggctctgaaccagctgaagctggcctccatcgatgagaagaactggccctcggatgaaatgcctgacttccccaagtcagatgactccaaaagcagctccccggaacttgtcacacacctgaagtgggatgacccatactatgacatcgcccggcaccagatcgtggaggtggcaggagatgacaagtatgggcggaagatcattgtgtttagtgcctgtcgaatgccccccagccaccagctcgaccacagcaagctcctggggtacctgaagcacaccctggaccagtacgtggagagtgactacacacttctgtatctgcaccacggcctgaccagcgacaacaagccctccctcagctggctccgtgatgcctaccgggagtttgaccgcaagtacaagaagaacatcaaggccttgtacatcgtgcatccaaccatgttcatcaaaactctgctcatcctcttcaagcccctcatcagcttcaagttcgggcagaagatcttctatgtgaattacctgagcgagctgagcgagcacgtgaagctggagcagctggggatccctcgccaagtgctcaaatatgacgacttcctgaaatccacacagaagagccccgcgacagcccccaagcccatgcccccacggccccccctgcccaaccagcagtttggagtctcgctgcagcacctccaggagaagaatccagagcaggagcccattcccattgtactcagggagactgttgcctacttacaggcccacgctctcaccaccgagggcatcttccggaggtcggccaacacccaagtggtccgggaagtgcagcagaagtacaacatggggctgcctgtggatttcgaccagtacaatgagctgcacctgccagcagtcatcctcaagaccttcctccgggagcttcctgagcccctgctcacctttgacctctacccccatgtggtgggcttcctcaacattgatgaaagccagagggtgccagcgacactgcaggtcctccagacgctgcccgaggagaactaccaggtgcttcgtttcctgactgctttcctggtgcagatttctgcacacagtgaccagaacaagatgaccaacactaacctggctgttgttttcggccctaacctgctgtgggccaaggatgcggccatcaccctcaaggccattaatcccatcaacaccttcaccaagttccttctggatcaccaaggggagctgttcccaagcccggaccccagcgggctctgaacctggcccctgccccaccagccccttctctggtagcccgggtttggactcttcctcctggcatcaggggccatgaagccccctggagagagatgttggagccacccatcaggcatgctctcccccacctctgtccagcccgcctcacggccctggcggcctcgctgttaccagaagacgtttttctctgccttacacttctcactgcctctctggacaccgggcttttgctgggctctccagagctgggcttggctcttccagctggagaaggactgagccccagtaacccctttcctgctttttcctgcctctgtttccctagcaagtgtggatgaatcaaatgactgccggctgggctggtagcaggggccagtcctcccctcttgattgctgggaatgagcagctgagctctttggtgtggacaccgccccaagctgaggtgcctccctatctggtaggctgccctgctttgcagaagccccactgcatgaaggcctgagtgcaagcacccttgctcctgtactgcccccagcagcgcagtctggggtatttcccctgctgaggagtgacagggctggagactgtgtctgctttctgcctcctcttccacacatcctgggtcagcctttcccaagtgatactgcccctggggtgtcctaaccccttggttgtgcagggactggtagcttggatgacatggctcagagtcccagcatccacttgaaacctccctctccacctccccgcccccgagagctacagcgtgtgatggaatcagtgaccggccaggttagcctctcccctcttggcctcctttcccacacgggcagatcatcagccttcatgttcttgtggacctgtctgttacggagtcacactggcccctgccccagccagaggtgactcagtgcctcaggatcttatggctccttcctccagctgggggactcttaaaggggctggggtagagactaagagtgcccgtaggaggggcagagattgtgctgataggtcagtccagataggtgggttctagcaatttccccaggggattaaggggctctagggccacctttttttttttttttctgagatggagtctcgctctgtcaccaggctggagtgcagtggcgcgatctcggcacacctccgccttctgggttcaagcaattctcctgcctcagcctcctgagtagctgggactataggtgcatgccaccatgcccagctaatttttgtatttttagtagagacggggtttcaccatgttggccaggatggtctcgatctcctgacctcatgatccacccacctcggcctcccaaagtgctgggattccaggcgtgagccactgcgcccggccagccctgttgtctttcaaagaacctcggccccagtgatggctgatctcactcccactgtctcgtagaattacactccttcctggggatccctcttcctgcagccttgtccttggggagtacagggaagtacctgcagtgaccctgcccccatgaccttggccaggcaggatgattccagagcccgtactgtggggatcctcactgaccagcccagccccatccgcaagccaggctgggcctgggcataacttcgctgggctctcccaagaccatcagcagtgcatccagccccctggggcctgggctgctgctggttcttcatcagtcccttggtctctagcctcggccagggctgctctgctctccgccctcctttgtgtatcaagtgtcgctcacagccccattcactggggagcctttcggatctatttggtctttctcatgtcccccactggtctgtaccccagggagcgggtgcttgtactgtgtgaatccagtgttcacattcacacttaatgacttccttggcaccaatcatgtatttcaccgtttgcactttttgtatttcaataaaaatgttgatgcaaaa

SEQ ID NO: 561915 - DNA, 3152 bp, Homo sapiens
cccaccttagccgtgggggatagaagagagcgggagggggcggttcccgttccaccgcggagccggatgtttgccgagccttgacaggcgtggcagagggagcagtgcccgagcgcggtttctcttaaggttctgcagggcaaggctgtctgggacaggcttggccatggatccgctctcagagctgcaggatgatctgaccttggatgacaccagcgaggctctgaaccagctgaagctggcctccatcgatgagaagaactggccctcggatgaaatgcctgacttccccaagtcagatgactccaaaagcagctccccggaacttgtcacacacctgaagtgggatgacccatactatgacatcgcccggcaccagatcgtggaggtggcaggagatgacaagtatgggcggaagatcattgtgtttagtgcctgtcgaatgccccccagccaccagctcgaccacagcaagctcctggggtacctgaagcacaccctggaccagtacgtggagagtgactacacacttctgtatctgcaccacggcctgaccagcgacaacaagccctccctcagctggctccgtgatgcctaccgggagtttgaccgcaagtacaagaagaacatcaaggccttgtacatcgtgcatccaaccatgttcatcaaaactctgctcatcctcttcaagcccctcatcagcttcaagttcgggcagaagatcttctatgtgaattacctgagcgagctgagcgagcacgtgaagctggagcagctggggatccctcgccaagtgctcaaatatgacgacttcctgaaatccacacagaagagccccgcgacagcccccaagcccatgcccccacggccccccctgcccaaccagcagtttggagtctcgctgcagcacctccaggagaagaatccagagcaggagcccattcccattgtactcagggagactgttgcctacttacaggcccacgctctcaccaccgagggcatcttccggaggtcggccaacacccaagtggtccgggaagtgcagcagaagtacaacatggggctgcctgtggatttcgaccagtacaatgagctgcacctgccagcagtcatcctcaagaccttcctccgggagcttcctgagcccctgctcacctttgacctctacccccatgtggtgggcttcctcaacattgatgaaagccagagggtgccagcgacactgcaggtcctccagacgctgcccgaggagaactaccaggtgcttcgtttcctgactgctttcctggtgcagatttctgcacacagtgaccagaacaagatgaccaacactaacctggctgttgttttcggccctaacctgctgtgggccaaggatgcggccatcaccctcaaggccattaatcccatcaacaccttcaccaagttccttctggatcaccaaggggagctgttcccaagcccggaccccagcgggctctgaacctggcccctgccccaccagccccttctctggtagcccgggtttggactcttcctcctggcatcaggggccatgaagccccctggagagagatgttggagccacccatcaggcatgctctcccccacctctgtccagcccgcctcacggccctggcggcctcgctgttaccagaagacgtttttctctgccttacacttctcactgcctctctggacaccgggcttttgctgggctctccagagctgggcttggctcttccagctggagaaggactgagccccagtaacccctttcctgctttttcctgcctcctcttccacacatcctgggtcagcctttcccaagtgatactgcccctggggtgtcctaaccccttggttgtgcagggactggtagcttggatgacatggctcagagtcccagcatccacttgaaacctccctctccacctccccgcccccgagagctacagcgtgtgatggaatcagtgaccggccaggttagcctctcccctcttggcctcctttcccacacgggcagatcatcagccttcatgttcttgtggacctgtctgttacggagtcacactggcccctgccccagccagaggtgactcagtgcctcaggatcttatggctccttcctccagctgggggactcttaaaggggctggggtagagactaagagtgcccgtaggaggggcagagattgtgctgataggtcagtccagataggtgggttctagcaatttccccaggggattaaggggctctagggccacctttttttttttttttctgagatggagtctcgctctgtcaccaggctggagtgcagtggcgcgatctcggcacacctccgccttctgggttcaagcaattctcctgcctcagcctcctgagtagctgggactataggtgcatgccaccatgcccagctaatttttgtatttttagtagagacggggtttcaccatgttggccaggatggtctcgatctcctgacctcatgatccacccacctcggcctcccaaagtgctgggattccaggcgtgagccactgcgcccggccagccctgttgtctttcaaagaacctcggccccagtgatggctgatctcactcccactgtctcgtagaattacactccttcctggggatccctcttcctgcagccttgtccttggggagtacagggaagtacctgcagtgaccctgcccccatgaccttggccaggcaggatgattccagagcccgtactgtggggatcctcactgaccagcccagccccatccgcaagccaggctgggcctgggcataacttcgctgggctctcccaagaccatcagcagtgcatccagccccctggggcctgggctgctgctggttcttcatcagtcccttggtctctagcctcggccagggctgctctgctctccgccctcctttgtgtatcaagtgtcgctcacagccccattcactggggagcctttcggatctatttggtctttctcatgtcccccactggtctgtaccccagggagcgggtgcttgtactgtgtgaatccagtgttcacattcacacttaatgacttccttggcaccaatcatgtatttcaccgtttgcactttttgtatttcaataaaaatgttgatgcaaaa

SEQ ID NO: 561916 - DNA, 3430 bp, Homo sapiens
cccaccttagccgtgggggatagaagagagcgggagggggcggttcccgttccaccgcggagccggatgtttgccgagccttgacaggcgtggcagagggagcagtgcccgagcgcggtttctcttaaggttctgcagggcaaggctgtctgggacaggcttggccatggatccgctctcagagctgcaggatgatctgaccttggatgacaccagcgaggctctgaaccagctgaagctggcctccatcgatgagaagaactggccctcggatgaaatgcctgacttccccaagtcagatgactccaaaagcagctccccggaacttgtcacacacctgaagtgggatgacccatactatgacatcgcccggcaccagatcgtggaggtggcaggagatgacaagtatgggcggaagatcattgtgtttagtgcctgtcgaatgccccccagccaccagctcgaccacagcaagctcctggggtacctgaagcacaccctggaccagtacgtggagagtgactacacacttctgtatctgcaccacggcctgaccagcgacaacaagccctccctcagctggctccgtgatgcctaccgggagtttgaccgcaagtacaagaagaacatcaaggccttgtacatcgtgcatccaaccatgttcatcaaaactctgctcatcctcttcaagcccctcatcagcttcaagttcgggcagaagatcttctatgtgaattacctgagcgagctgagcgagcacgtgaagctggagcagctggggatccctcgccaagtgctcaaatatgacgacttcctgaaatccacacagaagagccccgcgaggagcggaggccatgcaggaggccccctgggaagagaggggcgcggctgcagcacctccaggagaagaatccagagcaggagcccattcccattgtactcagggagactgttgcctacttacaggcccacgctctcaccaccgagggcatcttccggaggtcggccaacacccaagtggtccgggaagtgcagcagaagtacaacatggggctgcctgtggatttcgaccagtacaatgagctgcacctgccagcagtcatcctcaagaccttcctccgggagcttcctgagcccctgctcacctttgacctctacccccatgtggtgggcttcctcaacattgatgaaagccagagggtgccagcgacactgcaggtcctccagacgctgcccgaggagaactaccaggtgcttcgtttcctgactgctttcctggtgcagatttctgcacacagtgaccagaacaagatgaccaacactaacctggctgttgttttcggccctaacctgctgtgggccaaggatgcggccatcaccctcaaggccattaatcccatcaacaccttcaccaagttccttctggatcaccaaggggagctgttcccaagcccggaccccagcgggctctgaacctggcccctgccccaccagccccttctctggtagcccgggtttggactcttcctcctggcatcaggggccatgaagccccctggagagagatgttggagccacccatcaggcatgctctcccccacctctgtccagcccgcctcacggccctggcggcctcgctgttaccagaagacgtttttctctgccttacacttctcactgcctctctggacaccgggcttttgctgggctctccagagctgggcttggctcttccagctggagaaggactgagccccagtaacccctttcctgctttttcctgcctctgtttccctagcaagtgtggatgaatcaaatgactgccggctgggctggtagcaggggccagtcctcccctcttgattgctgggaatgagcagctgagctctttggtgtggacaccgccccaagctgaggtgcctccctatctggtaggctgccctgctttgcagaagccccactgcatgaaggcctgagtgcaagcacccttgctcctgtactgcccccagcagcgcagtctggggtatttcccctgctgaggagtgacagggctggagactgtgtctgctttctgcctcctcttccacacatcctgggtcagcctttcccaagtgatactgcccctggggtgtcctaaccccttggttgtgcagggactggtagcttggatgacatggctcagagtcccagcatccacttgaaacctccctctccacctccccgcccccgagagctacagcgtgtgatggaatcagtgaccggccaggttagcctctcccctcttggcctcctttcccacacgggcagatcatcagccttcatgttcttgtggacctgtctgttacggagtcacactggcccctgccccagccagaggtgactcagtgcctcaggatcttatggctccttcctccagctgggggactcttaaaggggctggggtagagactaagagtgcccgtaggaggggcagagattgtgctgataggtcagtccagataggtgggttctagcaatttccccaggggattaaggggctctagggccacctttttttttttttttctgagatggagtctcgctctgtcaccaggctggagtgcagtggcgcgatctcggcacacctccgccttctgggttcaagcaattctcctgcctcagcctcctgagtagctgggactataggtgcatgccaccatgcccagctaatttttgtatttttagtagagacggggtttcaccatgttggccaggatggtctcgatctcctgacctcatgatccacccacctcggcctcccaaagtgctgggattccaggcgtgagccactgcgcccggccagccctgttgtctttcaaagaacctcggccccagtgatggctgatctcactcccactgtctcgtagaattacactccttcctggggatccctcttcctgcagccttgtccttggggagtacagggaagtacctgcagtgaccctgcccccatgaccttggccaggcaggatgattccagagcccgtactgtggggatcctcactgaccagcccagccccatccgcaagccaggctgggcctgggcataacttcgctgggctctcccaagaccatcagcagtgcatccagccccctggggcctgggctgctgctggttcttcatcagtcccttggtctctagcctcggccagggctgctctgctctccgccctcctttgtgtatcaagtgtcgctcacagccccattcactggggagcctttcggatctatttggtctttctcatgtcccccactggtctgtaccccagggagcgggtgcttgtactgtgtgaatccagtgttcacattcacacttaatgacttccttggcaccaatcatgtatttcaccgtttgcactttttgtatttcaataaaaatgttgatgcaaaa

SEQ ID NO: 561917 - DNA, 136 bp, Homo sapiens
ttcaaacaccgcaatcttcaaaagtgtcaatgtcacaaaagataaggaaagtcacaggaatcgttacaaaccataagagaaataacagagaaataactaaaatgcatttcgaattcctgaacagtaaaaaggacat

SEQ ID NO: 561918 - DNA, 107 bp, Homo sapiens
ggccacttttaaagaaccccttatcaagaattgttggatttgtattggcaattgaccgatcctaccgatgcatttggtcagtttgcagatcggggcagccagtatag

SEQ ID NO: 561919 - DNA, 3020 bp, Homo sapiens
ggctgcaatgagctgagatcacactccagcctgggtgaaggagactctgtctcaaaaaaaaaaagtatgcactgggaccctagcgtggcacctgtcccaccacgcctgctcctgagttgtccattctgtctctgcaagtacaagaagaacatcaaggccttgtacatcgtgcatccaaccatgttcatcaaaactctgctcatcctcttcaagcccctcatcagcttcaagttcgggcagaagatcttctatgtgaattacctgagcgagctgagcgagcacgtgaagctggagcagctggggatccctcgccaagtgctcaaatatgacgacttcctgaaatccacacagaagagccccgcgacagcccccaagcccatgcccccacggccccccctgcccaaccagcagtttggagtctcgctgcagcacctccaggagaagaatccagagcaggagcccattcccattgtactcagggagactgttgcctacttacaggcccacgctctcaccaccgagggcatcttccggaggtcggccaacacccaagtggtccgggaagtgcagcagaagtacaacatggggctgcctgtggattcaggctgtgccgagcttctctcacgctgcccccaccccagggctgcctgtggatttcgaccagtacaatgagctgcacctgccagcagtcatcctcaagaccttcctccgggagcttcctgagcccctgctcacctttgacctctacccccatgtggtgggcttcctcaacattgatgaaagccagagggtgccagcgacactgcaggtcctccagacgctgcccgaggagaactaccaggtgcttcgtttcctgactgctttcctggtgcagatttctgcacacagtgaccagaacaagatgaccaacactaacctggctgttgttttcggccctaacctgctgtgggccaaggatgcggccatcaccctcaaggccattaatcccatcaacaccttcaccaagttccttctggatcaccaaggggagctgttcccaagcccggaccccagcgggctctgaacctggcccctgccccaccagccccttctctggtagcccgggtttggactcttcctcctggcatcaggggccatgaagccccctggagagagatgttggagccacccatcaggcatgctctcccccacctctgtccagcccgcctcacggccctggcggcctcgctgttaccagaagacgtttttctctgccttacacttctcactgcctctctggacaccgggcttttgctgggctctccagagctgggcttggctcttccagctggagaaggactgagccccagtaacccctttcctgctttttcctgcctctgtttccctagcaagtgtggatgaatcaaatgactgccggctgggctggtagcaggggccagtcctcccctcttgattgctgggaatgagcagctgagctctttggtgtggacaccgccccaagctgaggtgcctccctatctggtaggctgccctgctttgcagaagccccactgcatgaaggcctgagtgcaagcacccttgctcctgtactgcccccagcagcgcagtctggggtatttcccctgctgaggagtgacagggctggagactgtgtctgctttctgcctcctcttccacacatcctgggtcagcctttcccaagtgatactgcccctggggtgtcctaaccccttggttgtgcagggactggtagcttggatgacatggctcagagtcccagcatccacttgaaacctccctctccacctccccgcccccgagagctacagcgtgtgatggaatcagtgaccggccaggttagcctctcccctcttggcctcctttcccacacgggcagatcatcagccttcatgttcttgtggacctgtctgttacggagtcacactggcccctgccccagccagaggtgactcagtgcctcaggatcttatggctccttcctccagctgggggactcttaaaggggctggggtagagactaagagtgcccgtaggaggggcagagattgtgctgataggtcagtccagataggtgggttctagcaatttccccaggggattaaggggctctagggccacctttttttttttttttctgagatggagtctcgctctgtcaccaggctggagtgcagtggcgcgatctcggcacacctccgccttctgggttcaagcaattctcctgcctcagcctcctgagtagctgggactataggtgcatgccaccatgcccagctaatttttgtatttttagtagagacggggtttcaccatgttggccaggatggtctcgatctcctgacctcatgatccacccacctcggcctcccaaagtgctgggattccaggcgtgagccactgcgcccggccagccctgttgtctttcaaagaacctcggccccagtgatggctgatctcactcccactgtctcgtagaattacactccttcctggggatccctcttcctgcagccttgtccttggggagtacagggaagtacctgcagtgaccctgcccccatgaccttggccaggcaggatgattccagagcccgtactgtggggatcctcactgaccagcccagccccatccgcaagccaggctgggcctgggcataacttcgctgggctctcccaagaccatcagcagtgcatccagccccctggggcctgggctgctgctggttcttcatcagtcccttggtctctagcctcggccagggctgctctgctctccgccctcctttgtgtatcaagtgtcgctcacagccccattcactggggagcctttcggatctatttggtctttctcatgtcccccactggtctgtaccccagggagcgggtgcttgtactgtgtgaatccagtgttcacattcacacttaatgacttccttggcaccaatcatgtatttcaccgtttgcactttttgtatttcaataaaaatgttgatgcaaaa

SEQ ID NO: 561920 - DNA, 144 bp, Homo sapiens
ggggctccgctcgtcttctctgtcttagggctggtgctggcccttccacggctagggcttccgcgcgtaaagggcctaaacttggatttccccgccccctgggacgggccacaaagaatttggacaaatttttcccgggacaca

SEQ ID NO: 561921 - DNA, 235 bp, Homo sapiens
tgtgccagccgtgatctatgcagtggcgtgtgctgtagtaccagctacttggcaggctgaagtggtaggctgcttgacctaggagtatgagtcaaagctggcaacacagccccggcttatactcttaaaaataaaaacacaagggcataaatagacagcacttggcttgggtgctatgtgtttcgcaatagtatcttaactggctttctaacattcagttccccattagggtttt

SEQ ID NO: 561922 - DNA, 3446 bp, Homo sapiens
  misc_feature (21)..(21): n is a, c, g, or t
  misc_feature (94)..(94): n is a, c, g, or t
  misc_feature (102)..(102): n is a, c, g, or t
  misc_feature (116)..(116): n is a, c, g, or t
gaggaatagggacagggagcntgggagagggaatggtgggggcaggagggcacgcggtggaggtcgcagaaggtgaaaagagcaggtcactganctgccacntgtcttcctctctnccaggtttctcttaaggttctgcagggcaaggctgtctgggacaggcttggccatggatccgctctcagagctgcaggatgatctgaccttggatgacaccagcgaggctctgaaccagctgaagctggcctccatcgatgagaagaactggccctcggatgaaatgcctgacttccccaagtcagatgactccaaaagcagctccccggaacttgtcacacacctgaagtgggatgacccatactatgacatcgcccggcaccagatcgtggaggtggcaggagatgacaagtatgggcggaagatcattgtgtttagtgcctgtcgaatgccccccagccaccagctcgaccacagcaagctcctggggtacctgaagcacaccctggaccagtacgtggagagtgactacacacttctgtatctgcaccacggcctgaccagcgacaacaagccctccctcagctggctccgtgatgcctaccgggagtttgaccgcaagtacaagaagaacatcaaggccttgtacatcgtgcatccaaccatgttcatcaaaactctgctcatcctcttcaagcccctcatcagcttcaagttcgggcagaagatcttctatgtgaattacctgagcgagctgagcgagcacgtgaagctggagcagctggggatccctcgccaagtgctcaaatatgacgacttcctgaaatccacacagaagagccccgcgacagcccccaagcccatgcccccacggccccccctgcccaaccagcagtttggagtctcgctgcagcacctccaggagaagaatccagagcaggagcccattcccattgtactcagggagactgttgcctacttacaggcccacgctctcaccaccgagggcatcttccggaggtcggccaacacccaagtggtccgggaagtgcagcagaagtacaacatggggctgcctgtggatttcgaccagtacaatgagctgcacctgccagcagtcatcctcaagaccttcctccgggagcttcctgagcccctgctcacctttgacctctacccccatgtggtgggcttcctcaacattgatgaaagccagagggtgccagcgacactgcaggtcctccagacgctgcccgaggagaactaccaggtgcttcgtttcctgactgctttcctggtgcagatttctgcacacagtgaccagaacaagatgaccaacactaacctggctgttgttttcggccctaacctgctgtgggccaaggatgcggccatcaccctcaaggccattaatcccatcaacaccttcaccaagttccttctggatcaccaaggggagctgttcccaagcccggaccccagcgggctctgaacctggcccctgccccaccagccccttctctggtagcccgggtttggactcttcctcctggcatcaggggccatgaagccccctggagagagatgttggagccacccatcaggcatgctctcccccacctctgtccagcccgcctcacggccctggcggcctcgctgttaccagaagacgtttttctctgccttacacttctcactgcctctctggacaccgggcttttgctgggctctccagagctgggcttggctcttccagctggagaaggactgagccccagtaacccctttcctgctttttcctgcctctgtttccctagcaagtgtggatgaatcaaatgactgccggctgggctggtagcaggggccagtcctcccctcttgattgctgggaatgagcagctgagctctttggtgtggacaccgccccaagctgaggtgcctccctatctggtaggctgccctgctttgcagaagccccactgcatgaaggcctgagtgcaagcacccttgctcctgtactgcccccagcagcgcagtctggggtatttcccctgctgaggagtgacagggctggagactgtgtctgctttctgcctcctcttccacacatcctgggtcagcctttcccaagtgatactgcccctggggtgtcctaaccccttggttgtgcagggactggtagcttggatgacatggctcagagtcccagcatccacttgaaacctccctctccacctccccgcccccgagagctacagcgtgtgatggaatcagtgaccggccaggttagcctctcccctcttggcctcctttcccacacgggcagatcatcagccttcatgttcttgtggacctgtctgttacggagtcacactggcccctgccccagccagaggtgactcagtgcctcaggatcttatggctccttcctccagctgggggactcttaaaggggctggggtagagactaagagtgcccgtaggaggggcagagattgtgctgataggtcagtccagataggtgggttctagcaatttccccaggggattaaggggctctagggccacctttttttttttttttctgagatggagtctcgctctgtcaccaggctggagtgcagtggcgcgatctcggcacacctccgccttctgggttcaagcaattctcctgcctcagcctcctgagtagctgggactataggtgcatgccaccatgcccagctaatttttgtatttttagtagagacggggtttcaccatgttggccaggatggtctcgatctcctgacctcatgatccacccacctcggcctcccaaagtgctgggattccaggcgtgagccactgcgcccggccagccctgttgtctttcaaagaacctcggccccagtgatggctgatctcactcccactgtctcgtagaattacactccttcctggggatccctcttcctgcagccttgtccttggggagtacagggaagtacctgcagtgaccctgcccccatgaccttggccaggcaggatgattccagagcccgtactgtggggatcctcactgaccagcccagccccatccgcaagccaggctgggcctgggcataacttcgctgggctctcccaagaccatcagcagtgcatccagccccctggggcctgggctgctgctggttcttcatcagtcccttggtctctagcctcggccagggctgctctgctctccgccctcctttgtgtatcaagtgtcgctcacagccccattcactggggagcctttcggatctatttggtctttctcatgtcccccactggtctgtaccccagggagcgggtgcttgtactgtgtgaatccagtgttcacattcacacttaatgacttccttggcaccaatcatgtatttcaccgtttgcactttttgtatttcaataaaaatgttgatgcaaaa

SEQ ID NO: 561923 - DNA, 121 bp, Homo sapiens
  misc_feature (34)..(34): n is a, c, g, or t
catcgagctcggtaccagaaggactgacgggagntggcgatatacgttcaaaaagtatctggccaattttggcgctgtcatgaatagggccttggccatgctgctctttctgaaattttag

SEQ ID NO: 561924 - DNA, 3761 bp, Homo sapiens
cccaccttagccgtgggggatagaagagagcgggagggggcggttcccgttccaccgcggagccggatgtttgccgagccttgacaggcgtggcagagggagcagtgcccgagcgcggtttctcttaaggttctgcagggcaaggctgtctgggacaggcttggccatggatccgctctcagagctgcaggatgatctgaccttggatgacaccagcgaggctctgaaccagctgaagctggcctccatcgatgagaagaactggccctcggatgaaatgcctgacttccccaagtcagatgactccaaaagcagctccccggaacttgtcacacacctgaagtgggatgacccatactatgacatcgcccggcaccagatcgtggaggtggcaggagatgacaagtatgggcggaagatcattgtgtttagtgcctgtcgaatgccccccagccaccagctcgaccacagcaagctcctggggtacctgaagcacaccctggaccagtacgtggagagtgactacacacttctgtatctgcaccacggcctgaccagcgacaacaagccctccctcagctggctccgtgatgcctaccgggagtttgaccgcaagtacaagaagaacatcaaggccttgtacatcgtgcatccaaccatgttcatcaaaactctgctcatcctcttcaagcccctcatcagcttcaagttcgggcagaagatcttctatgtgaattacctgagcgagctgagcgagcacgtgaagctggagcagctggggatccctcgccaagtgctcaaatatgacgacttcctgaaatccacacagaagagccccgcgacagcccccaagcccatgcccccacggccccccctgcccaaccagcagtttggagtctcgctgcagcacctccaggagaagaatccagagcaggagcccattcccattgtactcagggagactgttgcctacttacaggcccacgctctcaccaccgagggcatcttccggaggtcggccaacacccaagtggtccgggaagtgcagcagaagtacaacatggggctgcctgtggatttcgaccagtacaatgagctgcacctgccagcagtcatcctcaagaccttcctccgggagcttcctgagcccctgctcacctttgacctctacccccatgtggtgggcttcctcaacattgatgaaagccagagggtgccagcgacactgcaggtcctccagacgctgcccgaggagaactaccaggtgcttcgtttcctgactgctttcctggtgcagatttctgcacacagtgaccagaacaagatgaccaacactaacctggctgttgttttcggccctaacctgctgtgggccaaggatgcggccatcaccctcaaggccattaatcccatcaacaccttcaccaagttccttctggatcaccaaggggagctgttcccaagcccggaccccagcgggctctgaacctggcccctgccccaccagccccttctctggtagcccgggtttggactcttcctcctggcatcaggggccatgaagccccctggagagagatgttggagccacccatcaggcatgctctcccccacctctgtccagcccgcctcacggccctggcggcctcgctgttaccagaagacgtttttctctgccttacacttctcactgcctctctggacaccgggcttttgctgggctctccagagctgggcttggctcttccagctggagaaggactgagccccagtaacccctttcctgctttttcctgcctctgtttccctagcaagtgtggatgaatcaaatgactgccggctgggctggtagcaggggccagtcctcccctcttgattgctgggaatgagcagctgagctctttggtgtggacaccgccccaagctgaggtgcctccctatctggtaggctgccctgctttgcagaagccccactgcatgaaggcctgagtgcaagcacccttgctcctgtactgcccccagcagcgcagtctggggtatttcccctgctgaggagtgacagggctggagactgtgtctgctttctgcctcctcttccacacatcctgggtcagcctttcccaagtgatactgcccctggggtgtcctaaccccttggttgtgcagggactggtagcttggatgacatggctcagagtcccagcatccacttgaaacctccctctccacctccccgcccccgagagctacagcgtgtgatggaatcagtgaccggccaggttagcctctcccctcttggcctcctttcccacacgggcagatcatcagccttcatgttcttgtggacctgtctgttacggagtcacactggcccctgccccagccagaggtgactcagtgcctcaggatcttatggctccttcctccagctgggggactcttaaaggggctggggtagagactaagagtgcccgtaggaggggcagagattgtgctgataggtcagtccagataggtgggttctagcaatttccccaggggattaaggggctctagggccacctttttttttttttttctgagatggagtctcgctctgtcaccaggctggagtgcagtggcgcgatctcggcacacctccgccttctgggttcaagcaattctcctgcctcagcctcctgagtagctgggactataggtgcatgccaccatgcccagctaatttttgtatttttagtagagacggggtttcaccatgttggccaggatggtctcgatctcctgacctcatgatccacccacctcggcctcccaaagtgctgggattccaggcgtgagccactgcgcccggccagccctgttgtctttcaaagaacctcggccccagtgatggctgatctcactcccactgtctcgtagaattacactccttcctggggatccctcttcctgcagccttgtccttggggagtacagggaagtacctgcagtgaccctgcccccatgaccttggccaggcaggatgattccagagcccgtactgtggggatcctcactgaccagcccagccccatccgcaagccaggctgggcctgggcataacttcgctgggctctcccaagaccatcagcagtgcatccagccccctggggcctgggctgctgctggttcttcatcagtcccttggtctctagcctcggccagggctgctctgctctccgccctcctttgtgtatcaagtgtcgctcacagccccattcactggggagcctttcggatctatttggtctttctcatgtcccccactggtctgtaccccagggagcgggtgcttgtactgtgtgaatccagtgttcacattcacacttaatgacttccttggcaccaatcatgtatttcaccgtttgcactttttgtatttcaataaaaatgttgatgcaaaaaaaagaaatatgatatgcaatgaaatcaaaaaggtttagaaaaatatagacgagaacatggtacgagtccactgcggccagactgttcacccttcggacactctatgtcgagcgtcctctggcatactcttgtactgttccgccgctttccctgtcacactctggactcccttccccactccacactccccactgcctttcgtcctactactgcctgtctccctcacctccgcgttctataagcccgcccccttttctcgcctcctccgcccgctctgccccgcacgccctcgcgcgcgtccttcgcggcacgctctc

SEQ ID NO: 561925 - DNA, 511 bp, Homo sapiens
atcagggtaataaactttcccaaacatatctgttcctgccactccaaaggcacatttatcttaatagtatataacatatattaaaattatatatttaaaatagattaaaataaatgatttaagtttacaattgtgtggaaaaatgactttttcttaagctaggtccttttgtcaaaacatattgttcattagtagaaatatattgttacgtaagcagtaactaaatcatccttttatattactcagttgcaatgaggtagttctaagcaagctgattgccaaggttgccctaccatacagaaattctgaagtcggggggtgacctcatgaaatcatgcgagaacctaattactgaaccaccacctatagcttggttatcaaagattgtttatggaaaagaatagacaaggaagaaggaatacccacttgaccatgacttggcaaagagtttcaagagagggcataatcaaaagtaaccaatcatgtggaaaagtcaagtaagactaactta

SEQ ID NO: 561926 - DNA, 1723 bp, Homo sapiens
  misc_feature (7)..(7): n is a, c, g, or t
ttagagntcccgacagaggtgggggagagcatgcctgatggggtggcttcaacatctctctccagggggcttaatggcccctgatgccaggaggaagagtcaaacccggctaccagagaaggggctggtggggcagggccagtcctcccctcttgattgctgggaatgagcagctgagctctttggtgtggacaccgccccaagctgaggtgcctccctatctggtaggctgccctgctttgcagaagccccactgcatgaaggcctgagtgcaagcacccttgctcctgtactgcccccagcagcgcagtctggggtatttcccctgctgaggagtgacagggctggagactgtgtctgctttctgcctcctcttccacacatcctgggtcagcctttcccaagtgatactgcccctggggtgtcctaaccccttggttgtgcagggactggtagcttggatgacatggctcagagtcccagcatccacttgaaacctccctctccacctccccgcccccgagagctacagcgtgtgatggaatcagtgaccggccaggttagcctctcccctcttggcctcctttcccacacgggcagatcatcagccttcatgttcttgtggacctgtctgttacggagtcacactggcccctgccccagccagaggtgactcagtgcctcaggatcttatggctccttcctccagctgggggactcttaaaggggctggggtagagactaagagtgcccgtaggaggggcagagattgtgctgataggtcagtccagataggtgggttctagcaatttccccaggggattaaggggctctagggccacctttttttttttttttctgagatggagtctcgctctgtcaccaggctggagtgcagtggcgcgatctcggcacacctccgccttctgggttcaagcaattctcctgcctcagcctcctgagtagctgggactataggtgcatgccaccatgcccagctaatttttgtatttttagtagagacggggtttcaccatgttggccaggatggtctcgatctcctgacctcatgatccacccacctcggcctcccaaagtgctgggattccaggcgtgagccactgcgcccggccagccctgttgtctttcaaagaacctcggccccagtgatggctgatctcactcccactgtctcgtagaattacactccttcctggggatccctcttcctgcagccttgtccttggggagtacagggaagtacctgcagtgaccctgcccccatgaccttggccaggcaggatgattccagagcccgtactgtggggatcctcactgaccagcccagccccatccgcaagccaggctgggcctgggcataacttcgctgggctctcccaagaccatcagcagtgcatccagccccctggggcctgggctgctgctggttcttcatcagtcccttggtctctagcctcggccagggctgctctgctctccgccctcctttgtgtatcaagtgtcgctcacagccccattcactggggagcctttcggatctatttggtctttctcatgtcccccactggtctgtaccccagggagcgggtgcttgtactgtgtgaatccagtgttcacattcacacttaatgacttccttggcaccaatcatgtatttcaccgtttgcactttttgtatttcaataaaaatgttgatgcaaaa

SEQ ID NO: 561927 - DNA, 238 bp, Homo sapiens
cgccttcatgttttgtacttgcctttcctccaactggaaaactccacatttatctccataggcttactccttcgagttcctttagaatgtctggtcaagatgaggctcaagaaatcactatgatcatgctctacaaaatagtgcccccaccattttcttatccctcctaaccttgctttatttttttcactcccaacattattttattctttttgatcactgcggtaaaagcttggtg

SEQ ID NO: 561928 - DNA, 4234 bp, Homo sapiens
  misc_feature (4188)..(4188): n is a, c, g, or t
cccaccttagccgtgggggatagaagagagcgggagggggcggttcccgttccaccgcggagccggatgtttgccgagccttgacaggcgtggcagagggagcagtgcccgagcgcggtttctcttaaggttctgcagggcaaggctgtctgggacaggcttggccatggatccgctctcagagctgcaggatgatctgaccttggatgacaccagcgaggctctgaaccagctgaagctggcctccatcgatgagaagaactggccctcggatgaaatgcctgacttccccaagtcagatgactccaaaagcagctccccggaacttgtcacacacctgaagtgggatgacccatactatgacatcgcccggcaccagatcgtggaggtggcaggagatgacaagtatgggcggaagatcattgtgtttagtgcctgtcgaatgccccccagccaccagctcgaccacagcaagctcctggggtacctgaagcacaccctggaccagtacgtggagagtgactacacacttctgtatctgcaccacggcctgaccagcgacaacaagccctccctcagctggctccgtgatgcctaccgggagtttgaccgcaagtacaagaagaacatcaaggccttgtacatcgtgcatccaaccatgttcatcaaaactctgctcatcctcttcaagcccctcatcagcttcaagttcgggcagaagatcttctatgtgaattacctgagcgagctgagcgagcacgtgaagctggagcagctggggatccctcgccaagtgctcaaatatgacgacttcctgaaatccacacagaagagccccgcgacagcccccaagcccatgcccccacggccccccctgcccaaccagcagtttggagtctcgctgcagcacctccaggagaagaatccagagcaggagcccattcccattgtactcagggagactgttgcctacttacaggcccacgctctcaccaccgagggcatcttccggaggtcggccaacacccaagtggtccgggaagtgcagcagaagtacaacatggggctgcctgtggatttcgaccagtacaatgagctgcacctgccagcagtcatcctcaagaccttcctccgggagcttcctgagcccctgctcacctttgacctctacccccatgtggtgggcttcctcaacattgatgaaagccagagggtgccagcgacactgcaggtcctccagacgctgcccgaggagaactaccaggtgcttcgtttcctgactgctttcctggtgcagatttctgcacacagtgaccagaacaagatgaccaacactaacctggctgttgttttcggccctaacctgctgtgggccaaggatgcggccatcaccctcaaggccattaatcccatcaacaccttcaccaagttccttctggatcaccaaggggagctgttcccaagcccggaccccagcgggctctgaacctggcccctgccccaccagccccttctctggtagcccgggtttggactcttcctcctggcatcaggggccatgaagccccctggagagagatgttggagccacccatcaggcatgctctcccccacctctgtccagcccgcctcacggccctggcggcctcgctgttaccagaagacgtttttctctgccttacacttctcactgcctctctggacaccgggcttttgctgggctctccagagctgggcttggctcttccagctggagaaggactgagccccagtaacccctttcctgctttttcctgcctctgtttccctagcaagtgtggatgaatcaaatgactgccggctgggctggtagcaggggccagtcctcccctcttgattgctgggaatgagcagctgagctctttggtgtggacaccgccccaagctgaggtgcctccctatctggtaggctgccctgctttgcagaagccccactgcatgaaggcctgagtgcaagcacccttgctcctgtactgcccccagcagcgcagtctggggtatttcccctgctgaggagtgacagggctggagactgtgtctgctttctgcctcctcttccacacatcctgggtcagcctttcccaagtgatactgcccctggggtgtcctaaccccttggttgtgcagggactggtagcttggatgacatggctcagagtcccagcatccacttgaaacctccctctccacctccccgcccccgagagctacagcgtgtgatggaatcagtgaccggccaggttagcctctcccctcttggcctcctttcccacacgggcagatcatcagccttcatgttcttgtggacctgtctgttacggagtcacactggcccctgccccagccagaggtgactcagtgcctcaggatcttatggctccttcctccagctgggggactcttaaaggggctggggtagagactaagagtgcccgtaggaggggcagagattgtgctgataggtcagtccagataggtgggttctagcaatttccccaggggattaaggggctctagggccacctttttttttttttttctgagatggagtctcgctctgtcaccaggctggagtgcagtggcgcgatctcggcacacctccgccttctgggttcaagcaattctcctgcctcagcctcctgagtagctgggactataggtgcatgccaccatgcccagctaatttttgtatttttagtagagacggggtttcaccatgttggccaggatggtctcgatctcctgacctcatgatccacccacctcggcctcccaaagtgctgggattccaggcgtgagccactgcgcccggccagccctgttgtctttcaaagaacctcggccccagtgatggctgatctcactcccactgtctcgtagaattacactccttcctggggatccctcttcctgcagccttgtccttggggagtacagggaagtacctgcagtgaccctgcccccatgaccttggccaggcaggatgattccagagcccgtactgtggggatcctcactgaccagcccagccccatccgcaagccaggctgggcctgggcataacttcgctgggctctcccaagaccatcagcagtgcatccagccccctggggcctgggctgctgctggttcttcatcagtcccttggtctctagcctcggccagggctgctctgctctccgccctcctttgtgtatcaagtgtcgctcacagccccattcactggggagcctttcggatctatttggtctttctcatgtcccccactggtctgtaccccagggagcgggtgcttgtactgtgtgaatccagtgttcacattcacacttaatgacttccttggcaccaatcatgtatttcaccgtttgcactttttgtatttcaataaaaatgttgatgcaaaactgctcatctggatgttggggaaatgagttgggtgtggaagttggaaactggatgggaagtgtggtgcggtggaggaagaggaacagatggggcctcaggaagtcccctccccagtccgtctgccgcttcctcatcttgtgcactcgagtggtgatgagggcagcttcctgaccagcttctaggcatggaggtgtccacggccaccttcccgttgtttgtacccccagcattccagcaggccaccatgtgctgcatcctatgaccagggcctctcctgtttcccaactggaaggtaccggaagtttgaagggatcttagatttatctaaggcaagcagggggaagaaaagtggtgtggactgtgatggacaatggtgtgggatctggagtcacacgagagtttgagtcctcgttccctcacgtgccagctctcaccgctaacagtcatcatcactggctcaccacccctgtggctgctgcttcatcagaagacggttcctttgaggatcagaaataatgcagacaccccaggcacgtggctcacacctgtaatcccaccactttgggaggcagagacaggaggattgcttgagcccaggagttcgagaccagcctggacatagttagatctcacatagtaagatcctgtcatagtggtcaggttccaggtgtctgctgcttgcttgctaatggcaatcaggaggctatagcggcccagtgggcctggttttctctccctgctgtncgggtgggggagcagggccagagcgcagatccgaggggtcacgagg

SEQ ID NO: 561929 - DNA, 693 bp, Homo sapiens
  misc_feature (3)..(3): n is a, c, g, or t
gcntaggcatcaaaggtaattcccattcggctaagagacacaaggtcgggcacagtggctcccaaagtgctgggattccaggcgtgagccactgcgcccggccagccctgttgtctttcaaagaacctcggccccagtgatggctgatctcactcccactgtctcgtagaattacactccttcctggggatccctcttcctgcagccttgtccttggggagtacagggaagtacctgcagtgaccctgcccccatgaccttggccaggcaggatgattccagagcccgtactgtggggatcctcactgaccagcccagccccatccgcaagccaggctgggcctgggcataacttcgctgggctctcccaagaccatcagcagtgcatccagccccctggggcctgggctgctgctggttcttcatcagtcccttggtctctagcctcggccagggctgctctgctctccgccctcctttgtgtatcaagtgtcgctcacagccccattcactggggagcctttcggatctatttggtctttctcatgtcccccactggtctgtaccccagggagcgggtgcttgtactgtgtgaatccagtgttcacattcacacttaatgacttccttggcaccaatcatgtatttcaccgtttgcactttttgtatttcaataaaaatgttgatgcaaaa

SEQ ID NO: 561930 - DNA, 322 bp, Homo sapiens
  misc_feature (319)..(319): n is a, c, g, or t
taatttgagtttgttgtgtagattctggatattagtagtcctttgtcagatgtacagattatgaagattttctcccactctgtgtctgctctgtttactctgctgactgttccttttgccatgcaaaagcgtctttagtttaattaagtcccagctatttatctttgtttttactgcaattgcttttgggtccttagtcatgaaatccttgcctaagccaatgtctagaagggtttttccaatgttatcttctagaatttttatagtttcaggtcttagatttaagtccatgatccatctctagttgatttttattatnata

SEQ ID NO: 561931 - DNA, 748 bp, Homo sapiens
cccaccttagccgtgggggatagaagagagcgggagggggcggttcccgttccaccgcggagccggatgtttgccgagccttgacaggcgtggcagagggagcagtgcccgagcgcggtttctcttaaggttctgcagggcaaggctgtctgggacaggcttggccatggatccgctctcagagctgcaggatgatctgaccttggatgacaccagcgaggctctgaaccagctgaagctggcctccatcgatgagaagaactggccctcggatgaaatgcctgacttccccaagtcagatgactccaaaagcagctccccggaacttgtcacacacctgaagtgggatgacccatactatgacatcgcccggcaccagatcgtggaggtggcaggagatgacaagtatgggcggaagatcattgtgtttagtgcctgtcgaatgccccccagccaccagctcgaccacagcaagctcctggggtacctgaagcacaccctggaccagtacgtggagagtgactacacacttctgtatctgcaccacggcctgaccagcgacaacaagccctccctcagctggctccgtgatgcctaccgggagtttgaccgcaagtacaagaagaacatcaaggccttgtactgtgtgaatccagtgttcacattcacacttaatgacttccttggcaccaatcatgtatttcaccgtttgcactttttgtatttcaataaaaatgttgatgcaaaa

SEQ ID NO: 561932 - DNA, 157 bp, Homo sapiens
gagtacggaatgtgaagatgaaagtaggcataacgactcttacatccaggcacatgtcccccgcatcattccttgaagaagcgcagatcatgtaaggaagctgaatgcacgacaatgctggtccagtctcgatgcccagttggtgttctgagtgagc

SEQ ID NO: 561933 - DNA, 1167 bp, Homo sapiens
ggatgccaggaattccaacgaccgtgccccgggaacttgtgaagggcacgaatgtgcccggcgggggtacagggaattataccgaagtgtttcaggcgaatacgggaaataccacgtgtttactctgatccagggtcttaaggggctcctcaatggttaagtgctgtaaccaccatattgacgcgtagcaatttgatcctttgttcatctatagtagataggcctagcgaacttgggtcaaacaccgtgctccccggtacggtttcctcgcgggattccggtaaattaaacaaccgttttccttgggcaaatagcgcattgtgaaactgagttgttagactcgtggtagagggtagcattaccagttagctagttcatgcgagagcccttcgatttcggaatatgactggggggcccattccttgcgcgcgctttggctatcaccacagcatagcaggtgtccgcattgaactctaagctgcaatcagcatctgacgtccaagtactggggagccttcactgcaatgaagaatgtacacgtggacgtcagacagatttgcacggctatcaccagttgcttggaagtagtgattctgcaggaaagaactagtctttgggactcgtgatgccttattaccaccagagacttctccatgtcggtccactagccgaccggctattgggacgacattgagattacgctttatcggtacggtgttatccgctgatcaggctctacaaagtactgaagttatactcgcagaatactacactaccaagttcccgtgcagagtctgctacgtgctaaagctgtttgatcggatacagtgaagctcacaagatcaagcaagtagagtccctagagttatgtgaacgcatctgcagatgccgaggggcggcagcgccacgtaacattggatccaagggcccctcacccaagctgtgatgtccccaggctcagctataacatgtaccgcaccagaaacttgaactcagtaccttgacaaccgatggggacttcgatctggaggacacaatggaacagtagcgcggcgtgtaggaggagctcactgggccggaccaatggacagtcagtcggatcccgacgcacaatcgtgaccccgcgaacctctcaatcttcagcttcttcatcttcaccgagagtac

SEQ ID NO: 561934 - DNA, 342 bp, Homo sapiens
tggtctgggtgtagaagggcacgggaggtgtgaggttgtggcagcacagccgcttgcgccccgccagcgggccgagcctggagcttacggccagggctgaggcctggcatgcctggtaggcctgagagcccacctgtgttccgcagccaggaggtggtggggacaatgtgccccgtgcccgcttgaagctaacagcaacgtccatatgtggaagaagattagcatcacagagcgaagctgcgatggagcagcagggctcccagaagtatctggcgaatcgtctttcggtacccccggggtccgaggtagcctccctttaacaggctgagaagagcacagggc

SEQ ID NO: 561935 - DNA, 1470 bp, Homo sapiens
  misc_feature (344)..(344): n is a, c, g, or t
  misc_feature (368)..(368): n is a, c, g, or t
  misc_feature (416)..(416): n is a, c, g, or t
  misc_feature (912)..(912): n is a, c, g, or t
ggctcatcttgcttatcatcacccgtgtgatgctcgctacgctggagcgcctgacggcctcgccgtacgttcactgattgtacacgcactgagtctgctctcgcttccccttactggagtccgcacataggtttgaggatatcacaagaatccgctaggatccctgaaagtatcctgagatattgcaatcccttctactggcctctcgaagcatatcgaccatccatgatgctagagcaacttgaatatgacataggactatcacactataggctttcctcgtcgtgactctcgtcgtgggacgcgatctcacactttagttgacctcgccttgaagagtgccntctcgctttgaagagtcgcgccantctgcttggcgcgtcatacatagggtatcccttgcgccgagtaggaancgtcctttggagaccgttatgggcagtgctacatgagtatgagagtaccgccctcaagaacgtcagattctcgatagcgccccccattgcaccagaagagcatcgattgacagcgctgatcgctcgcgtctctccattgctaatcttagtacccaccatcactggacgggcaatttagattttcacttagagcacatacgcctgcacgaattcaatgcacgtcaactgaacagaccatcaatggagccattaaccccattcgggcgtcgattgttgccaataacttactttctagttccaaggggccatcgaattaggggcccctctgcttacgatgtaagcgaggtcgcactttcggtcgaattcccggaaatatccctccgccttgcaaaaagcgatgttcaagccgagccgccataggtttcaattctgcttcctacttaatagttcctggctcttcagaggggaagccaccatttgtcactcgaggttcccnatacgagttttaactcggaattatctctggggggctttaaggacatatagacctacgaactatggataaccggagaacacacggccagaggtacattcgaggggtccaggcatctacggagtcaataatcacccttgcgttcgtcccacgggcgggaccttttcggatacaattctttctctaaggatcttcggcgaatctttcacacttacaggggttgccttttgcattggaacggtttccttagggcaatgggccctatgggtcttaagaggccttcagcgcggtaaattctctccacaccaagcattagtgggtaaaacccctaaccttgggtgacagacaaccttccttcattgtggcggaaagggaaacttcagcttacttaccttgccctggagttcgacatattaattccacctttcatcccttgagtaatatcggggggtaggtttctaggccatagtacccattaagggttccaccacagaggccattaataatgtataaccccttcgtgtgaccatttaattttacggcacacagacatccacattg

SEQ ID NO: 561936 - DNA, 318 bp, Homo sapiens
tagaagcttgagaatggcatgtcttctgaaaaacaaagtttattaaaatattagtttgtgacttagataactcattcttaagaaagcaggaatgtggcagcaagggtagaaacaaacatagaagacaatgcttaataaagaagaaaatatttgggcagggcacggtggctcatgcctgtaatctcagcaccttgggaggccaaggcaggcggatcattaggtcaagagatcgagaccatcctagccaacatggtgaaaccccatctctactaaaaatacgaaaattagctgggcatggtgcacacccgcagtcccagc

SEQ ID NO: 561937 - DNA, 357 bp, Homo sapiens
tatttcctgggcatctaaatagaattccaagtctttcaatcgattaggatttgaatggtcaatcaataccaccgtccccattgcacctttacaaacgattgtccacataaagtcaaaacggtcttgaccaggtgtactgtaaagaccaatcttggtaccatcttctaaactgatttcaccgtaatcaattccgacagtggttaaatatttactatgtgcatctaaatctgtatttacagcttcagtgctaacaactggaatatctgatagggatttaattgccgcagttttacctgcccccatcgttccaccaaaaacaattttgtattgttgaagaatcataaaaatgccacataa

SEQ ID NO: 561938 - DNA, 309 bp, Homo sapiens
cgcgagtgtcccggtctagtgcgcaactaggacaaggtttgtgccgcttggtccccgctggcctctcggctggatccagcaattggtcccctcctgggacgcaggctggatcctgcatgtgacctcctgcgcactccaggtcctcagggatcttcttggtgctcctggtattctgggtctccctggcctcaagaggtgaacgtggtctaccaggtgtggctggtgctgtgggtgaacctggtcctctgggcattgccggccctcctggggcccgtggtcctcctggtgctgtgggtcgtcctggagtct

SEQ ID NO: 561939 - DNA, 235 bp, Homo sapiens
gtggtagtctttcacttataattctgagatcacccatgttattagttcattttttttttattgctgagtagtattctattatgtggatataccacaatttgtttatgcattcacctcttaatgcttggtggcatttgggttatttccagttttgggctattaccagtaaagttgctatgaacattgtatggatatacgcttttttttctcttggctaagctttataatgtgatag

SEQ ID NO: 561940 - DNA, 165 bp, Homo sapiens
caaattatccctgtttgcagatgacatgattgtatatttagaaaaccccatcgtctcagcccaaaatctccttaagctgataaggaacttcagcaaagtctcaggatacaaaatgaatctgcatcaatctacacggaccatacacagtgcacaaactgaaatgag

SEQ ID NO: 561941 - DNA, 621 bp, Homo sapiens
ggacgcgctgggtcgacccacgcgatcgcatgattgacgagctcaaccaggccatcgcaaagtgcatggaggaccggggggtggatcgcacattgaactagaccgagcggggcatcaaaggcaatgcgcagcatgggacgctgcatagtcaaagcacatgccagagaccctggaatgactcagggaaggaggaaaccgagccagaggtgcgttgcaagcgaccgtctaccgagcgtggaccctaaggccaagcagagcacagtgacatccgtcgtgtatgaaaaggtagaggttatgcacactcggggacgtgagggggaaggatcgcagcataagatccactgacaggtgaacatgaacaatacataagtggcacggctccaatcaagcgcacgaagtaccaaggaacaacaaccgcgaaaagtcggacaagtacgagaacacgccaaacctccccacgaaatggaagaggcacgggacaacggcgaaacagaaatatcaacacgcaaggaagtgagaatagagtccaatgcaatcgatccgaggaacgcggaacgcaggagaacacgcacacgccacacagaacacgcagaaaccataaaacaacacgaaaaccagaaa

SEQ ID NO: 561942 - DNA, 490 bp, Homo sapiens
gtcattaagtgcaaatacattgacctagtgaaaccaactatctagaacagggtgtccaacacagtagccatcagtcacatgtagctactgagaatgtgaaagggggctaatgcacacagcagatggagacaggaaggcaggggagtaaagattttttctttttttttcttggagatggagtctggcctggtcgcacaggctggagtgcaagggcgcaatttccactcagtgcaacctctgcctcccgggttcaagcgattctcctgcctcagcctcccgagtagcttggatgacaagtgccagccaccaggcccggctaatttttggtatctttagtagagacaggctttcaccatttgggccaggatggtctggatctctggactccatcatccgcccgcctggacttcccaaagtgtggggattacaggcttgagccaccgcatctggcccatatctggcctttaaaaaaaatagctttatcgagata

SEQ ID NO: 561943 - DNA, 887 bp, Homo sapiens
gggaacccgagatctgcgcacggggttcccatatagacacgatatctctcacactcacctttcaaacctaaactcgagcctacatgtaccaccggccatagcattgctctcgccatggctctcagcgatgctgacgatgcaaaagcagataaagcatatgatggctttcattgcacaagaagccaatgagaaagccagcacagcaactcagatgcccacaggcagcaagcaagagttccaacatagcagcaaaggtcggattcgtgccaacccccaacgcactcaaagcatctcatggcacacatacatcgcagcaagcacccgcagcaaacaagacttgacgccaggacagcacacgacaaaatacaaagaatagatacccacatcaagcactgaaaatccaacgcgcacgcacactcacgcagatcgccttcacgacagcaacggcagaatggaccgttaatccaacaagaacccgtcaccaccaactcgacaagccaaaccaaaagcacgaaccacaacgcacaaggccaggaataacacaagaactaaacaacaccacgagaacacccacaagctgaccgccaatggacggagggacacatggaaacataccaacgacaacaaaggtaacaccacagagcccaggacagacccccaaacacagaaaagatacggaaaagcacaaaaccaaacacagcactaaacaccaatacttggctaaacagggcacgcaacagcagaaacaaaaaaggacaacaagccctaactgatacccaaacacattagacacacccacacaaccaacagagagaggcatgaatcccacaaactaagaacacacacgagctcacctaaacactaacactatcaagaacaactaaact

SEQ ID NO: 561944 - DNA, 638 bp, Homo sapiens
  misc_feature (363)..(363): n is a, c, g, or t
  misc_feature (365)..(365): n is a, c, g, or t
  misc_feature (371)..(371): n is a, c, g, or t
  misc_feature (385)..(385): n is a, c, g, or t
  misc_feature (529)..(529): n is a, c, g, or t
  misc_feature (562)..(562): n is a, c, g, or t
  misc_feature (581)..(581): n is a, c, g, or t
  misc_feature (616)..(616): n is a, c, g, or t
  misc_feature (627)..(627): n is a, c, g, or t
tcttatattctactttattggggaaaactcaaaaactaacaattcacatcctcccaccttcttctttccgaagaaggcagtttgcaaaaacaaaagggctggggcgtggggatcatccaccatctccagggtttacacccaggctacccatggctgggcagtcaggcctctaggcctgaggctctcagaggcagtaaaagaaaagttaaaggaaggtgtcacctaacaaaacaaggaaacccgcctaaccctgttccccactacccacaactccctacactgcgcaatctaaataaaaagaggacaaggcatgagtgggagatacacatacacacacacacatacacacacacacacgacagntncctttnagccaaagaactgnaaaatccttccccggaaggaggacaactggcaacaccaatcaaggcttggtggtcttaaggtgatggctggaatcatgtgagactggtaaaaatccagggagaaaatgtttaccttcagctcatcccaagtctctataacccgncccacttccacatagggaactgtgctctggggnagctgcttaggaaagcctnccatgccaagaagacgatggtgagagaggggaggnagcaggaaagnctttgggaggg

SEQ ID NO: 561945 - DNA, 613 bp, Homo sapiens
ggccgtggtatctgcacggctcctggccccggagcatgcgcgagagccgccccggagcgatccggagccccccgccgatccgtagcgcagtgtaagagatttgtcgtaacgcttcatacatgcaatttaaagaatctcttcttctgggcatttatgtttaacggttttagaaaactttcggtatttagcaaagagctattattccctgtattaaagatccaaaagggtattcttgcactttttgactatatttgagccacttgtcatgcctgcattggtggaacaaatgttccaaaagaaatgccaaaacttgacgctgaagcaccacatattgttgttggtacaccccggagagagttttatatgttaaacaaaagatatcttttttcaaaattgatcacaatgtttttttttgattaaacaaaataaatgttttaccccggttttaaggtctcaattattagatttttcaaaactcaacaccatttttacggtgtgttgttttttgtcacaatgcccacttattgttgtaggtgcccaaaaattttgtgagacccattttcattttgttgggagaaattgtcctttaaggtcactttttatttatttttgt

SEQ ID NO: 561946 - DNA, 345 bp, Homo sapiens
cggacttgaggttctctattatcgaccttccatcccgttgtgtgtggtgtgtgtgtaatgagatggagttttcctctcattacccagctggagtgcaatggcacagtcttagctcactgcaacctccgcctcccaggttcaagagattctggtgcctcagccaccaaagtagctggcgtacactactacacccggctaatatttgcatttttagtacagactgagtttcaccatgttttctaggctggtctcacattcctggactccagctatctgcccaccgcggcctcccagagtgctgggattacaggtgtgagctaccgcgccaggcctaagatcgacttt

SEQ ID NO: 561947 - DNA, 663 bp, Homo sapiens
ggatttggctgttggggctggggcctggcggtgcctgggaatgcctgtggcttctcggccccgtgcctggccccactacacctctctttcttcttttgttgtatggggtctgtgacttgcgtgatataacttgaactggcaacatgtgaacattctcaatgcgggaagcattccgctcattaaaggccctaaccaatggggtctggttccatgctcctatagcccctcctggtgacttcccatgtggcagcactaattgctccacgatgccaagtacggtactgtcttgaccccgtgactgatgctgcatgcaaaatgatgggctctaatcttgtgaaccaccatgcctgtgcttccttcaaatgacttgtggaaattgcactgtccaccttcaaatgtccacggtgcaacatgtggaacgacagaagccttccagtggagcactgtgcatctcgcctttgtgtgtaacaaccctgtgtgacctgcactctgttgcccatggctcctgttgttctggacatgcaacatgaataatctttcacactgtgctataagcacagtctttaccttgtgacgaccttaacgcccaaaattgattgaggaacccacttgatgccgctgtttgttccctgtaacattcctcgggctgatcgtgtgacacaa

SEQ ID NO: 561948 - DNA, 350 bp, Homo sapiens
cggatttccccccccccctggggattttttttttgattccctaaggaaaaccgaattttggttttttgaaaaaagggcagggaaaccctttttgggatttcctcttggaccaaaaaaaatttggttttccccccggttggtggggcgccaaaaagggggaacccgggcctttttggtttggggaaaaaaaacccacctttgggaacctgggtttttaaaggaaagcccaaggcttgggtgggattttttgggaattggatccttttcccttaaagggaaaggttggtgggaaaggtttttttaaggtttttatcccctaaaaaacgggaaaaaaaaatttgggaaaagga

SEQ ID NO: 561949 - DNA, 152 bp, Homo sapiens
tcaaggaatagctactgggtttctgcgtgctgaaacaatcttaaggcatttggggggctttggcttccctggagaggcgcattggtgctggatatgacgttttccgcgctccatccgtttgccatgttggtttttggcaacaggctccccgg

SEQ ID NO: 561950 - DNA, 107 bp, Homo sapiens
tcatcatcaagtgtctgtgtcaaggtcccaaacttcccacctacaaggttctccctctcactggctccaagacctcagcatctgagcaggcttcaggaaaagatgag

SEQ ID NO: 561951 - DNA, 251 bp, Homo sapiens
ccacttcagcctctagaagtagctgggactacaggcacgtgccaccatgcctaggctaattatgttgtttatatatagtagaggtgaggtcttactgtgttgaccaggctggtcttgaactcctgggctcaaccagtcctcgcatctcagcttcccacagtgctgagattataggcctgagccaccacacctaggcctgggagtccctttagattaaggtcttcctgtaagtcagaagcagctactactgt

SEQ ID NO: 561952 - DNA, 323 bp, Homo sapiens
tgcaccttactgagggatgaccgtttgacttttggtcatatatacaaatcacttgcattaatgcctggcacatgttaggctctctgcaaataatatgttgatgaatcataatatataagttgattaatgaggaggcagtggtttcaccccttcccttccccttcctaccaccttccaacacactcagattgttgatgtacaaaactaaccatctctatagcgcaagcatactgacagaacaaactatacagctaaggtatcttacaaatagctttgaacacatttaatgtacctagtttaaactgtatctgatttaaaaccac

SEQ ID NO: 561953 - DNA, 134 bp, Homo sapiens
tagtcatcgtgtgcataagattgcgcagggtgcagacatgatgactgagacaaccgtcgagatgaaaatagtaagcgcggtatccaatacgttggataataagccgctggaacacgcgctccacaccgctatgg

SEQ ID NO: 561954 - DNA, 544 bp, Homo sapiens
  misc_feature (266)..(266): n is a, c, g, or t
tggctgctccctcttcaagactatcccacatggagggcacaatttttgaaacctcaacaaaagtggcattaggaatctggcccttgaaggcaggctgtgtgtatctacgaaagaatataaggatatatgtgaaactgggttccggaggtccataaggatcttcttttttctcttctttggggccttctgctttttccctggcttacaacacgaatggtctttctggctgggaagttggcttccggaaatcctcaacaccatcctcngtgaagtgaactagtaggtgaaggggtggttgaaagacgatcttcaggtgactgggcaggtggcaggatggtgccaccccctaggctcaaacccagctgggaactcagttctgactgatcaatggtggtcaactggctatgccccatcaagccagatgtcatgtctgtcattggtacatcaattgtaacaggtgggttggcactatactgagttcctatagaagtggtccaagtctgggctgaaaaactgccatcctgtgaagaggggggcagcaggc

SEQ ID NO: 561955 - DNA, 191 bp, Homo sapiens
ccccccccccggggggcccccccccctttttttttttccccccgggggaaaacaggggaaaacggggggggggggggccttttttggggcccctcccccttttccctttggggggaaaacccctttttaaaaaaccccccccccccccccccccttttttttcggggattttttggggggggggcccccca

SEQ ID NO: 561956 - DNA, 356 bp, Homo sapiens
ctcccgggttcatgccattctcctgcctcagcccgtggagtagctgagtagctgccaccacgcccggctaattttttgcatttttagtagagatggggtttcaccatgttggccaggcagggcctcgaactcttggcctcaaatgatctgcccacctcagcctcctagggtgctgggattacaggtgtgagccactgcgcccagcccagggctattattttagttatttagttatttaggatgatccaaaaagggcttcaaagacatgatgtagagaccatatgtgaagtgccagagctatgtaagtatttggggtagaattgttcagggttgagatggaagtatcattgacattt

SEQ ID NO: 561957 - DNA, 1221 bp, Homo sapiens
  misc_feature (404)..(404): n is a, c, g, or t
gtggacatacttcagaaccgttggagtgcaagccgtatgatgtgtcttccattctaacatccatacagtctctgcttggatgaacccaatcccaatagtccagcacacagccaggctgctcagcatggtaccaggagaacgaaaacgggaagtatgaaacagcgtgtttctgcaataggtagacacaaacgctggcggtgagttcgtgtgaccccgggatacacgttctagaacgagagctggccagtaacgaacaatatatatatgtgagtgtgtgtgtgtgcgacctcgcgctatcgtccgtgtgcatgtcacatgtgtacgttttattaagaaggcgagaagataaactgttgctggctggtttcccatcgttctcttggcccaaggtgtttccgtacccncttgctaccgctcgtgccttgaacagcgatcagaaaagacaaccgcgtctaatcgagagatccaagaagtgttactaggtacgctgaggttcaccgtttgcaaatagaagatgtgagcgtgacactcgctgtcacgtctatttgctccgtatggtcagttctgcatgttccgagttccttgccaaggcaaagttactttacataatctaagtgggctagctttttaatggcattgtatgtaatgaattgaacattgtgttttataacaaaggaagggctggactataattgcttttaagacgtgtagcagttgaatcgcaaggggaattgatattagttttcttgaaaggaagaaaacctgagatttcgctgaaaagctgtgtttttccaatcccccgttggactgggtgtcccctttccaaggcattttggtcgttatcggtgaaccttttttaagggaaaagagtctcgtaaacgtggctcgttccttgggggaaactcactgggggggccgtagcttaggacgcacatcttacggagagaaccaaagaattccccaattggttacgaggcattattttggctcgaaactcgtcgcagggcgccattgggcgacacgcgcgtttaatccatagttcgccttggattcgattgacccttagacgcacatgcatacagggcccaccctactttggaacctcttgaccaaccccggttgcgcttaatgtgttaacctgtggcgcatacggaaaggagacgaacaaagggtctagtaaagggaggcttccgcaggcactacgaacaggggaagtctaca

SEQ ID NO: 561958 - DNA, 472 bp, Homo sapiens
ttcgacgggtctgtccctgacacaaatttcttgcgtgacacacaggttatctgtgaccggcctgcctctcaccactcccccagccatgctgaataattctgcactcctgtatctaccaagttctttctcatctctgtgctgttttttcctcacatggaacagcttctcctttccccttttggggctggcattccctccaagtcttagctgggtatcacttctgggaaggccccttggccccatctaggagcagtacctactctgagttctctcatcccttttttttttttttaaatagacagggggtctcggggtggcacgggctttctggaagggggggcctcaagtaatcggcctgggcctcccaaggggctaggataacggggatgagccaccacacccagcctcatccccttctcttctggccctatcatacggagcggtcacggtcaacttaggtctctcctactag

SEQ ID NO: 561959 - DNA, 236 bp, Homo sapiens
aatagtctacagtattcagatcagtcatatgctgtacaggtgtgtagcctagagagcattaagccatattacatagcctaggtacctagtaggtagtcccatataggtttgtgtaagtatactctatgaggtacccaaagaggttctctgaatgtatcccattgttacgggatgtaaagctatatgtacaccaaatatatatgtacccttgaggctacattataaacttttgtcct

SEQ ID NO: 561960 - DNA, 697 bp, Homo sapiens
caccagtgaggctcaatacttccagcatttttagcagctacacgtggttaccattttggagcatgaatattggtgattcatcagaattctttgtatattatgggtattgattctttatctattatattatttgtaaaaagtttgtcccagtttttcacattactcaattttctttatgatcacagcttacaaaacttgtggttttgtttctataatttgtagttagatataataatcattttttatttctgtattgctattatgatctgcaaatttttacatccctagatcattttcatctcacccatattttctgtttgtttgttttttctggtttcttttttacagcccactctttaccttatctggaatggattttttttttaaacctgatataatataggctcttgactttcccccaattttctcaatatcccagtattagcaaatagtcatattactccttagtttatgatacttgcattatattatattgatgatactttttatttattatattatatttatgatacttacaatatattacattgatacttgtcattatacataataaaccttaatgtatctctatgttatatactaagtggtatttcaaggcaaatctatttccacttgccttttaatagcataatttcaaccaatatactatataattttattaaacagtttgtatact

SEQ ID NO: 561961 - DNA, 140 bp, Homo sapiens
atcactgaaattgaacacagaaaaacaatagaaaaaataaataaatccaatagctggtcttttgaaaagaacaataaaacttgtaatcctccagccagattgacacagataacacagacacgactagaaagatggcagag

SEQ ID NO: 561962 - DNA, 363 bp, Homo sapiens
gcccgagaactaaccgtactagagaccaaagtgaaccctgatttttataagtctttaaaaatggtgttttatcaagggtttttaaattatcctgtgtagaatttagattacctcattgtccattttgactcaggttgtttacaagtgaaaataaaaacccttgaactgtgtttttaaaagacaaaaaaggggtagatgtttggaaagcgtttcactcgcaagcagtcatctggagggacggaagcactgtttgcctttctgaacactctgggttttaaattctcatttcaggcccaaagtcttattcggtcaaaaaaggaaaagttgaggtttaaaaaaattacttgattaaaaaaaaaacat

SEQ ID NO: 561963 - DNA, 404 bp, Homo sapiens
  misc_feature (67)..(67): n is a, c, g, or t
  misc_feature (137)..(137): n is a, c, g, or t
  misc_feature (397)..(398): n is a, c, g, or t
  misc_feature (401)..(401): n is a, c, g, or t
acccccacaatgcaatgaaggttagaaatccccctaacggggaaaactgaaaaatttgcaaatatgnggaaattaaacaatacattccttaaatagttactcaaaaaagtaactacaggctaggtgtggtggctcanacctgtaatccccagcactatgggaggccgaggcaggtgatcacctgaggtcagcgttcgcaactagcctggccaacatggtaaaaacctgtctctaactaaaaatacaaaaattagttggacgtggtggcgtgcacctgtaatcccagctactcaggaggctgagacaggagaactgcttgaacctgggaggcagaagttgcagtgaacagaaatgacaccactgcactccagtgtgggcgacagagaccctgtctctnnttnaaa

SEQ ID NO: 561964 - DNA, 119 bp, Homo sapiens
  misc_feature (14)..(14): n is a, c, g, or t
  misc_feature (21)..(21): n is a, c, g, or t
  misc_feature (54)..(54): n is a, c, g, or t
tatgacatatacantcagctngtacctgaacattcgtgtcagtgaaacagaaangcagctttgaggaagcgagtaaccagctcataaatcacatcgaacagtttttggacacgaatgtt

SEQ ID NO: 561965 - DNA, 343 bp, Homo sapiens
tggtagggaaacagagtctggctatgtcacccaggtgggagtgcaggggtgcgatctcagctcacggcaacctccaattcccaggttcgggcgatcctctggcttgggcctccgtgagggggggggataaagggcatgcgccaccccattcagcgagatttgggtatctcaagggggagacagagtgtccacggtgcgggccaggcgggcctcaaactctggacctggtgatccacccacttgggcctctcagggtgcggggatcaggggtgtgagccatggtgcccagccagtagtaagcattcctaagggtgccagcggtgaatatgacttggtgtaggga

SEQ ID NO: 561966 - DNA, 213 bp, Homo sapiens
tcttcggcctgcgcttcggcaagcgggaggcgtcaccaggtaaccacggcagaagcgcttggcggggctgagggcgcaggtgcggggcatttaacttcagaccccaaaggattcatattatttttggcgggcccgggggggggcaacttagtgctaagggaggttaatttgagcttccaacccgaggcaataaaagaaatgttgcgtaactca

SEQ ID NO: 561967 - DNA, 230 bp, Homo sapiens
gcgactgagcctgaagaattaccaggaggagagtggcggagtagtatgaggagcatgccatgaagcaagagcagcagcgacaactcagcagcagtgcagtccccggtgaccagcaaaccccagtaagactgcaaggctcgctgaccgttacctagcaccagtgcccgaaagcgcgtcgtcttccgtatacacataaacagcgaagtagtcattactctactgcgatgtac

SEQ ID NO: 561968 - DNA, 142 bp, Homo sapiens
ggggggggggggaaaaaaaaaaaggggttcccccctttttttttaccccccccccccccttttttggggggggggggggggggggggggggcccccccttttttttttggggccccccaaaatttttttcccctctttttta

SEQ ID NO: 561969 - DNA, 182 bp, Homo sapiens
cagggagagttatcaaattagtgtaaagagccccaggatgaagagagtggtgcaggaaaaggtctaaattcctggtgtggtggggacctggcacatcccacagcaagtactcagacctcaacggcggcggctgaggtcttgggcaaggcgagtggtgagcagggtaagggctcctcagctcc

SEQ ID NO: 561970 - DNA, 403 bp, Homo sapiens
  misc_feature (9)..(9): n is a, c, g, or t
  misc_feature (20)..(20): n is a, c, g, or t
  misc_feature (22)..(22): n is a, c, g, or t
  misc_feature (35)..(35): n is a, c, g, or t
  misc_feature (38)..(38): n is a, c, g, or t
  misc_feature (51)..(51): n is a, c, g, or t
  misc_feature (61)..(61): n is a, c, g, or t
  misc_feature (64)..(64): n is a, c, g, or t
  misc_feature (90)..(90): n is a, c, g, or t
  misc_feature (92)..(92): n is a, c, g, or t
  misc_feature (106)..(106): n is a, c, g, or t
  misc_feature (111)..(111): n is a, c, g, or t
  misc_feature (122)..(122): n is a, c, g, or t
  misc_feature (157)..(157): n is a, c, g, or t
  misc_feature (162)..(162): n is a, c, g, or t
  misc_feature (167)..(167): n is a, c, g, or t
  misc_feature (175)..(175): n is a, c, g, or t
  misc_feature (178)..(179): n is a, c, g, or t
  misc_feature (182)..(182): n is a, c, g, or t
  misc_feature (203)..(203): n is a, c, g, or t
  misc_feature (205)..(206): n is a, c, g, or t
  misc_feature (216)..(216): n is a, c, g, or t
  misc_feature (226)..(226): n is a, c, g, or t
  misc_feature (231)..(231): n is a, c, g, or t
  misc_feature (233)..(233): n is a, c, g, or t
  misc_feature (245)..(245): n is a, c, g, or t
  misc_feature (249)..(249): n is a, c, g, or t
  misc_feature (260)..(260): n is a, c, g, or t
  misc_feature (275)..(275): n is a, c, g, or t
  misc_feature (292)..(292): n is a, c, g, or t
  misc_feature (397)..(397): n is a, c, g, or t
tgaaaaaanccggcaaaaancncttttattgcaanaanaaaacttgagacncaaaaatggngcngggggaagggggcagcaacgatttcncnccaaatcactacanagganagcaaaggggngaaaaggggctgagggaggaaaagccaggaaactnaaatnagcanagggagcnaannatnaaaaaacaggagatgctgaancnnccatcaccancatcattttnttaananaacattcaaggntttntcatgatggcngggctttcactgggngttaagtctacaaacanccccttcaattgaaactgtcaattaaagttcttaagatttaggaagtggtggaccttggaaatttatgagattacaaaattcctgaaagtccattaaaaaaaccncaggat

SEQ ID NO: 561971 - DNA, 300 bp, Homo sapiens
  misc_feature (28)..(28): n is a, c, g, or t
  misc_feature (282)..(282): n is a, c, g, or t
caattagttgatttctccggctaactcnacaccagaaaatcctccgccaataacgataaaagagagataggccgatttttcatgcggattgtcgcaaacctctgctttttccaattgctccatgatatgaccttgaagcgcaagagcgtcgcctatggtcttgaaaccgaaagcgtgctcgtccactcccgggatgagggcaaggttggcctcgttgccgcaagcaaggacgagataatcgtaattgattgtggcacggctgccattgtaggcctcgtactntatggtgcgcgcatcaaa

SEQ ID NO: 561972 - DNA, 158 bp, Homo sapiens
tacatatacaatcgagctcgtaccggtagactaacccaggtagtggctgtagctgcgagctggggctgtagctgggagtaacttggtgaggtcggggaatagctgggtgatgttggagagtagcttggagaggttgggctgtagttaggtctacctgg

SEQ ID NO: 561973 - DNA, 463 bp, Homo sapiens
gctaactcaagctgagaccaaccacattggccacacaggctatctgaacacggtgactgtctctccaaatggatccctctgtgcttttggaggcaaggatggccaggccctgttatggggtctccacgaaggcaaacccccttacacgctagatggtggggacatcatcaacgccctgtggttcagccctaaccgctactggctgtgtgttgccacaggccccagcatcaaaatttgggatttaaagggaaagatccttgttgatgaactgaagccaaaagttttcagtccacgcagcaaggcagaaccccccccgtgcccccccctggcctggtttgctgatggcccgactctgtttgctggctacccgggcaacctggggcgagtgtggcaggtgacccttggccccccctaaaagtttatggcagagcttttccaataaaaaaaaaactggcttttttta

SEQ ID NO: 561974 - DNA, 185 bp, Homo sapiens
  misc_feature (155)..(155): n is a, c, g, or t
ctagaggatcccctgcggcgcgagataatttaaaagaactgacaccagcgtaatagagtaatagttttttcatgccttgtgtcagtctgttaaggtctgtctgattgtactgtgcagaaatacatgaattcctcccaggtaaaatgcaaacccanaaccttggtaaatgaacggtaaatgttttg

SEQ ID NO: 561975 - DNA, 350 bp, Homo sapiens
tctgacgatcggtgatgaggaggagctgatccccttaagagtacgttagcatttaataaattgattttcccaaggacttaacatggggtgtcaggagacaaacaaaccttgcgtctctgctcatttaagtctatttaagccaggatttcagttgcttgcaggcataaatcatccttactgacccctgtgactttggtaccatctgtgtgcccacagaattccaagtgactccaccaagtcttaccaccaccctctcctgcccaggccacatgagggtgactcctagctggtcagtcgcctcctcacatcatcactctagctatttcttacccaattatccacactgcagc

SEQ ID NO: 561976 - DNA, 249 bp, Homo sapiens
tcgactctagacggactcccccccgtgtgttgcgctcacggacttgcagggacggggacgatgctggggacgctggggttcctctgctttacgcgggaggccaaggtggcacgacggggacgacgtgccacggaaaccgtgccggaccacggccttgtgggtggtgacggctgggacactggacggcctcactctcctggtcatctttggacaccagacgacgaccataaggtccgacgccgtcctgga

SEQ ID NO: 561977 - DNA, 172 bp, Homo sapiens
aagaatgtagaaaaatggaagttcaagttgcaaaagatggaaatctggttgggaagaaaataaaagcttacaacaggttgatgaacatagtaaacactcctcatactgaggcatagggagagctggataagcactacaaggaatttgatacacctcgagcccccaaagcagc

SEQ ID NO: 561978 - DNA, 338 bp, Homo sapiens
ctcagaagttgtgtctctgcctattctcctgtttcatccaccacaatcacctttccaggtctcctcagaacatcagttaatgtgcctctttctcttgctttgaagcagaagccatagctctcaccaaacctccagcatttaaactttgctgtgagtctacgtgaccccaccacgagtgacctcactttccctccatgcctgggagacagacatgcagtgtcactaaacctggatgacacgctaccctcatctttatgacacctttgatatgtgctttgatgcatttctttgtatcccatttgttcatttttagcaataaactcattcttggtacaaaa

SEQ ID NO: 561979 - DNA, 276 bp, Homo sapiens
cccgggaaaaaaaaaggcccccttttttcccccggttccggggctgggtaaaaagggaagctttcttgttttatggcccccccctggccgggggtgggtaagagaaaaaaggattcccaatcccccacttttgggggtttgggtctcccattttactttttgggccccgggaaccgggtttgccaggtccagggtccccccccttttggggtttttgggattggttgggggaaagggtttaccaacccggttttgccttaaagataattaaacttg

SEQ ID NO: 561980 - DNA, 448 bp, Homo sapiens
tatagaaatgcaacgtaatttctgaatgttaacttatatcctgctatttttcgtagaattagttcatcagttcaagtagtctgaggttgagtccttagggttttctatatatattatcatgtcatctgcatacagtgacaattttacctcttccttccaagttgaataccttaaatatctattgtatgtctgattgctgtggctaggacttccaatactatgttgaataacagtggtgagagtgggcatcctgtcttgttccagattttagtgggaaggctttcagcttttctccattgagcattatatttgctgtgggtttgtcataaatggcttttattatgttaaggtatattccatctatacccactttgataagagtttttatcatgaatggattttggactttgtcaaaatgctttttctgcatctattgagatgctcatct

SEQ ID NO: 561981 - DNA, 421 bp, Homo sapiens
  misc_feature (67)..(67): n is a, c, g, or t
  misc_feature (126)..(126): n is a, c, g, or t
  misc_feature (150)..(150): n is a, c, g, or t
  misc_feature (187)..(187): n is a, c, g, or t
  misc_feature (219)..(219): n is a, c, g, or t
  misc_feature (221)..(221): n is a, c, g, or t
  misc_feature (237)..(237): n is a, c, g, or t
  misc_feature (327)..(327): n is a, c, g, or t
  misc_feature (379)..(379): n is a, c, g, or t
caacaagggcccggtgatcaagggaacagcaagcaacgttatgtttcaaacgcggtgtcagaggccntgatccgagaggtggccaacaaagtcaaggtccccctgcaggatttcatggtccggaangacaccccctgtggaaccaccatnggacttattttggtttttcggctggggctgcgggtgntggatttaggcagcccccaactggccatgcantntatccgggagatggcntgcaccacaggagtcttccagaccctcacctttttcaagggttttttgagctgttcctttttttaagccataatttcttagtggattganccttcttggaaagatttttttgccatccctttgcacttgagaggggaagttntcagctgagctgaagctggattattaaagtggattgtcattc

SEQ ID NO: 561982 - DNA, 390 bp, Homo sapiens
ctcgcccaggcggctcgtttgaccaggttcttcggagagaactgtgggaggtcagatcttataccgaagctgtacttcccgtgagtcccgtgtcatagcgttcgggcatcctccttcctgcggggagcagctggtttgaccctggactctcacgagactgcgcctggagaaggacgggttctctgtcaccctggactgtgaacgcacttctccccagaggaactcaaagttacggtgttgggagctgtgcttgacggtgcctggaaaccactgacggacgcgccaggatgaaccatggtttcctctccagggacgtccgcaggacataccggatcccagctgatgtagcacctctcaccattacttcatccctgtcgggctagctcgggg

SEQ ID NO: 561983 - DNA, 1047 bp, Homo sapiens
tccgccagacgcgatctcagcttccccaggttggcgctgctggcagtcagctccaaagtcgtgactttcataaccaacccgaagttttgaacccgtgctgacggagttgttcactggcacaggtttggtgtggctggctgcccttgtactacttctggtgaggtctcatccaggttctggcaccttcaatccccaactgatatctgcggtatcatcactggtatcgccgttattcaccacccagtatcgcaacgatgcggtccttcctttctcatagtcacacggactcgcaggattgggctctgataatgcatcgcactctacaccagtgttagcatccccatgttcccctcttgccattctaatcgtgtatggccttattctggggaataccttgggtatcccccgctgggagagacaactcgcaagaccatcagggagccaagatcccctgtacgctccaccctgccataaggatattgaatacgatacctcaggctggtctgacgcagctggattgtgcgtctcaacgctacggatggaactgtggtccggactaagcagaggcgcgtagtctctcttgaggagtctcccagccgcagaaatagcgactgctgtcactccgtgcagtgctcgggggacgggagtcggacattaatgcccagatggccatcgattttgctcgcgtgcccagtttgaagcagcccgaggaagctgtgctgaaaacagtggcctgaggggacgaacagcgctcggttggcacgtgcgacgcgatcttccaatccatgtgggccaatcttaacttgctctgcccatacttcacaggtttgtaacttagtcagctctaaattcaggctcctgaccacaacagactggagaacttattggagccgattccgggagagccctttaccctggcccgagtttaggcagccagctaacaaaggactacttggcccaagccttaggtacactacatataaggggccaccacctactcacggcgccaacattagcaggcaccccgtgggaccaaactccgcgcag

SEQ ID NO: 561984 - DNA, 91 bp, Homo sapiens
attttttgcaaggccccgtttttttcctttcaactgtcattttgtctggagcttgaaggaaaaaagtgacttaaatccccaaattgtccca

SEQ ID NO: 561985 - DNA, 637 bp, Homo sapiens
  misc_feature (18)..(18): n is a, c, g, or t
  misc_feature (35)..(35): n is a, c, g, or t
  misc_feature (142)..(142): n is a, c, g, or t
ccatctatagacctaccncaggaatgcatccttcncaagggtcttccatgctggaaaaagaattcagcaatatttctcctacttgcacatctttctataggctttctgcaagaagaaaaatatggctctattctgcccgacnccgcaggcagtcagtccgggtatactgatttcatattgttcaaacacacatgttttacaatccatttgtgcaatagtagtcctgaggtgaattacattctgagcttatgaagataacaggattaagagattaaagtaaagataggcataagaaactataagagtgttaattgggaacgtgataaatgtccatgaaatcttcacaatttatgttcagagattgcagtaaagacaggcataagaaattataaaagtattaattttgggaagtgataaatatccatgaaatcttcacaatttatgttcttctgcctcagctctggccgatccctccattcagggtccctgacttcctgcaaaacaatcaatgccctcactttaacagtagatacttggcgaggctgtgcatggtgaggctgtgcatgcacctttcattgcaggtcagccactaacatgataagagcttatgtctatttttccacaaaatcagttcttt

SEQ ID NO: 561986 - DNA, 522 bp, Homo sapiens
tactggcggcaggagtcctgctttgctgccaggccacattctgctgaatatgatatcctgaaatctcatggatatcttggtgtcatttcaaaatatttctgtaagcaatgtcctgaacaggtgatctcttcaggtcaaacttctcttgtagtgaagtctttaccacagtccaaaaagcaggtctctgtaagttaatggtaggtccccagaaattccttaaactgtattatctgatcagattctggtattggtgcagccatatccttctggtaccttaattagtcaccttttctgatgcatgagttccctttctgtcctggaaaagtagtggtccaaccttagcttgaatgtctccaataaggcctgattcttacttaagcacaggctctcgcagccgacatcagtacaaggctggcgatagttgggtaacggttgagccttggcagggagggtcagggtctggacaggagccgcgccgccatatgggatagaacacgtgggatcagtactgtcaagtgacac

SEQ ID NO: 561987 - DNA, 145 bp, Homo sapiens
aggaccctcgagggtcgaacggaagcattgtttcctgagatgctatactatctacatcaatgcaactgcatatatactatacatctctaaaatagaaatcacatatcatatttaatttcacttccagttccaattacagcaagta

SEQ ID NO: 561988 - DNA, 448 bp, Homo sapiens
  misc_feature (305)..(306): n is a, c, g, or t
  misc_feature (330)..(330): n is a, c, g, or t
  misc_feature (437)..(437): n is a, c, g, or t
ctgtgaaatgcaaatgaaaaaccaccgtgaggcatcacgacacacctgtcagaacggctgaagtaaaaacatgtggacaccactaagtgctgtggaggattcagggaaactgatcatcctaggttgccggtgaggacatgagtttgacagtttgtggccaggtgcggtggctcacgcctgtaatcccagaactttgggaggctgaggcgggcagatcacgaagtcaggagatcgagaccatcctggctaacatggtgaaaccccgtctctactaaaaatacaaaaaactagccgggcgtggtggnnggcgcctgtagtcccagctatggngaggctgaggcaggagaatggcatgaacccgggaggcagagcttgcagtgagccgagactgcgccactgcactccagcctgggcaaaagagtgagactccgtctcanaaaaaaaaaaa

SEQ ID NO: 561989 - DNA, 101 bp, Homo sapiens
ccacacagcactaggcaaccagctaattttttttttaagagacaggtcttactgtgtcacccaggctggtctcaaacccctgggctcaagtgattcgccga

SEQ ID NO: 561990 - DNA, 164 bp, Homo sapiens
agggccagagggaggcgaggctgggaagaggctttgaggaaggtgtgacactaaatgtcacacctaggacctcggctttgttctgagggccacaggcagccaccaccgcgacctcccgcacttccctcgaggctttcgtctcagctcatgggcagcccactctg

SEQ ID NO: 561991 - DNA, 325 bp, Homo sapiens
  misc_feature (7)..(7): n is a, c, g, or t
  misc_feature (14)..(16): n is a, c, g, or t
  misc_feature (20)..(20): n is a, c, g, or t
  misc_feature (26)..(26): n is a, c, g, or t
  misc_feature (53)..(53): n is a, c, g, or t
  misc_feature (59)..(59): n is a, c, g, or t
  misc_feature (74)..(74): n is a, c, g, or t
  misc_feature (82)..(82): n is a, c, g, or t
  misc_feature (91)..(91): n is a, c, g, or t
  misc_feature (94)..(94): n is a, c, g, or t
  misc_feature (117)..(117): n is a, c, g, or t
  misc_feature (120)..(121): n is a, c, g, or t
  misc_feature (150)..(151): n is a, c, g, or t
  misc_feature (158)..(158): n is a, c, g, or t
  misc_feature (177)..(177): n is a, c, g, or t
  misc_feature (183)..(183): n is a, c, g, or t
  misc_feature (192)..(192): n is a, c, g, or t
  misc_feature (222)..(222): n is a, c, g, or t
  misc_feature (254)..(254): n is a, c, g, or t
  misc_feature (277)..(277): n is a, c, g, or t
  misc_feature (279)..(279): n is a, c, g, or t
  misc_feature (282)..(283): n is a, c, g, or t
  misc_feature (300)..(300): n is a, c, g, or t
  misc_feature (307)..(307): n is a, c, g, or t
  misc_feature (320)..(320): n is a, c, g, or t
  misc_feature (323)..(323): n is a, c, g, or t
gtgatanggggggnnngaanggtccngggtccggggccagagcccaggggggnctcgtngccatgcctcggaanaatgtggnggaaatcanggncttcctgctcacagcccggcganagnntgccaaatctgtcaagatcaagaaaaatnngggacancgtggagtttaaagttcgntggagnagatacctntacacccggggtcatcactgacaaagaganggcagagaaactgaagcagtccctgccccccnggtttggcagttgaaggtaactnanatnnaccatacacactgattnggactgntattatattaaanctngg

SEQ ID NO: 561992 - DNA, 490 bp, Homo sapiens
  misc_feature (77)..(77): n is a, c, g, or t
  misc_feature (84)..(84): n is a, c, g, or t
  misc_feature (235)..(235): n is a, c, g, or t
  misc_feature (260)..(260): n is a, c, g, or t
  misc_feature (296)..(296): n is a, c, g, or t
  misc_feature (331)..(331): n is a, c, g, or t
  misc_feature (370)..(370): n is a, c, g, or t
  misc_feature (376)..(376): n is a, c, g, or t
  misc_feature (384)..(384): n is a, c, g, or t
  misc_feature (386)..(386): n is a, c, g, or t
  misc_feature (415)..(415): n is a, c, g, or t
  misc_feature (419)..(419): n is a, c, g, or t
  misc_feature (425)..(425): n is a, c, g, or t
  misc_feature (453)..(453): n is a, c, g, or t
  misc_feature (457)..(457): n is a, c, g, or t
  misc_feature (461)..(461): n is a, c, g, or t
gtcaattcagctcttgagaaaaggtgtctttccagcctgaatttttcagattgactagaccaagcagaatctctcancctgatnttagtatttcctagaaagcacttgacattgtgtgaggtctcacctgaaggaacttggtggtgacatttgggagggtggagggaggcagtgtccttcctgacagcacttgcctccatggattttttgtacacagaactcttatctaggatgnggttctgttcatgctgctttctgcnatgtgcgtgtctgttaaaataggctctctacccagntagaacaccttccagacacttgctggacagctatnttccacatacttcccagtttacatttggtcttaatgatnttgaanagatcctntnttcattttactcagccaggttttgtactnatgnacaggngttaaattacttcaagcatttttgtaanaggngtanataattcaataaaaaaggtaaaacatgaa

SEQ ID NO: 561993 - DNA, 178 bp, Homo sapiens
tgagactaccacccactccgttcctgccagaaacgaccctttgtggccgatgggccatgcgggcccctcgcagccaattcagccagtgttgggactggttcagagcccatgggggctggaggggggcagctgggattttggaattttttttataataaaacccttacggacaacccta

SEQ ID NO: 561994 - DNA, 514 bp, Homo sapiens
  misc_feature (77)..(77): n is a, c, g, or t
  misc_feature (84)..(84): n is a, c, g, or t
  misc_feature (259)..(259): n is a, c, g, or t
  misc_feature (284)..(284): n is a, c, g, or t
  misc_feature (320)..(320): n is a, c, g, or t
  misc_feature (355)..(355): n is a, c, g, or t
  misc_feature (394)..(394): n is a, c, g, or t
  misc_feature (400)..(400): n is a, c, g, or t
  misc_feature (408)..(408): n is a, c, g, or t
  misc_feature (410)..(410): n is a, c, g, or t
  misc_feature (439)..(439): n is a, c, g, or t
  misc_feature (443)..(443): n is a, c, g, or t
  misc_feature (449)..(449): n is a, c, g, or t
  misc_feature (477)..(477): n is a, c, g, or t
  misc_feature (481)..(481): n is a, c, g, or t
  misc_feature (485)..(485): n is a, c, g, or t
gtcaattcagctcttgagaaaaggtgtctttccagcctgaatttttcagattgactagaccaagcagaatctctcancctgatnttagtatttcctagaaagcacttgacattgtgtgaggtctcacctgaaggaacttggtggtgacatttgggagggtggagggaggcagtgtccttcctgacagcacttgcctccatttagggggggggggaaatttccccggattttttgtacacagaactcttatctaggatgnggttctgttcatgctgctttctgcnatgtgcgtgtctgttaaaataggctctctacccagntagaacaccttccagacacttgctggacagctatnttccacatacttcccagtttacatttggtcttaatgatnttgaanagatcctntnttcattttactcagccaggttttgtactnatgnacaggngttaaattacttcaagcatttttgtaanaggngtanataattcaataaaaaaggtaaaacatgaa

SEQ ID NO: 561995 - DNA, 196 bp, Homo sapiens
ccccggttacgtggcattttcataagcacgcacagtttatttgcttcaagtaatgtgtaggtgaggcctttttctcctagagctgtcctgtgccccctatgcaccagaggtaggtctcatagtctggctcctctgcttggtttacagggagatccaagttcacaacaatggtgacttgcttcacatcaatccctca

SEQ ID NO: 561996 - DNA, 263 bp, Homo sapiens
cttccatgctcctgttacaggatcgccgcactcagtgtatggaagattaaatcctccaactcggtcacatcctccatcgacaactatcacctcagtatagccagtggacctgcttggcctagtccttggtgacatcatttcattcccaagtatgtggtaccgccttgtttcatgcaacaactgataacacgcaggagaatagatcaaaatcaggcttgttttattgatgcacagaacaacttatgttcaggactcaggtatgg

SEQ ID NO: 561997 - DNA, 516 bp, Homo sapiens
agcggggggaagcgctagtgcgcaggcgcaactgcctggctctgctcgctccggcgctacggcccagctctcgcggacaagtccagacatcgcgcgcctccacccttcgtccgggtccagccccctccccacatatcatcgtgcgtcagtcgacagataaacacatagtaggccggcgcagcgccctacatgtgtctcccgcacgcacggattcgagcaggagatgcgatgggaccggccgggatcccgagtccacgcccggcccagtggcggcggcctgatacatcgacatggggcaagctgacgcagctcattcgtcgcgcaccctaggggccgcggcagtggcaacgctaccactgtgcaggcaccgctttactcgcaataatcggctctgctgggagcccccgcaacccccgacccggccgccggacaacgaaaaccaagagaccccattcggctccgaccgagacaggtgcattcaggacatagcaccatccaaggactcggctatgcgcc

SEQ ID NO: 561998 - DNA, 499 bp, Homo sapiens
  misc_feature (170)..(170): n is a, c, g, or t
  misc_feature (176)..(176): n is a, c, g, or t
  misc_feature (192)..(192): n is a, c, g, or t
  misc_feature (194)..(194): n is a, c, g, or t
  misc_feature (200)..(200): n is a, c, g, or t
  misc_feature (202)..(202): n is a, c, g, or t
  misc_feature (356)..(356): n is a, c, g, or t
  misc_feature (361)..(361): n is a, c, g, or t
  misc_feature (411)..(411): n is a, c, g, or t
gtcgacagcagtccctgccccctctctgtctctctctcccttcccctctgtctctctctcccttcccctctctgtctctctctcccttcccctctctgtctctctctcccttcccctctctgtctctctctgtttctatctgtctctctctgtccatcacccactatctntgtctntgtctgtttctgtttntntttctntntccctctctctgtctcccctctctgtgtctctttgtatctctttctctctctgtctctccctgtctgtttctatctccgtcctcctgtattagtccattttcatggactaatgaggatccttcccgcttctcccagctcctggggactctgggntcccngggcttgtggccatatcactccactctctgcctccgtctccacatggccntctctctgcatccgtgtctcctttttatttatttatttatttattttgagacagaaacggagagacagaaagacatagatacgtagag

SEQ ID NO: 561999 - DNA, 207 bp, Homo sapiens
  misc_feature (137)..(137): n is a, c, g, or t
  misc_feature (175)..(175): n is a, c, g, or t
caacaacctcctcctttcaccttgccttgaaaatgccatgcaatttccaccacaaccccctctttgacatcttgagcagaggaacgtgtcacgtcctttgggggctcctgtgccgagttcctttggtgcttagcagnaagcttgtgggtctcgctacacacccacagatatcacntgtgctgatggttcacagcgcagctcacgtat

SEQ ID NO: 562000 - DNA, 531 bp, Homo sapiens
  misc_feature (202)..(202): n is a, c, g, or t
  misc_feature (208)..(208): n is a, c, g, or t
  misc_feature (224)..(224): n is a, c, g, or t
  misc_feature (226)..(226): n is a, c, g, or t
  misc_feature (232)..(232): n is a, c, g, or t
  misc_feature (234)..(234): n is a, c, g, or t
  misc_feature (388)..(388): n is a, c, g, or t
  misc_feature (393)..(393): n is a, c, g, or t
  misc_feature (443)..(443): n is a, c, g, or t
ttaagatcccttatacaacgtgttgcactctctacgtcatacccactctgtctgttttgtcatatgtctctctgtgtgctgtctcttgttgctctctgtccctctcgtgtctcccctctctgtatatctgtgtatttccatgtctacctatctgtaattatctccgatgtctcatatgtgcatcacctgtattctgtctctntgtctntgtctgtttctgtttntntttctntntccctctctctgtctcccctctctgtgtctctttgtatctctttctctctctgtctctccctgtctgtttctatctccgtcctcctgtattagtccattttcatggactaatgaggatccttcccgcttctcccagctcctggggactctgggntcccngggcttgtggccatatcactccactctctgcctccgtctccacatggccntctctctgcatccgtgtctcctttttatttatttatttatttattttgagacagaaacggagagacagaaagacatagatacgtagag

SEQ ID NO: 562001 - DNA, 225 bp, Homo sapiens
ggagtgtgctgtgtcgatctagaggtcccggtggagcggggctttcccaggtgggccaagagggtcttgatctcctgacctcgtgatccgcccacctggcctccgaaggggcggggatacaggcacatgccaaggtgccgggctgactctgccttttaaaggccgggagaggtaacctctctgagacgggatgtattagggttctccagaaaaactgaaccagta

SEQ ID NO: 562002 - DNA, 215 bp, Homo sapiens
gcctctagctgaactgaagcacgaaactggaactccaggttggagccctgatgctgccacctcctctgctggtcgggctgggaccctttgccccttaggagaggtgttagtcacagatatttacctcagtttatgtcactgtcgaagaaacaaaaaataattgcaaaaaataacactgtcgacttgaagactttgaggccaatataaaaaaaaaa

SEQ ID NO: 562003 - DNA, 110 bp, Homo sapiens
  misc_feature (107)..(107): n is a, c, g, or t
ccaagaggagtacctggtgcacctggtgccggtggctgaaaacctggggggcaggtggatctggggctgttcccccccccccgttttttccaccccacagttcctcntgg

SEQ ID NO: 562004 - DNA, 635 bp, Homo sapiens
  misc_feature (46)..(46): n is a, c, g, or t
aactcggtcttaaccacctggacagaggaggcgggactaatactcntgcgcctcgcttcgtttttcctccggaaccatgtctgacaaacccgatatggctgagatcgagaaattcggtaagtccaaactgaagaagacagagacgcaagagaaaaatccactgccttccaaagaacggggggagcaggaaatgcaagcatgcaaatagaaaagaggcgtgcgccgccaatatgcactgtgcattccacaagcattgccttcttattttaattcttttagctgattaactgtgtaagatgcaaagaggttggatcaagtttaaatgactgtgctgcccttttcacatcaaagaactactgacaacgaaggccgctcctgcctttcccatctgcctatctatctgcctggcaggtaaggaaagaacttgcatgttgatgaaggaagaattgcggtggaagaagttgggcggtacgacagtgaattctacaagaaatccaagctggccccagggggtactggaggctgtatagcagtctattcacagggccattttttcttttggtaaagtgaatttaattatgggaatgcccattttttttattatgcaaataaggggggtcaaaatcttaaaaaaa

SEQ ID NO: 562005 - DNA, 483 bp, Homo sapiens
  misc_feature (462)..(462): n is a, c, g, or t
caacgctctcacacaaaccaaacacaaatcttactgtttgccacagacacaaattcttactgtttgccacagttaagtctacctcacattaaggaattttgttttcaaagtagagaaccagtcatgaagtcaagttaaaggctgtaaaccaaatgtttattataaggtcatataaatggatggaaagcttaaagtttcataaatttaccctactctgtgtactgggataacaaaacacatattttatttgtttttgtcattttattgttttgctcaatatacttctgcactttacctgtgagaaatcaaaagagttttagacagataatctaacatgcagaagaaatctagatatattgccagtcactttcatcttctcctgtaataaaatattatttccttcaaaaaaacaccataagtattttccaagttccactagatccattttcaaaaacttgtctngtgagcagcgttgggggtacc

SEQ ID NO: 562006 - DNA, 293 bp, Homo sapiens
  misc_feature (4)..(4): n is a, c, g, or t
tggntggtgatatagaggatccttttcttgccacgatcgagaggtggtcttcctcttagggactgcaacttcaaattcagctgtggtgctcggaaaggcagatgataccagagtcacgctgacatacagaatgacgaaaaggagagatcaatgttcttattgtgatgagtctcgacttgtcaaattctttcttcaagaggatccacccggggaaacacgaccggagtcggtgggcacagaaaaggggtaccgggagctcggacattcggtaagtccatgtgtccattaggctt

SEQ ID NO: 562007 - DNA, 816 bp, Homo sapiens
tcttaataacatcaaggttaaaaaggttttcccatagggctcctcttaccaatatcagatattatgggacaggaatgggacagcgagattctaaggtggcaatgtcaaagatgggaactcttacagtacattttccacgggtacatggaaaaattcaataaagagctggggacatgggattaataaataaaaaggagagttaaacgtaaaggacttcagaaataccagtgtcaggtgagaacttccacccatcacaaagttggcagcagaaggaagctcggtaaaaggtgacgtgggaagctggtatcatgtgctggccatcaagggtaagccaatctgggctcaaccgtggaaattatcagaaaatctacaatagggcgcttactttctacaaggccaaaagaagttgaagaaaagatgacataacgtggcaacagcaggtggatataacttctgggtggaaacttgggctgtaatgggcctctcatcaggaactggtgagatgttttataacatgcagtctgggcatacatcgaggaagtttgggcaaggatcaagctcacaagggatctggttaaaggtgtcgcagtgggatggattaaaccagttgacagttacaacgggtagtgaaggattactcaaattctgggaactttaaaaccaaaattttaatccattctggtggagcctcagttcatctccaaatatcagtgtgctacatagggacaggggcatccggggactcgccctggatgacttctccattagtgttctggacatagaaactaggaagatggtccgaaaagtttcgggacc

SEQ ID NO: 562008 - DNA, 1020 bp, Homo sapiens
gattcttcgggtggaatgctgcttggtctacggggggtgacacagtcatggccctacttgaaacttctttatggcactagctgagcaacggagaggcccacttcctaccaggatgcaatgttggtgcgcaaccaggtagccctgaggtacgcactccatttgcttggtcaggcatggtcatgaattttctttcccagtgtggattgacattcgtcagccagtgtggagaatattaaccacggttctcagggacagtgctatctcagagactctggatactacgtatgcgatctatgcttatgcagcctagctccttaggtgtgagccatgattgatggcacagtcagcttttgccaatgagaccctcaataaggctcctggcatgaatactatagaccaagggatggcagcactgaagttgggtagcacagaagttgcaagcgatgttgccaaaagttgtaggttctgctgttggtagcgggtccattactagtaacatcgtggcttccaatagttcgcctccagccaccatttgctcctccaaaacagcatcttgggctgatattgctagcaagcctgcaaaacagagactaaactgaagaccaagaatggcattgcagggtcaagtcttccggcaccccgataagcataacatggatattggaacttgggatacaagggtcccgttgcaaaagccgcctcacaggctttggttgcagaatataggtcagccaaccagggtctcctcagctgtaggtcaggaggctaacaatagcccaccaggtgggtccgggatcagagggaacagaaaaagcattgcttcaactcacaccaggctgccaggtttcagtcagcacaggagttcaaccaccccgtggtagcactcgaacgggcagggtcgccaaagggagacagaaagagcggagcagcggtcggaaccccaagacccgtgaaggcgcaatagcaatggagagcgaaaaagggaacgcatcatttagatgagaggaagcacaaagcgaa

SEQ ID NO: 562009 - DNA, 733 bp, Homo sapiens
tggaaaaagtcagggaggccagggggtgggcttgaaaccagcttgggggggttcgatcccttcctttttggtctaaatttaatgtatacgggtcctctcgaatgtgtggtaggggggggggcatccatatagtccaccccaggtttatgggagggttcttctactattaggacttttcgcttcgaagcgaaggcttctcaaatcatgaaatatttattaaaattcactggctgtaagagaatatgatatgacgcctaacagatgataggatgttccatggtgggtggtatgcctcggggtagcccgagtaacgtcggggcatcccgggataggccgagaaacagtgttggtggggacagaaagttagatttcaccgccgatgaatatgatagtcgaacagggatttgggcgtaggttgggcctagggtgtagcctggagattcgggggaaatcagtgaatgaagcctcctatgagggcgcaatacgggccctatggatgggacataggggaagtgagctacaacgtatacgtgtcgtgtagtacgatgcgccaccggaggtcgcacgcgtgagaattctccgccgaaaagccgccgagatggctagtagctcctacctgtggttgcctaaggggcattcctccccagggcaggactcagaaatttggcacgggtaacagcggccaacgtcacaggttcaggcggtggaattgacgttgcggttgactcagtcc

SEQ ID NO: 562010 - DNA, 593 bp, Homo sapiens
  misc_feature (429)..(429): n is a, c, g, or t
  misc_feature (541)..(541): n is a, c, g, or t
aattcgcggccgcgtcgacgctgcgagaagacgaacagaagggagagaaagagagggaagtggaagaaatagtggaacttgccaaagtgtacaataaaaagaaatttcagtcttaaaagcagtcagtacagaattaatctcagcaaacaacacgattaagaagctagataatattaggtaataaggaaaaaggcgtacattgtttctatcaatgagaaaacaaaagggcagaaactctgaaaagaggggaaaaaaatatttgttggaaagttgaagtacaaataggaacctaaatcatggcatgatttttgagcgtagatacgtataagaaaaagaatccgtcaaacttagtactcttctcttgagcatcacgtttcctttctgtagtcacgttctctgcataaacaatatttacaaataatgaggcangctgcaaataaacccactgaccatcagaaatgatagttatagagaggaagtagatcggcgggagatgagagccaactcaatgccaacatgaggcggatctgtacgagtgagnccatacccagagccggcacggatagaccgaccggttagagccagcggggctc

SEQ ID NO: 562011 - DNA, 871 bp, Homo sapiens
ctgtaggtacctaaagtgacttaactgaatgtggatgaggctggggctggtgtgggacttatggcatgcttatcaaggtgtcccccaatgtggccctcaagagccatccccactgctggacagagccatagttgtacccctacttcctaggccatttctggggctatggtggatgaatgctgtcctgtgctgtaaacactatgcaaatggaagttatcggtttgtggtgctgtgccgcgctctgctgggcgactaagtgccactcacgcagcatgttccatgcgcaaggagcacataccatcaagccacactatcatggtatcgttctcaaagtacttggatggtagatggccactgaaacactggacaccatacagatctcttctgatctcttgcccccagtggggcctggtatggtagaatgttggcattcggtagatatccaaagcctgttctcccagaccgtcctcctgcagctggagccttcagagcgtattctcacacgagggaacgtttgacaaggctctgaccctcacagaacgatgaccagggcccagaagccatccagaattatcagtggagaagcaccttatgatcttacctataccactgtaaatcctccatgccaaccacactgacaggctacagggcactaagctcatgaaggataggagaacaaaagctgcacgtctaaataaccacaggaatcccgaagagacccatggatacggaccacgggggcaaacattacaagctgacgccctgagatataactagcaagcaccacctaggggcctgcctggaccgatgggaacacaagagaggcaaacccgaggagtccagaacgggagacaaagaggcacggcaccag

SEQ ID NO: 562012 - DNA, 720 bp, Homo sapiens
gataaatattagtactagcatttgaccatcgtcactatcataggaatatctagtatatcgctcacacctcatatcctccctactatgcctagaaggaataatagtatcgtctgttcattgatagctactctcataaccctcaacaaccactccctcttagccaatatggtgccgtatggcatactagtcttgccgcctgcggaagcaggcggtgggcctagccctagtagatcgtcaaatcgtccgaagcgacgagtatggcgcatagaactaacgatacataacctaaagcctgactccagatgcataaaactaatcgtcccaacaattatattactagcactgtacatggacttttccaaaaaagacataatttgaatcaacacaacacccacagcctaatgattagcatcatccccctagtatttttaaagcaaatcgacaacaacctgatttagctgttccccaaccgtttgtcttccgaacccatctaacaagccccgctgcgtaattactaactaaaccttgatatcctagccctgcgatcaaatgcattggggagtccgacagctcagttatgcagtgaaccagtatgacgaagaagactgctacctctctatactgaatcttcctgaggatgctcctttaattataaaccattcgagccacaagaaagtaatccatattgaatatcttcgtttcgaaagcacacttgattcc

SEQ ID NO: 562013 - DNA, 239 bp, Homo sapiens
tattaaaattatatatatataatgatatataatttattatattttattatctatatagactagcttgtcaaatttctactttaaaaagcaagtgaagataattgcaagtcagctggaagtgctgccaagatatgacctccaggaaggcccaaaagacaagtgatatttgtgtggactgctacagcgcaatgtctaactgatgcaaaatgaagaatcaatttcgaaattaagatgagtaa

SEQ ID NO: 562014 - DNA, 381 bp, Homo sapiens
gctgaacgagggggtcttgactctcactgtagtagcgtgcaaattgagtggtgagagccaaaggccccccagaccagatcctctttcaacaggtcctcccataggcaatctgtcagggtgcggggatcacagcagtcagagaggcagccctgagagtcctgagggaaggaggtgcgtgtaaattttgctgaacttagtaaatggtccctcgagaaagatatgcttggaatagagcatgtccaggtgacaatgagtgtcaatagaagccctcctctaggcttggctccaggtggctcttcggcagggagatggatgcgtgtcctccacaaggaggcggaggcatctcctcttggcatgtacttttctccttcgacctctctt

SEQ ID NO: 562015 - DNA, 443 bp, Homo sapiens
atgcgggttgatgcatgcacacgcatccatgtatagacagaatacttccactgccctaaaaatcccctgtgctggccgggcgcggtggctcacgcctgtaatcccagcactttgggaggtcgaggcagaagaatcgcctgaacccgggaggcagaggttgcagtgagccaagaccacgccactgcactccagcctgggcaacaagagcaaaactttgtctcaaaataagtaaataaataaataataataaaaaaaaaaaggaagaaatacgtgtgccagaattgtttcttccctcatccttagttatacttccatggttctaatgacaactagatacaggccagagctacagaatttatctcctgagccttagaccttattgccacaattggggttctcaagtactttaaccacagcttgtccgaaacagaacaccgtcgaag

SEQ ID NO: 562016 - DNA, 414 bp, Homo sapiens
gggtcactgcaacctctgcctcccaggttcacgccattctcctgcctcagcctcccgagtggctgggactgcaggtgcccgccaccacgcccggctaatgttttgtatttttagtaaagacggggtttccccgtgttggccaggatggtctcgatctcctgaccttgcaatccgcccgcctcagcctcctaaggtgctgggattacaggcgtgagccaccgcgcctggccgagactccatcttaaaaaaaaaaaaaaggaaatttttatcaccctataaagaaattttggggctgggcatggtggcttacgcctgtaatcccagtactttgggaggccaaggcagatggagcgcatgagcctgggagtttgaaatcagcctgggcagcataacagcaccctgtctctgaaaaaa

SEQ ID NO: 562017 - DNA, 359 bp, Homo sapiens
ctttggcaggttgaggcaggaggatagcttgagcccaggagttcaagaccaacctgcgcaacatggtaaaacttccatctctactaaaaatgcaaaaaaataagccgggtgtggtgcctcttgcctgtagtcctagctacttgggaggctgaggtgggagaatcgcttgatcccaggaggtggaggttgcagtgagctgaggttgtgcgctgcactccagcctgggcaacagagccaggccctgtttcaaaaaaacaaaaagtgtggatattagttaataagaatggatctggccgggtgcggtgctcatgcctgaaatcctagcaccttgggaggtccaagcttgaagccaagacttt

SEQ ID NO: 562018 - DNA, 236 bp, Homo sapiens
  misc_feature (141)..(141): n is a, c, g, or t
  misc_feature (192)..(192): n is a, c, g, or t
agaaaatcgtggagattgatcgtcatattggttgtgcaatgagtgggcttacagcagatgctcgttccatgattgaacatgcgcgtactgctgcagtaacgcataatctatactacgatgaagacatcaatgttgagtccntaacgcaatcggtgtgtgatcttgctctaaggttcggtgaaggtgcctctngtgaagaaagactaatgtctcgaccattcgggggttgccttgtt

SEQ ID NO: 562019 - DNA, 808 bp, Homo sapiens
gctcgcaaccggagctgtccccgggacttagtgctgaagtaggcgctgacgaaccaggcgcctggtgcggtggtcagaaaagaccatggcgttcatggtgaagtccatggtgggtggccaactgaagaacctcacagggagcctggggggcggcgaggacaagggggacggagacaagtctgcagccgaagcacagggcatgagccgagaagagtacgaggagtatcagaagcaactggtggaggagaagatggagcgagatgcacagttcacacagaggaaggcagagcgggccacactgcgaagtcacttcagagacaaataccgtctgcccaagaacgaaacagatgaaagccagatccagctggcaggcggagatgtggagctgcctcgggagctagccaagatgatcgaggaggatacggaggaagaggaggataaggcctctgtgctcgggcagctggccagcctccctggcctagacctcagctcactcaaggacaaagcccagactacactaggggacctcaagcaatcagctgagaagtgccatatcatgtgaccacttccccctggattcctcctctaggattggccagagggctggtccacatgaggggctaagagagtgagtgtctcaacttccggatacctccagtccattttggactctgctttccctgccccagctaggcctgagcccgtctcgtccatgtgcagctctagctctggtctctctctctctctctctctctctctctctctctctctctctctttttgtggcgaagtccctttttccctcttcg

SEQ ID NO: 562020 - DNA, 111 bp, Homo sapiens
acgatgaactgtcacacagtaagcactcaatgaaatatatatttaatagcaatatacaagcactgttgttcagccctcagtatatgccataatctaggctaataaatttgc

SEQ ID NO: 562021 - DNA, 724 bp, Homo sapiens
aggtttgtatctactgttccattcccaactaactatgttgtacatgctgcctgcatttccagtcggtccaacaagagacattgcgtgcaaccatttccagcaatccggcaatcaattgcaccagcattctcaagcgtccatactagtagcatccagtgttaccattccggtattctggcatacatatgcaaccagcagttcctagagtccttacaggtgcttatgcgttgctacctattccttagctatccaggcttaactatatgctacctagctattcacagctgtcctaactagtagctatccttgtgttacctattctcgggctatttaggcatactatatgctacctaagctagttcactagtagttcctaactaggtgctatgtcgctgcacacatgtcactagctatcacgtgctatacatatgcgacctagcattctctagcgtctctaactagtagcgtgtagtgctacctatgtcctagctatcacggctatactatatgctacctagcattcacagcagtccatatatagagctatccggcatacatcccggtgtccagtggctacatgtgcacctggacgttccagtgtggtgagctttcaggcacggagcaaggccaaagggataaaatagatgaaggtgacgcagtactcccccttatgagtgcctacaggccttataggccagacagatatcgggagtatattactata

SEQ ID NO: 562022 - DNA, 470 bp, Homo sapiens
tccgttgactgcgcggtttgtcgccgctggtggtgctcggtgctgaccctggtgtttgccggcgaagtattgaatacccagcagattctggggattctgctgattccgttcggcatggtgtgcctgctgtggcagggcggcggcggtgaccggttgccctggtcgatgctaccggtggtggtattgattggtctgtgcatcggctgctaggacctttctgtacgggcaggcgctgcggcgctggtcgcatccgctggatcacctggtgtggctgacgctgatcagcggcctggccgtttccgttgctggcgctggtgcgcaagcgtgcgtacttcaagcctgttctggcgcaccccagtggcggttgggcttaagggtggggctgtgcgtgttgtagagctacgctttggtactttgggccatgcagttgggctcgattgccgaaaccgccgcgctgcgcgaagtcagtg

SEQ ID NO: 562023 - DNA, 679 bp, Homo sapiens
gcacgtctgcctttgagggtgctgcccccgtcctcctccgggcccccctgccctgccctgacgtcactcacccgcggtctggcagcgcagacatcctcatgctgaaggagcaaaccgactcctcacccaggaggtgaccgagaagagtgagcgcatcacgcacgctggagcaggacgaagtcgggcagctcattaaagcagcgtgtcaatgagtgcccgcctgcactgagccagcaggacggggagacctcctggattccacacttcatcatagtcccttgtggaccgcagtgaggaccaccagggccagcctggcactcagcccttcgaggagtgggcgccccaatcagaaccacaccactctcctggcttggagaccacggcggcaggcgacagagcaacagtcccagcgagtggagcggccttcccttgcacgacccttgcccagaatagggctaccaccaagggctagacccaccgagacttggtccccctgaaacaccgcgcgctatcaatcccgattataggactcactagagttgcctcgaccatgggacttggagagctctcatttgaagtcactggcaatagatccagtaactaacttacttgcactattgtacaagatgagacaagatgtgggtacacgcatacaatgagttgaggcagtccacctccg

SEQ ID NO: 562024 - DNA, 158 bp, Homo sapiens
taggtctccgggagttaaaataatccagagtgcaggccacgacgatacctgagcaacctgagcttctattcataaatgaaggtgaaaaatagtgttttacatggaaaacagcagtatctgctcacattctacattcattctatggttataaacacagt

SEQ ID NO: 562025 - DNA, 767 bp, Homo sapiens
cgagcaggagaggcatgtgggaggtgataaaatcttacaatcaaaataccattataaagaagaggtgaaatcatctgtgataaagttcaagttaaactcagcagggaagtgttttcatccttacaatacatgcattactgattataaggacttcacatggggaagaagcactccaggaaacaaaaggtggtgcagccaatagaaaatgggtgaagaatgttatttcctttgaattctacacgtttacagcatatgacatagcagaagacgtcaaagccatgttactgaattcgaaaggaggtcggctaccttctataaacgaatggggacagacagacccagaggcagaggatggaggctggtgcctggtcagtcctattttggacgctgttgttgtaggtggagagcagagagaggagaaaaccagcaccgtccatattaataacctgtgcaatctcctcggagtacaactgggggactgtgtgatggtcgggtgccacattagacaccgacatccaggaggcctcaatgccaggatggacacgcaacagtctgatcacctcaacctgcactagtgccactgaaggtctccccaagttcccgatcacatggtccctcctgtgcacgagtacctgctctctcaacgtctagatgcaaccactattcccttaagccctcacaggctggttgattccaccatcgggcttgacacaacactggcccccttaaacccgccaaaaccttgataggcactgcggccccctgga

SEQ ID NO: 562026 - DNA, 676 bp, Homo sapiens
tattattaactgataaacttttcttattctatgatgaaataatacttccaggtattgctcagttctttccgtaattcacacatctaaaaattcaacatctgaaagtaatgtaaattagttatgtctgaaattttaggtcaaaacgaaagggaggcaagataaataagatttcccccccccccccttttagcaatctcccagttacttctttagctttttgattggaagtggatgaatttaggagaattaggtggtaaccattccctggcataaattggctttggtgatacctcctggtaaaaccctggcttgtgaaaaacaaaagtgttggactctacgagaatctggcggagaactccgggttacatttggccctcacagcagcgcagtggttaggtaaacatctttccccttgctgggcgtagacccccacacttgggcttccaacgcaacgaggggttaccctacagggtaaatttctcttcccccacgaacatgtcacagcacgctctcttggaaccccactgtgtggcgacactcctgacgtttattcaaggcgtccggggtcaacacccggggtgttttccccatgggacgtttggtgctattctcaacaacgcgttgcgatctggccttttgggtgacccctcaatgtactctccccaccccgtctccc

SEQ ID NO: 562027 - DNA, 137 bp, Homo sapiens
cgggagcttccctgctcccactgcttcctggagtggccacattgcccttctcagaggagcactttcctcaggtccttctcattccagaatagtcaatagctcaccacttactataaaatcagctggaagccttaaaa

SEQ ID NO: 562028 - DNA, 380 bp, Homo sapiens
tcctctcgtcgaaaacgcaagttacgtcatcccccaacgcaccccgaaccccgcgtctaccggaaaccgacacgtcaacgttctttttattttttgttagatcccctcccccacatcccgctctgtcgccatcggggcaggtcgggtacgtgcgtgcgttcccagggtagtaccccaaattcccgttccgtaaacgggatacgcatacctcctcgtcttacttcatccaaatattcactagtcacccccactcccaattcccctcgcacgcccggcgcgcggggggcgcgagcgcgctgtgttcccgtcgcctccgttttccttcgacacaccgtatttcccttactatctcttctccctcattcttctctcccaccttt

SEQ ID NO: 562029 - DNA, 408 bp, Homo sapiens
agaacactgattactatcactaatgacaagggacgtatgagcaaggaagacatagaacgtatggtccaggacgcagagaagtacaaagctgaagatgagaagcagagggacacggctgtccatccaagaattcgattgcattcctatgccttcaacatgccacagcacactgtagaagcatgcagaacacttcaaggcacagcattaacgcatgcaggcacaacacagcaagatgctggacaagtgtaatgcaataatcaactggcttgcatcagactcagcacagctgagaaggaagcatctgaacatcaacagaaagcagctggagcaaagttagccaaccccatcatcaccaagctgtaccagagtgcaggatgcatgccaggaggcctgccgggggtaggaggt

SEQ ID NO: 562030 - DNA, 254 bp, Homo sapiens
tcaatagaagaggcaaagctgaattgtaaaagttgcgaaatgatggcgggcgcggtggctcacgcctgtaatcccggcactttgggaggcgaagcgggcagatcacgaggtgaggagatcgagaccatcctggctaacacagtgaaactgcgtctctactaaaatacaaaaaattagccgggcgtggtggcgggctcctgtagtcccagctactcgggaggctgaggcgggagaatggccggaacccaggaggt

SEQ ID NO: 562031 - DNA, 752 bp, Homo sapiens
  misc_feature (339)..(339): n is a, c, g, or t
  misc_feature (357)..(357): n is a, c, g, or t
  misc_feature (393)..(393): n is a, c, g, or t
  misc_feature (408)..(408): n is a, c, g, or t
  misc_feature (437)..(437): n is a, c, g, or t
  misc_feature (440)..(440): n is a, c, g, or t
  misc_feature (464)..(464): n is a, c, g, or t
  misc_feature (466)..(466): n is a, c, g, or t
  misc_feature (479)..(479): n is a, c, g, or t
  misc_feature (505)..(505): n is a, c, g, or t
  misc_feature (517)..(518): n is a, c, g, or t
  misc_feature (525)..(525): n is a, c, g, or t
  misc_feature (527)..(527): n is a, c, g, or t
  misc_feature (529)..(529): n is a, c, g, or t
  misc_feature (548)..(548): n is a, c, g, or t
  misc_feature (551)..(551): n is a, c, g, or t
  misc_feature (559)..(560): n is a, c, g, or t
  misc_feature (566)..(566): n is a, c, g, or t
  misc_feature (568)..(568): n is a, c, g, or t
  misc_feature (731)..(731): n is a, c, g, or t
cccaggattcaacacgggccttgagaaatgtggctcttgtacctcctggtgccggccctgttctgcagggcaggaggctccattcccatccctcagaagttaatttggggaggtgacttcccctctgttccccaagccttaccccaacaactttgaaacaaccactgtgaatacagtccccacgggaatacagggtgaagctcgtcttccagcagtttgacctggagccttctgaaggctgcttctatgattatgtcaagatctctgctgataagaaaagcctggggaggttctgtgggcaactgggttctccactgggcaaccccccggaaaaaaggnatttaatgtcccaagggnacaaagaatgctgcctgaccctccacacagacatcnccaacagaggagaantgggaccaacaatgttcaacaagggcgtnccngccaacataccaagccgtggaccntnaagaaagggcctnccggagcaaaataagggaagaagaanccccacccccannccaaccncntnttcacacacctacgctggnagnctacttcnnttccgncngtccaggctatgagcttcaggaagacaggcattcctgccaggctgagtgcagcagcgagctgtacacggaggcatcaggctacatctccagcctggagtaccctcggtcctacccccctgacctgcgctgcaactacagcatccgggtggagcggggcctcancctgccacctcaagttcctgg

SEQ ID NO: 562032 - DNA, 1032 bp, Homo sapiens
ctatgcagctatatagcctaattgccacgttcccccaagtgcccttgtgtggtattggggatccaagcccccgtctatacgaactcgggactcgaggcgtgggcaacccctctctggggcctccgctcgtggcctccgcgccatccgtcatatgccttagtatcaacacccaagtagcttcccttccgcctctgagtggaacgccgcagtctctattcgaaccgggtcatgtcaatgtacagtgcctacctatggtatttttccgtggcccccgaagccctattgcctcgttccgccagttccccactggcgctgtcaagggcctcctgtctgcctcctgtctttgtgggacctgtttcagtctcctaacgttgaatgccgaatgagccaagacgagtcgaccaatgaagggcatcacgctgaagggtcccgcaggggatagaggcttgccagccccttctctcgcttcccctccctagcaccagggaccaagttggagggaagcactgcagaacctgtcacaggcacagtggtctcctcaagcctgcctgtccttgcagtagtcccctatggcattggtagcttacacctgactgactggtagcccctctccccgactcccacttccagaagcctaggagggaggcgatacctggaagactccggtcacctccttgcttgactacagggcctaaatagatgctggtcctccgcaacctcactctcagactccctgccaccgtgttccacagggttcatgcgcgtcttgcctcacttcccctcactgtcacatgcatgacgttggacttagcagggtctaaggccacactgtgtgacctcgtctgacttctcttcctcgcaccaaggcagctttccttaccttgacacagccccagaccccacaaagccttctggacctggaaagctctggggaaggactgacagaccccaggaccagtcatggggctcagggcagccaccccgggccgctgaccgactgacctctcctattaaggcccagcccaaagccca

SEQ ID NO: 562033 - DNA, 209 bp, Homo sapiens
ccgtggacagagcttaagcgttctcggatcctctcttggactttagctctccatctctgctgaggggatatgaaggtatttgcatttctcctgttaatgaagggattaagttcataagattccatgctttcatgtgattcataacacaaagttattaccgtaaggcgccaggatggcagagataactctaggttcgtcccgaagcataa

SEQ ID NO: 562034 - DNA, 811 bp, Homo sapiens
gggacgcccccttgtggtgggagacaaaacagttagagttgtgtggggcgcgagattaatcgcaatgagtgatagggatgtgtgggcctggcggccgtcttatatagttggtgcttttctttgtggtttagttgtgggtgcgggtttgtttgttttgtttttttcttggtgctggagtcctccacgcgaggtttttaaaagctcggtgaccggctcgtgattgagggacacacaccccgctcgcggttgtgggaggcgagagggacgtctccccgcccacagggttgcaacaaacttgtggctcgagaggagcttttgtgtggtggcacgagactcgggtgttggtgttttttgtttataagaaagggtgctcttttccgtcccaatttgtgagaagagagcactctgggtttatcagccggcgtagatttccctcttgcgactcctttctgtagaggcgaccccccacgttttttgtcttttttagaggagagaaggtgcgcccggacttcttctttccccaggtcccacccgcggggggtgtagtagcactcttgtttgtcgggtgattgagcttggacgccgcagttgttttagtgtctgtgtcctattaacgatttttatcttgtcggttctattttgaagatgatgggggcctcttgttggctcccccgtcccccccgttgtgttgcgccccccgcctgaggatgattgatgaggggcttttgtttttccccgggggggggggggggcaccccggggtttcctgtaaccgatgggaccccgtttgataaaaggccccccctcttta

SEQ ID NO: 562035 - DNA, 214 bp, Homo sapiens
agccagagttccccaaagatctttgcgcatcacctaagtaaacataacctcaccaaatgaaccaaataaggcatgaagaaccaatcctggagaaacagagatatatgacttttcagaaagagaactcaaatagctgttttcagaaaactcaaattcaagataatacagagaaggaattcagaattctatcagataaatttaacaaagatctttg

SEQ ID NO: 562036 - DNA, 1844 bp, Homo sapiens
ggcaggccattgcaggccagcccagctgccaggggcttcatgcttgcagtggggccaggctggcagcgttgcaggcacacacctgccagcatacagtttcttttctccttttgcacacagcatcagcagcattcaatcaccacactcactctcaacacacacatcatcagctccacatcagtgttcactcaacgcatcatttgcgtctcagccgattcacagtatttatcacacagtcacatctttcacatcagcgtgtcacagcattctctacagcagccacaccacatcatgcacaaggcaccttccagcacagcagctcagcgcatgcagtgcacatggcacacacagcattacacacagggtttgtcttccacacacaccaagtgaactggggcagagtttaggaagcaatgcacaagcctttcgtaatcccattgtgcacgttccacacacacacaatggtccatctctcacacacatgcaacacaacatttgcaagccagcacaaaagggccactacacaatgcaagcctgcgccccggccacaatattccaagtcaaccacagattcaggcacaagggtggccaaagtaggcttatttctgcaaggaatttccacacacgagtgcaaaggtgtggcaacctttcacaccactcaggcctgttcacacaaggttcgctccaaggtttatcacatcacaagcttctggatccaggtgggttgcaatcctccacagacaatgcccattcttctaggcgacggctggcacgacattcctttattatacgagcacacgacggcacggaatttcaccacaaaccgccaggacgacgggggttttgcacttttacaaacagcacggcaacccgtagttggagacaacacttccacctacattggaaccaggacagacggtgggggcatggacaactctctggctgcgcttcaagtcatctcagcacacacgcagccctacacagctgctccacacccggcccattcgttgacctctgaaaagaacgcgagcccacgcaacccggcacagaaccagcctggcgcgacacaccagcaccttctcacacctcctggggcgcaaccgtctgacgcccaagacgcaatctggccacaacacacaacacgtccccggccaaccgaccacacgcaccctcacggacaaagcgtctatgcggacacgactcggcgcacacaacacacgctggtgcacacgacacacacacgacacaagcgtcacgcggaggcaacaggcgccgacacaggcaccaacaccgcacaactaaccgagcgacaaggacaacagcagtcgacgccacctcaccgcacgaagacgtcgcacacaacacataccatcgcagaacacccgcacaacacacgacactccagatcaacaacagcgctggaaccaagcggaggcgcacaggccggacacgacacacacaagccccaccgacatgcgaacacaacacgacgcagctacagggcccacaatcgtgtcaccacagccacgcacacaccaccacctgtcccgccaaaacgcacgtagatacggcacgcacagcatcgtgcacaacaaccgacacgaccaaagccacaaacacgccgacacagcacactgggcacgccccaaccatacaacaaatatctagaaaaagtaggaagacactagcgcccacagacgcacacacacaccgacagcgcacaaactatcaacgcggacaggccacagccgaacgaggagacagagacgcacaacgacacgaggcgcaagcgacgccacagcagtcagcagcgacggagcagagcggcaccgcaacgccaccgc

SEQ ID NO: 562037 - DNA, 113 bp, Homo sapiens
gccttacagacctgccactgtgtgatgaactgggtataatctcacaaatcgatgggactgcaaggattgtcaactgaaatgaacatgattatactctgatgggagaagagcgc

SEQ ID NO: 562038 - DNA, 349 bp, Homo sapiens
  misc_feature (10)..(10): n is a, c, g, or t
  misc_feature (29)..(29): n is a, c, g, or t
  misc_feature (284)..(284): n is a, c, g, or t
tttccccccnagtcaaatgcaattctaancatctcaaccctcctaagaaatccaagacatttttttcaggtcactttaagccggggcaacccctcgctgagggagctggccgggtcacgctcctttctcggggcttcggcttgtccagctgtgaagtgggggatcgggggattttccagggatcctggggtgtcccgggggagggcgcggtcccctctccgtcttggcggggtctggacgccgtcgccttctcctgggccgccggacccaggagaggagaggtncgcggcgctcagcccgggtctgcggcttccgggagggtggcggcaacgagcctgtgctgtggcac

SEQ ID NO: 562039 - DNA, 475 bp, Homo sapiens
cgatgcaatactacttgtcgtgaagtgatttacaacagtctacccgtatgcgtgctatcgtgtcacgtctgtcgtttatccatggttcttacttggaaaacccttgcggaacagaggggaacaccgggacaagagaaatgcagacaagataactgaaaggcaaaccaagatacatggtacatataaaactgtatcaaagcataggaaaacagttgacccccaaaagaaggcattcacataaaacactcagagtgaattatgtaactgatagacaattgtcttctaatgtgaaaaaccagtccaaaaaacagaggcatcatggcattaaaccttatctgaatataatagaatttctcatgccattagtcactttaaagaccttgtgaaacatggctccctagtcaggcatatgaagagtgaagagtcaaggggatgagcccaagacagatctcataatattaggagttgaaagcag

SEQ ID NO: 562040 - DNA, 850 bp, Homo sapiens
cgcgtttgaatggcctgagtgggactctggccagaagccgaggtgactctctaggctgcgggcgctggtcgtcagcgccgaggctgggctgaggcgccgcggtaccatgatggcgccggtaagtgactgccgagccggtgcgagccccgcgcccgcatgctgccctgccctggcagtggctactccacgccgggcttggctgcgccctgggcccacctgcatgtgccccgctggctggcctcggctcggccgtggctcgctggcagcgctgccgggtcccggggcgggggctggcaaggcccggtggcggagcccctctgccggcccctgcggggagagtcgggcagcggggcgctggggggctccagggggaactggggccgggagaggcgtggaccgaacctgttgtcacttaacttatcttcgggtgggagtcgacagctgaacctggggaaggggaaggacagaaccgagtgtggggcgaagcattttttgagggacagggttttccgcagagcgccttaggcccgggcccaaggcatttccttattttccggaacggggtcctcgggattccgtgaccgggatgaagcttttgtttcgcagggacaaaaaacttgacattaagtgcataaggaattggtcgattggcaattttaaaaaccttactggtaatttcttgacaaagttggtctgtacaggtattctagggcttttacataggcctcttaaagattgcttagatattggagataacaaaagagttgcgaagtacctgtgggttataaagtccttgaaaacggagatacctatgtaggacatggcgttttaaaaacattggtaggagaat

SEQ ID NO: 562041 - DNA, 230 bp, Homo sapiens
aggaaaaggaagacttttgaccttttttctggggaaatatgcagtccctccctccttttggaaggtgaaggaaaatgggtttttaaatgccttgtccatcctgtttgggtgcaatgttttgctcccagaaaaaaatcagatcatcatgtggggattaccattgttcctggaggactcctacccttagttgaatttccttattaaagttaaatttttttataagaccctga

SEQ ID NO: 562042 - DNA, 176 bp, Homo sapiens
gctctttacaccatcgaaacgcattgcttcgtacccggccatttcccagtattttgattagctgagcatactcctgaccatcctctttgaataccagtgctcttttatcagattcattgtcattcttacccctgcgatctgatctggacctcctattccttttggcccttatcgaa

SEQ ID NO: 562043 - DNA, 305 bp, Homo sapiens
gaaatgtataccatgtgactgccagggatttttgagaatgaataaaacttgactttgtttaaaataagttaattagccatattccttatctgccagggttttttgtgtgtgtattttgtttttattttcgatattccagttaggcttaatttttttatacttatgatcatcatgaaatgaataagagggcttaagaattttgtccctttgccttcggaaaagaatgagcagcaaaaggtttactaataactctccccttggggatttaatgtctggtgcttgccgctgagtttccagaatttaag

SEQ ID NO: 562044 - DNA, 256 bp, Homo sapiens
  misc_feature (116)..(116): n is a, c, g, or t
gcctagcgtgggttgaatctaaatagttaacaagcttgcgcatatccaggggcaacatctttccagtgagtgaggtgataaattcccatgtctttgtgcaatgaagcatgactaanaatggatgtctcgactttttggaagattacccctttctgagttgcttgtgtaagaggcagtgccaagaaagatgtactgcatgattgcctggctgggattctatgacttaaactcatgtttgtggactggacattacggt

SEQ ID NO: 562045 - DNA, 182 bp, Homo sapiens
tcaggaattcgaggctacagtgagctatgattgtgcctcttcattccagcctgggcaacagagcaagaccccatctctagaaactgtgtgttagtgtgtgtctgtatgcatgtgtgtgtatatatatatctgtgtgtgtatgtgtatatatatatatacatatcccagagtgtggtgtcttg

SEQ ID NO: 562046 - DNA, 116 bp, Homo sapiens
gatctttgtagcgaggggtgatactgagggggagtagagacagctgacacaggtgaacgcgctctataaaaatacaaattggtgcggtgtggacatgctgtgatccaggtattggg

SEQ ID NO: 562047 - DNA, 250 bp, Homo sapiens
  misc_feature (128)..(128): n is a, c, g, or t
cgcagataaggcttgtttatttaatggctgatctatgtaatcgcagaggccagtatgtacagacaaagtgggaggtttatttctgtggtctcttcctcctttggctaaggtcttgagtgatctcctcncttcttgtgccgtggaggctgctcttcacgtgcgctgtgcgttgcttccttggtccttagcacctgcggtgcctcagcctgggtcagccagggagcttcttgcggggcctatatctggcggg

SEQ ID NO: 562048 - DNA, 690 bp, Homo sapiens
cggggtctgcaaatctacgcatttgaagatttaggtaagtccagaagggattaagtgcgagtccgaaaagacctcaaataaaaggtctataagaacgggaataaattgaacaatttctcgcataaggagaaaggggtactgacacacaggagagtgttcgtcacaggaaaagagcagtgtgacaattttggacaaaataagccgcgcatcaacagatggagtcatgcatatacagtgaagtcacatcaacttaaagcaagatcgaactaggagttctctagccgtagtagtgtttgtatgtgtacacacataatggtaggagaatgcagagtatagccagcgaaattcagtcaataaagatgtagtgtcggtgaaagcatgtgccatcaatgtatgctgaacagtagacacagaagtagtgtatacagagatactgtaggcagtataaggcatgtaggagagtaagatatagaatcaataaacttgtaataggcagtacgtaaatatataggtagtggttgttttcaatatgactatggtcagaccaggttatggattagcctgcagagaaataaaagtatgtgttaaagagtggaacatagacacgcagtgaaatcgaagcagtctctctctctctctctctctctctctctctctctctctctctctctctctctctctctctctctc

SEQ ID NO: 562049 - DNA, 283 bp, Homo sapiens
aattgcagctactcgggagactgaagcaggagaatcacttgaacctgggaggcagaggttgcagtgagctgagatcatgccactgcactccagcctgggcgacagagcaagactccaaaaaaataaaaataaaaataaaaataaataaataaataaatttctccttctcaaatgggtatcagtcatattaaacttgtgctcaccctaatgatctcactttaatttgatcacctgtgtaaaaaccctattcccaaataaagtcgcattctgaggaactgcaaaa

SEQ ID NO: 562050 - DNA, 436 bp, Homo sapiens
  misc_feature (386)..(387): n is a, c, g, or t
  misc_feature (425)..(425): n is a, c, g, or t
aacgggagatgcggctgaatcgatatcttgattgtcgtcaatagcgctgcagaacatacggaggtgtggatgttccgccaatatactgatttcctttcctttggataaatgcccagtagtgggattgctggatcatatggtagtttgatttgtagtttttttgttttatttattttttaatttttgagaagaagtctcactctgtcgcccaggctggagtgcagtggcacgatctcagctcattgcaacctccacctcctgggttcaagagtttctcatgcctcagcctcccaagtagctgggattacaggtgcctgccaccatgcccagctaatttttgtatttttagtagagataggatttcaccatattgaccaggctgatcnntcagctctgacctcgtggtcagggctccaaagcgctgngactacagttg

SEQ ID NO: 562051 - DNA, 265 bp, Homo sapiens
actagtgattgtctagaaaaacattctacattagaaataccagggcgaggcgcagtggctcatacctgtaatcccagcactttgggaggccaaggtgggtggatcacctgaggtcgggagtttaagaccagcctgaccaacatggagaaaccccgtctctactaaaaatacaaaattagccgcgcgtggtgtcgcatgcctgtaatcccagctactggggaggctgaggtgggagaatcgcttgaacccaggaggtggaggttgc

SEQ ID NO: 562052 - DNA, 114 bp, Homo sapiens
gatcctggctggtacatggctcaacccgtttcttcggagcttgtcacagtgatttgtcttgcgcatgtcagtcttgcagcccgcgacgatgatgggtaccttcttgcagaaatg

SEQ ID NO: 562053 - DNA, 594 bp, Homo sapiens
  misc_feature (169)..(169): n is a, c, g, or t
  misc_feature (172)..(173): n is a, c, g, or t
  misc_feature (191)..(191): n is a, c, g, or t
cagagttggtgtcacagacataggttttgcaaatcagtctttcttttctttctttttttaacaaataaggtaagaatgggttagttttagaataagattcagtgtgattacatgaaaatataattttccttataggtatttctccctgaaagtcaaattccattaaaanttnnctgggaatcacagaaganaaacctatttgaaaaaaaaaagaaagaaaagaaaagcaaaaaacaaaaaacccaactagctattcgcttattgcaatataataggtggatacaagaatcggatttaagatatgtttgtttataataaattaagcagacagcatctaaagttactgtgaaaaaaccagacaagtctaacaatacctaccaatggacaaagtaattcatatataaccaaggaagtgactgactaaattttaattgcaaagcagaatgttgtcaaatgctctctattaggttgggtgcggtggctcatgcctgtaatcccagcactttgagaggctgaggcgggtggattgcttgaggccaggaatttgagaccagcctggccaacatggcaaaaccccatctctactaaaatgat

SEQ ID NO: 562054 - DNA, 927 bp, Homo sapiens
gaaagatagctaagcatgcctgtgttaattcggtcctgtaactcgagcaccttgcggctctgagagtggacagacgtgtgctcagcctgtgtactggtggcaaagctggattcattttcctccctgtgctgatcttctggtggcccacagctggtgatatggatggcactgacaccctgtgtctcgtgctgcttgtatattagaagaggcagaacagtgataaagacaaggatactaaatgggcaatggactgctcctgccctccactggtgctcactgtgcagccctgaccctactattcttgcaccctgtgagccacctgagactgaaccaaaacccaggaagcggctgccaccaaccagccctctgcatgattgcaagatgtgccctttgatgcatgttgacatgcacatggatgatcatagctgtgctctgtgggtgaatgtggtgatgtgaaatgatgggacaaacataatggtgatggtgatctgatgttgatgcctctgcaccctgcccttcccatgaccacctgtgccacatgactgtagtcattgtcatgatgtgctgctgtgaagatggacaccatgagctacctggctgtcggctgaaactgtgttaggacactttgcctcctcatgacttgtgccccttagatgtgctgtgcaagtgctaggggtgcaaggcatgatggcttgctaattgttcaaggaacacctgatctcatagaaaagcttgtgcggcttccttggttccccctttagacctggcccctcctatcttacccatcctgacccctttctgggcgcccctcatgaatcctgatcaggcctgtggttgtgaattgtatgtgtcctggtaaagcattgtatgcattatggtacaagtcatgtgccaattgcagctttgtcttgtcactgtggccttgtg

SEQ ID NO: 562055 - DNA, 535 bp, Homo sapiens
cgctatatcttgttgctatgagtacaacttttttttttggtattaaaagtaaagacagggtcttgcgatgtcgcccaagctggtcttgacctccgggcctcaagcagtcctcccccttcagcctcccaagctgctgggattccaagcatgaaccaccattcccggcctataattctggggtgtctaaactattaccaatgaatacaactttaggtttcttctccctttagttatctcgtctcttctctctagatttaaacttaagcaagcagaagcctctgggattctgtactgactagaataattcacggcttccttcttatggcgagtccctgtccatcataatcctcccgtggatcatgctgaataaacagctggtgacttgagatggggagaaattctacagagtttccttgcctgagcctttcaagggctaagactcaaaaggttcaacggcctaaagcaataaacaccaaaagaggttacattgcgaattggcttatcgcttatctagcagtggacactaatgaaccaa

SEQ ID NO: 562056 - DNA, 1241 bp, Homo sapiens
ggcctacgccatacggtcgatcgctccacggtgatagctagagcagagaggccctagatagagactacagacactctactgtacatatgcggagacagatttggcacttgcgtctagtgcggctttatattcgcacttcattgatggatgttaatccattgcgtggactttctataaggacgggagttggcagacttcctctgaggagaatgtccttagtaatcgctaatctagtttgatggacgtcgctaaacatctagggggtgactaacaatgggaatctatgtagagtcgttcgtgagaatattagagatgagcaaaaattcaggcagcgaatcatgtcaattggataggatggattgctcgtcatcttgaggctcgtgaatacacgacgataggagacattcattcagtgttcacctagtctgagaatgagtacaacggggtctccatcagacgccctctgtaacgcaagcagttgggagtctaggtgacttgaatcgtatgagtgatgaggagaatggtaattcgagaaattaagagtgttgtatttaaacaaggtggagagagatagagaagcaataaaagagataagagagtgggaaggtggggatattgaatggtagcggagtaagcggcgagcaaaaaacgatgagcgtctaaatgatagagatcttgggcgccctagccatggggcacatgatagcccgtggcttcgcctttcgcccgaagtgccttttgctatggggtgacagacagcgtaggtggtacataggtcgagcagcgggagcgaacttctcccaataattacaggggagcgcgacagtgattcaaatcctttggctcgggaatatacgactcgctccgaggggagtgtaaataggcacgtgtgtcaatcattggctggtgacaatggcgggggcgaagaacaaacaaggccaagggaagggaaaacgaccttcaccataggcacaccgagagagcaaagaagcgcgcccaaacatcggccaaccaaaggtggataggggcactgggccttggggcgtggggggtctaattccaaggcaaatttccttccgctatttactacaatacaaagggtaggtttccaaaagttctatacctagggtttgccaacacaaaggaaaccaagggtacctgagaattgaatcatcacaactaaattgggggcttagagacatttaacccccctttttccgaaccgtaggatccaaagccga

SEQ ID NO: 562057 - DNA, 162 bp, Homo sapiens
cggtgggtgtggggagcaggaggaagtctaggctggagatagacatcagcactgggaggatcactgaagctataggcttaagttctactagatcaacggctttgagactattgtgtctataacccacaggcaaaagtacattgtatatcgacaattctgtgt

SEQ ID NO: 562058 - DNA, 151 bp, Homo sapiens
cagtgcgccaaattcaaacagtgcccagagtcctgacagtgcccatagtccaaacagagtctagagttcaaacagtgcccagagttctaacagtgcccagagtccaaacagtgctcatagtccaaacagtgcccagagttcaaacagtgcc

SEQ ID NO: 562059 - DNA, 118 bp, Homo sapiens
gatgaggaagagaacgagaaacagaataaacagaactcgactagtgattctagtgaaggaaaaacaaaaagtgtacggcatgcgtatgtccacgaaccatatctttactacgaaatac

SEQ ID NO: 562060 - DNA, 546 bp, Homo sapiens
  misc_feature (380)..(380): n is a, c, g, or t
  misc_feature (424)..(424): n is a, c, g, or t
cttgcacatgtccaccacagcagacctcggagtactgctaagtgtacctgtgtcaaatccgcacaggactcaatatagccatttattcttgatgtatgcaattgcacattgtaattatattaacagagcacactaataatttgtatagattatatatattagatcttgggtatggtttttaccttctcccatggggaacttcttccttcctgatgtggaaatttgcaattatagaagggtggggggggacctttgaacaacaacgagcgcggctaagaacagagtgagagagggccatcctggttttatcatgtgcgcgcgcaaatgtatatagttgattggaatgaggttttatgaatattcatgtttttgaaggcctntaatttctgtctgcatattagcttttaatgtgtgattttaaganagaatactttgacacctcgtctcaatctaacatactactctccaccagacatttctacttatattcacttacattaccaggtctggaagtattttattcactatgtatatttatacctattt

SEQ ID NO: 562061 - DNA, 728 bp, Homo sapiens
  misc_feature (7)..(7): n is a, c, g, or t
  misc_feature (21)..(21): n is a, c, g, or t
  misc_feature (34)..(34): n is a, c, g, or t
  misc_feature (71)..(71): n is a, c, g, or t
  misc_feature (77)..(77): n is a, c, g, or t
  misc_feature (92)..(92): n is a, c, g, or t
  misc_feature (125)..(125): n is a, c, g, or t
  misc_feature (241)..(241): n is a, c, g, or t
  misc_feature (261)..(261): n is a, c, g, or t
  misc_feature (335)..(335): n is a, c, g, or t
  misc_feature (347)..(347): n is a, c, g, or t
  misc_feature (447)..(447): n is a, c, g, or t
  misc_feature (452)..(452): n is a, c, g, or t
  misc_feature (524)..(524): n is a, c, g, or t
  misc_feature (547)..(547): n is a, c, g, or t
  misc_feature (612)..(612): n is a, c, g, or t
  misc_feature (680)..(680): n is a, c, g, or t
  misc_feature (726)..(726): n is a, c, g, or t
gatgacnatatagccgtctanaatatggactatnaattctgcaggtgtctcttctcgccctggcggggaangccaanactaaggggctgcanagcggggtggacattggcgtcaagtactcgganaagcaggagcggaatttcgacgatgccaccatgaaggctggccagtgcgtcatcgggctgcagatgggcaccaacaaatgcgccaaccagtcgggcatgactgcctacggcacganacggcatctctatgaccccnagaaccatatcctgccccccatggaccactcgaccatcagcctccagatgggcacgaacaagtgcgccagccangtgggcatgacngctcccgggacccggcggcacatctatgataccaagctgggaactgacaagtgtgacaactcctccatgtccctgcagataggctacacgcagggcgccnaccanaacggccaagtcttccgcctgggccggcatatatatgacccaattatgcccccaaggcacaattggccgatngggctccctccggcaccggcgantgcccggacccggggaagtcctgaattccccttactaccaggaagaagcccgctatgagctccancagctctctcccaatctctccgaattcttgatcccttatctaaagattcttgatccctattctaaacngtatatattagcgccctctaaagatccacttctcttttaaaaaaancg

SEQ ID NO: 562062 - DNA, 848 bp, Homo sapiens
  misc_feature (6)..(6): n is a, c, g, or t
  misc_feature (88)..(88): n is a, c, g, or t
  misc_feature (106)..(106): n is a, c, g, or t
  misc_feature (137)..(137): n is a, c, g, or t
  misc_feature (233)..(233): n is a, c, g, or t
  misc_feature (396)..(396): n is a, c, g, or t
  misc_feature (440)..(440): n is a, c, g, or t
  misc_feature (451)..(451): n is a, c, g, or t
  misc_feature (453)..(453): n is a, c, g, or t
  misc_feature (582)..(582): n is a, c, g, or t
  misc_feature (600)..(600): n is a, c, g, or t
  misc_feature (656)..(656): n is a, c, g, or t
  misc_feature (677)..(677): n is a, c, g, or t
  misc_feature (682)..(682): n is a, c, g, or t
  misc_feature (687)..(687): n is a, c, g, or t
  misc_feature (689)..(689): n is a, c, g, or t
  misc_feature (705)..(705): n is a, c, g, or t
  misc_feature (757)..(757): n is a, c, g, or t
  misc_feature (847)..(847): n is a, c, g, or t
ttgctncagggccattgacaagcagcccaaacaagcggcccaccaaggccctagggtcgtcaacaagtgcagcagcaataaaggcgtnctcgtatatatgaaccancagcagcagagccaggccaggctcgcttgcncgcagtgaatcagcttctcgaagagcgcgtacctggggttgaactccagcgtgggcggcaggagcggtgcgcgcccctcctgggtcttggccagcngcggcatgcgcaggaagtggcgggcagcccccatctccagcacggtgaccatggcagggtgggtgtccagtgggagggtcaccttcacgttggtgaaacgcgaccccagcacaattctcacccaggccatgagcccctccgtctccttctctgaaaggcactnggcggctggggacctgcccccaaacttctcctccttgtagtganccacgactatntncgtttccacagagaacagcttcttcttgtcaaactcacgaaggtgcagcagggtgagcccatcaaactgctcaaagcagaagagaacctctgtgtctctctcctccatggcctcaaagtagggtgagtnccctgccaggggacggtngggggcgcacaggtagtagaagtagcgggtgccggcccgcatgcggctggcgtatnctgagaagctggttagctgcncggangcacngnaggactcgtagcgcanagctttgctatgttctccttgaactctgctcggtggcggtgacaatgccctnccgcatgaacaggccgtgatcttcaaaaaactttgcatacttcttagcatctcttttactctggtcaatgaagaatttgatcagcctctnc

SEQ ID NO: 562063 - DNA, 930 bp, Homo sapiens
gatggtcagtggttttggcaaatccccggtgtgagaggtggtagggagtgctcccggcggcgacggggccgatgttcaccagccgccggggcagtagtcgaaggcccggcgcggatgtcctgggtgccgcgttgcggggcagtgaacgcgcgccgggcgtggatgggccgtgcgccgggtgccagtacgctgtaccggtgctccgtccccgcgttgtacgcgccttcaggtcgaccccagcatttgggctgctcatcgctgctgggcggaggaggctgccgcctaagacgggcataaagagaatggcgtgcactttctgcagctagagctgattagtgggcgctggatgtgcctcctttggttgctctcccatgcacacaggagacagcggggccaccattgatacttggcaagtgtttgttgacatcctttgcttgcatggtcaagtgactgcccgcatgttgtcagctccgtgcgctttccaggcacattcaagcaagcagtggtgaaaccagtgggcatgagaaggtgccggtgttccaagggatgcagggggctcgacaaagggaagggaagcaggccccagcaggaagaagaaacatgttggaggccggaaaccccagtacgagggggctagaactcaggcttagaagacttctgcgtgcggggcggacagaccttttgcctccgatccactgccgacacagttgtgtgcttccagcacggataattaccctgcttgccagtggggggaccagattgtaacgtccggggtctgaggggccccctggagaaggttctggcgttccagccccgaaggcggcgtgagagcacctgtttggcgcgtgcccttgttcggggcgggctttggccttgttgggccagcactgtgcacgtgcgggcacaagtcccttttggctaccgcggggg

SEQ ID NO: 562064 - DNA, 322 bp, Homo sapiens
cacgaggtggacctgcactcagaggcttgaaatgacttacagcagcatgaatacaggttacttggacatgatccttaaagaaaaggccacttcaagtatggccaagaggatctcagaattcaaccatataggtgttcatcgcccaaaacagtccctgcaatcatccatcaccagcacggggacttaatgagcatgaccactttataatcagcacctttccaagcaaaatcacgttttctgcatggttgtttcatcacagcccaacacttccttatccagcctgagtctaatcagcctaatggctgccactgaacgacctggg

SEQ ID NO: 562065 - DNA, 1391 bp, Homo sapiens
agatcggcgtaggaatccagcgagttacaatccagtctcccggaggcatgagtagagaacgtgagagaatgtaacctctcctggtctctgggagtcatactagagcgaggcgtgggttgcatgccctgcctgtaccctcttgaccatccactaagcgagcaccactagggatcgaggagaattctgagtcacaggcaggaatacagaggaggcagatgggtacctatccacagtgcgcatactcgagatttcacgcccctactcgatcacactgatggagaacctatgcgggcgtatatcctaggcgcatgttcacctaaggaccagtttgaagcttacactggaaagtgacgctcacttgcactcagaagaagtagtgccatcttacttccgctcatatgaagactatctactcaaccgacgcaattggctctgtccctgctacttgcatgcgggtccccaataaataacgcgacctcatgaacagaagaatgtcatcaaacgcggcgcatcgatgttatacaaaccatcacaggagtacatcccgtgaaagaccagacacagtgtcgagccataggcattgccgcagaaactcgctcccttgacagcatcctcgtcgagattcaaagatcccagacgattgaagccgtcgcaagctctgagcgctaaatggagggatataatgccccaccgtaaagatcatcattgaggacaagtatcgaggctcctgctatgggaaccacgcggtactacgcgagacgcgactgcctaaagacggttcgtataggctccagaggccttatgccacttggagcgttgtcagggactcagatgccagctaagaaggctcatcaactgactacgtgcacagaatggaactaaggggagaagatcccagatctgatcaggggacccttgacttcgcagagcgaactgattggtcctggatgaattacatcctggctaaaaaggccaactggggagatggccgttggaacgcccatgaataatccgtgcaggcgaagggtactagggtgaagccatgacaaaggggggtaagggggcccatggtgagtttggcatcaccggggctaaaacctggaggctcccacgaacagaaaatggcccggcaccggggagaaacggacacacacgcaggtgactgtcggaggacactttacaccccgagcgaaaaaaaaaacagggtggaaatggtgatcaaaggggcccgacaccgaaaagggggaaaactgtgtacagaaaatcgagcccatgaaagatcacggggaaacgagaaactaccggagaggaaaagaaaagcgacagacaggcaaacaccgagaaacaaatagacagcgaacgtagaggaggacgaacaaaggtgggtcggt

SEQ ID NO: 562066 - DNA, 91 bp, Homo sapiens
  misc_feature (31)..(31): n is a, c, g, or t
  misc_feature (87)..(87): n is a, c, g, or t
ggggaggtgggtagagcccgaggccccccantagccgaccctggcttcgcgttgtctccccaggggagaataatcgagggctgccgnctac

SEQ ID NO: 562067 - DNA, 344 bp, Homo sapiens
taacaaaatgggatcgcagggcaaacacaggcatggttcccccgaaagattgagttgtcaggcgcgtccgacttgaccactgcattggacctggtgccttcgacacatttctccatgggacaccctgtccatgagcgtcagtcccaatcggtcctcgagggcaataatcgtgcgttccaaatacgtggcatctgcctggtgcattttcggaggcaatgcaatccattggtcatgttcaatacgcaggcttccagttgccgaaatattcggcacgcatgggttcaaggacctggcacataaagtcgacaaattcactcgccagtggcagggcacccactcgggac

SEQ ID NO: 562068 - DNA, 264 bp, Homo sapiens
tccggaccttgtttactgaagcttacccataaacatttaagatctttatatttcacctttttgtttgtttggagacaaggtctcgctgtggaatgcagtagtatgatcacagctcactgcagcctttacttcctgggcttaagtgatcttcttgcctcggcctcccgagtagctgggactacaagcatgaaccatcatgcccggctaatttttaaaattcgtttgtacagacggggttctcatgttggccaggctggtctcgaa

SEQ ID NO: 562069 - DNA, 171 bp, Homo sapiens
taaaataaaaacactgaataacaggtatggcgagggacgtggagcagctagaattttcttttcttttcttttctttttttttcgctgacagtagtctcactctgtttgcccaggctggtagagtcctccccaggtgcttcaggagtcctgtggtaccgacgctcgagattc

SEQ ID NO: 562070 - DNA, 132 bp, Homo sapiens
catagcttgaggaaggcctagggctagtactgggccaggagctggggcctgggccagagctggatgccatggttaggcaagggcctggggccaaagcttaggcctggcttatagatattccccaaagggaac

SEQ ID NO: 562071 - DNA, 145 bp, Homo sapiens
atcacagtctcagcctactcactcagcactatagttgtagcaggaatttcttactcatccgcttcacccgcctagcagaaaataagcccactaatccaaactctaacactatgcttagtgcgctatcactactctgtataggggg

SEQ ID NO: 562072 - DNA, 423 bp, Homo sapiens
cggggcccccatatggtgcttcgcggcttggacaccctctttctcttagaagaggtttccggcggttccctgagggcccccgtttcttttatttggggggtgtttttccccttttatcatcccccgtctgggggagaacacgttgggggcccaccagtttcgggggggagccttcggggtttagggggaaataaaaaaggggcccccccccccccaaatttggttccaggtgggccgggccaaattttcgttgggacccatggaaatccggccttttttggcccccattttaatggaaggggggggatggtttggttttttggggggggccccccaagcccaaccctcttgttcgggggggagaccaaattttttttttttttttggggggggggccatttaaagggttttttttaggctcca

SEQ ID NO: 562073 - DNA, 116 bp, Homo sapiens
gagctcgctacccactttccgagtaggtgttggtctttccttaaaaggagcagaggtctcattttttgtggcttctacttaggcctactatgggtgttaaattttttactctctct

SEQ ID NO: 562074 - DNA, 579 bp, Homo sapiens
  misc_feature (566)..(566): n is a, c, g, or t
  misc_feature (569)..(570): n is a, c, g, or t
  misc_feature (572)..(572): n is a, c, g, or t
  misc_feature (575)..(576): n is a, c, g, or t
ccgctccactctgacctcacccctgagtccaggctgaacgcacgctcctccgtggcccccgcttccaccccgtgcatgtggggggcttctgctccgctccctcctgttccggggtccagcgggcggctccccagaccagaatctgagggagagcagattcggccttgagaacgcctacaacaacttccggcccaccctggagactgttgactctggcacagagctccacatccagaggccggagatggtagcatccactgtgtgagccaacgggggcctcccaccctcatctagctctgttcaggagagctgcaaacacagagcccaccacaagcctccggggcgggtcaagaggagaccgaagtcaggccctgaagccggtcctgctctgagctgacagacttggccagtcccctgcctgtgctcctgctggggaaggctgggggctgtaagcctctccatccgggagcttccagactcccagaagcctcggcacccctgtctcctcctgggtggctccccactctggaatttccctaccaataaaagcaaatctgaaagctcanaannanaanngaa

SEQ ID NO: 562075 - DNA, 551 bp, Homo sapiens
gaaaatctacacacctgcaaagtcccttttgccacatcatcggaagaaacaaaaacaagctgtggtgaagaagaaacgttttctaaagcctcttttatccccaggatggttgagaagtcagaggcctgcaatgctaggaagagagggtctaaagtgtccttttcaccgtgatgtaagtaggctctccagcagtcccagaagactttcacaagaagagtttcaacaacagaaaataagcctaagtgattgtgtgaatatcacagagcaacagagaaaatgtagatcactccagttctagcacaaggtcggggaggaaaaagaatcagagagtttggaatttctaaatgctcgtgtttgagaaatggggagcatcacaaactaacagcagaggtggacattttttacagggtaaaggattcccatggaacaccactcgtcaaatgcaaataaaaattgtacaaagaaggtaacttctttctctgtccccacatctctccatctgaaacttcattcttccattaaaacagaattgtgctttgtgaaaacaaaaa

SEQ ID NO: 562076 - DNA, 2509 bp, Homo sapiens
  misc_feature (1060)..(1060): n is a, c, g, or t
  misc_feature (2496)..(2496): n is a, c, g, or t
  misc_feature (2499)..(2500): n is a, c, g, or t
  misc_feature (2502)..(2502): n is a, c, g, or t
  misc_feature (2505)..(2506): n is a, c, g, or t
atcacagcagcccgggcttaactcaaacaatgcacttccctaaaagctccacagcttcaggtcgtagtgaagaatcaagaacttcgcacagcagcacaacacacacaatatcttctcctcctagcaccacatcagcgcttgttgaagaacgtaccagctactacagcagcccgggctcaattgcaacaacacactttcctgagagctccacaacctcaggccgtagtgaggaatcaacagcatcccacagcagcccagataccaatggaatcacacccttacctgcccattttactacctcaggccgcattgcagaatctaccaccttctatatctctccaggctcaatggaaacaacattagccagcactaccacaacaccaggcctcagtgcaaaatctaccatcctttacagtagctccagatcaccagaccaaacactctcacctgccagcatgacaagctccagcatcagtggagaacccaccagcttgtatagccaagcagagtcaacacacacaacagcgttccctgccagcaccaccacctcaggcctcagtcaggaatcaacaactttccacagtaagccaggctcaactgagacaacactgtcccctggcagcatcacaacttcatcttttgctcaagaatttaccacccctcatagccaaccaggctcagctctgtcaacagtgtcacctgccagcaccacagtgccaggccttagtgaggaatctaccaccttctacagcagcccaggctcaactgaaaccacagcgttttctcacagcaacacaatgtccattcatagtcaacaatctacacccttccctgacagcccaggcttcactcacacagtgttacctgccaccctcacaaccacagacattggtcaggaatcaacagccttccacagcagctcagacgcaactggaacaacacccttacctgcccgctccacagcctcagaccttgttggagaacctacaactttctacatcagcccatcccctacttacacaacactctttcctgcgagttccagcacatcaggcctcantgaggaatctaccaccttccacaccagtccaagcttcacttctacaattgtgtctactgaaagcctggaaaccttagcaccagggttgtgccaggaaggacaaatttggaatggaaaacaatgcgtctgtccccaaggctacgttggttaccagtgcttgtcccctctggaatccttccctgtagaaaccccggaaaaactcaacgccactttaggtatgacagtgaaagtgacttacagaaatttcacagaaaagatgaatgacgcatcctcccaggaataccagaacttcagtaccctcttcaagaatcggatggatgtcgttttgaagggcgacaatcttcctcagtatagaggggtgaacattcggagattgctcaacggtagcatcgtggtcaagaacgatgtcatcctggaggcagactacactttagagtatgaggaactgtttgaaaacctggcagagattgtaaaggccaagattatgaatgaaactagaacaactcttcttgatcctgattcctgcagaaaggccatactgtgctatagtgaagaggacactttcgtggattcatcggtgactccgggctttgacttccaggagcaatgcacccagaaggctgccgaaggatatacccagttctactatgtggatgtcttggatgggaagctggcctgtgtgaacaagtgcaccaaaggaacgaagtcgcaaatgaactgtaacctgggcacatgtcagctgcaacgcagtggcccccgctgcctgtgcccaaatacgaacacacactggtactggggagagacctgtgaattcaacatcgccaagagcctcgtgtatgggatcgtgggggctgtgatggcggtgctgctgctcgcattgatcatcctaatcatcttattcagcctatcccagagaaaacggcacagggaacagtatgatgtgcctcaagagtggcgaaaggaaggcacccctggcatcttccagaagacggccatctgggaagaccagaatctgagggagagcagattcggccttgagaacgcctacaacaacttccggcccaccctggagactgttgactctggcacagagctccacatccagaggccggagatggtagcatccactgtgtgagccaacgggggcctcccaccctcatctagctctgttcaggagagctgcaaacacagagcccaccacaagcctccggggcgggtcaagaggagaccgaagtcaggccctgaagccggtcctgctctgagctgacagacttggccagtcccctgcctgtgctcctgctggggaaggctgggggctgtaagcctctccatccgggagcttccagactcccagaagcctcggcacccctgtctcctcctgggtggctccccactctggaatttccctaccaataaaagcaaatctgaaagctcanaannanaanngaa

SEQ ID NO: 562077 - DNA, 447 bp, Homo sapiens
  misc_feature (447)..(447): n is a, c, g, or t
gcaacaagagcgaaactccatcgcaaaaaaaaaaaaaaaaaaaaaaaaaaaaaaatgtggtgggcggccggggccagtcgaagaaagcgttcaaaaaccaattcggttggggcagccgcggggccccagaagaggaaacaggaggacacgtgggtcccactaactgtgttacccctagagagaaagaatctcgcgggccatcgaggcaacaagaggcgagcgcgatggggatatatctcaataacacacaaaatatagaaaagaacgagccgcgcggcgggaaccaccaccaagagccggcttctcgtgaaaacaatctcaccgagaacagtgaagatttccagaggagggactcaaataacggcggacactcaatatacaacaggaggagcactaacaagagcggagtccgcaaagtataaaattaacgcccccaccgccgaggan

SEQ ID NO: 562078 - DNA, 2106 bp, Homo sapiens
  misc_feature (657)..(657): n is a, c, g, or t
  misc_feature (2093)..(2093): n is a, c, g, or t
  misc_feature (2096)..(2097): n is a, c, g, or t
  misc_feature (2099)..(2099): n is a, c, g, or t
  misc_feature (2102)..(2103): n is a, c, g, or t
cgatctagaagatcccgctgattccagaaagaatacactctcacctgccagcatgacaagctccagcatcagtggagaacccaccagcttgtatagccaagcagagtcaacacacacaacagcgttccctgccagcaccaccacctcaggcctcagtcaggaatcaacaactttccacagtaagccaggctcaactgagacaacactgtcccctggcagcatcacaacttcatcttttgctcaagaatttaccacccctcatagccaaccaggctcagctctgtcaacagtgtcacctgccagcaccacagtgccaggccttagtgaggaatctaccaccttctacagcagcccaggctcaactgaaaccacagcgttttctcacagcaacacaatgtccattcatagtcaacaatctacacccttccctgacagcccaggcttcactcacacagtgttacctgccaccctcacaaccacagacattggtcaggaatcaacagccttccacagcagctcagacgcaactggaacaacacccttacctgcccgctccacagcctcagaccttgttggagaacctacaactttctacatcagcccatcccctacttacacaacactctttcctgcgagttccagcacatcaggcctcantgaggaatctaccaccttccacaccagtccaagcttcacttctacaattgtgtctactgaaagcctggaaaccttagcaccagggttgtgccaggaaggacaaatttggaatggaaaacaatgcgtctgtccccaaggctacgttggttaccagtgcttgtcccctctggaatccttccctgtagaaaccccggaaaaactcaacgccactttaggtatgacagtgaaagtgacttacagaaatttcacagaaaagatgaatgacgcatcctcccaggaataccagaacttcagtaccctcttcaagaatcggatggatgtcgttttgaagggcgacaatcttcctcagtatagaggggtgaacattcggagattgctcaacggtagcatcgtggtcaagaacgatgtcatcctggaggcagactacactttagagtatgaggaactgtttgaaaacctggcagagattgtaaaggccaagattatgaatgaaactagaacaactcttcttgatcctgattcctgcagaaaggccatactgtgctatagtgaagaggacactttcgtggattcatcggtgactccgggctttgacttccaggagcaatgcacccagaaggctgccgaaggatatacccagttctactatgtggatgtcttggatgggaagctggcctgtgtgaacaagtgcaccaaaggaacgaagtcgcaaatgaactgtaacctgggcacatgtcagctgcaacgcagtggcccccgctgcctgtgcccaaatacgaacacacactggtactggggagagacctgtgaattcaacatcgccaagagcctcgtgtatgggatcgtgggggctgtgatggcggtgctgctgctcgcattgatcatcctaatcatcttattcagcctatcccagagaaaacggcacagggaacagtatgatgtgcctcaagagtggcgaaaggaaggcacccctggcatcttccagaagacggccatctgggaagaccagaatctgagggagagcagattcggccttgagaacgcctacaacaacttccggcccaccctggagactgttgactctggcacagagctccacatccagaggccggagatggtagcatccactgtgtgagccaacgggggcctcccaccctcatctagctctgttcaggagagctgcaaacacagagcccaccacaagcctccggggcgggtcaagaggagaccgaagtcaggccctgaagccggtcctgctctgagctgacagacttggccagtcccctgcctgtgctcctgctggggaaggctgggggctgtaagcctctccatccgggagcttccagactcccagaagcctcggcacccctgtctcctcctgggtggctccccactctggaatttccctaccaataaaagcaaatctgaaagctcanaannanaanngaa

SEQ ID NO: 562079 - DNA, 1010 bp, Homo sapiens
aataaacatgctagctttgattccagcttctaaccaaaaaaataaaccctcgtgccacaggaagctgccatcaggtatttcctcacgcaaaccagcgcatccataatccttgctaatagctatcctcttcaagcaatatactctccggacaatgaaccatatgtcaatagtagctcaatcaatactcatcattaataatcaatatatggctatagcgaataagactaggaatagccccacttttcacgttcttgagtgccagaggttacccaaatggtcgacccctcgtgacaatcgcgcgccttgcattcattctcacatgacgagaaaaactagcccccaatctcaatctatataaccaagatcatctcccatctacataatactgtaagccccttcgtcctcactctcctctaaatcttatccgaatctatagacagggcagtcctgaggtggaattagaatcaatagaccagcatactgcaaaatctttaggcatactcctcaaataatccctacatatggatgaagtacatacgcaagtactaccgtacaaccataacagtaaccattcttactttagctattatatattatcctaaagtactaccgattccgtacttactcaaacttgaacgtccagcaacatgacctaatactatcgttcgagacatagaagacaatgctaacattgactatagacgttaattccatccagcctcctctcgctaaggagggcctgcccccgatggacggttgttgccagatgggcattatcgaaggaattcacgaaaaaacaatagacttatatcccacattataagcaggattagccttctttaagctctattttaacttaagctaagtgtatgccactcatacatatgcccatatttaaaaggtaaaataatggagggttggtataaaaacaacgcatttttccacaaattggcgtaagtaactaccaatgttcgcaaagataattttaaagaaacacaaaaagagcaaag

SEQ ID NO: 562080 - DNA, 2151 bp, Homo sapiens
  misc_feature (3)..(3): n is a, c, g, or t
  misc_feature (702)..(702): n is a, c, g, or t
  misc_feature (2138)..(2138): n is a, c, g, or t
  misc_feature (2141)..(2142): n is a, c, g, or t
  misc_feature (2144)..(2144): n is a, c, g, or t
  misc_feature (2147)..(2148): n is a, c, g, or t
ggnacccttcctctcacaatgtaagaaaacctggaccctgctggcacactaatcttggacttctcagactccagaacaaacactctcacctgccagcatgacaagctccagcatcagtggagaacccaccagcttgtatagccaagcagagtcaacacacacaacagcgttccctgccagcaccaccacctcaggcctcagtcaggaatcaacaactttccacagtaagccaggctcaactgagacaacactgtcccctggcagcatcacaacttcatcttttgctcaagaatttaccacccctcatagccaaccaggctcagctctgtcaacagtgtcacctgccagcaccacagtgccaggccttagtgaggaatctaccaccttctacagcagcccaggctcaactgaaaccacagcgttttctcacagcaacacaatgtccattcatagtcaacaatctacacccttccctgacagcccaggcttcactcacacagtgttacctgccaccctcacaaccacagacattggtcaggaatcaacagccttccacagcagctcagacgcaactggaacaacacccttacctgcccgctccacagcctcagaccttgttggagaacctacaactttctacatcagcccatcccctacttacacaacactctttcctgcgagttccagcacatcaggcctcantgaggaatctaccaccttccacaccagtccaagcttcacttctacaattgtgtctactgaaagcctggaaaccttagcaccagggttgtgccaggaaggacaaatttggaatggaaaacaatgcgtctgtccccaaggctacgttggttaccagtgcttgtcccctctggaatccttccctgtagaaaccccggaaaaactcaacgccactttaggtatgacagtgaaagtgacttacagaaatttcacagaaaagatgaatgacgcatcctcccaggaataccagaacttcagtaccctcttcaagaatcggatggatgtcgttttgaagggcgacaatcttcctcagtatagaggggtgaacattcggagattgctcaacggtagcatcgtggtcaagaacgatgtcatcctggaggcagactacactttagagtatgaggaactgtttgaaaacctggcagagattgtaaaggccaagattatgaatgaaactagaacaactcttcttgatcctgattcctgcagaaaggccatactgtgctatagtgaagaggacactttcgtggattcatcggtgactccgggctttgacttccaggagcaatgcacccagaaggctgccgaaggatatacccagttctactatgtggatgtcttggatgggaagctggcctgtgtgaacaagtgcaccaaaggaacgaagtcgcaaatgaactgtaacctgggcacatgtcagctgcaacgcagtggcccccgctgcctgtgcccaaatacgaacacacactggtactggggagagacctgtgaattcaacatcgccaagagcctcgtgtatgggatcgtgggggctgtgatggcggtgctgctgctcgcattgatcatcctaatcatcttattcagcctatcccagagaaaacggcacagggaacagtatgatgtgcctcaagagtggcgaaaggaaggcacccctggcatcttccagaagacggccatctgggaagaccagaatctgagggagagcagattcggccttgagaacgcctacaacaacttccggcccaccctggagactgttgactctggcacagagctccacatccagaggccggagatggtagcatccactgtgtgagccaacgggggcctcccaccctcatctagctctgttcaggagagctgcaaacacagagcccaccacaagcctccggggcgggtcaagaggagaccgaagtcaggccctgaagccggtcctgctctgagctgacagacttggccagtcccctgcctgtgctcctgctggggaaggctgggggctgtaagcctctccatccgggagcttccagactcccagaagcctcggcacccctgtctcctcctgggtggctccccactctggaatttccctaccaataaaagcaaatctgaaagctcanaannanaanngaa

SEQ ID NO: 562081 - DNA, 737 bp, Homo sapiens
tgtagctgcgccggcgcccagctctcgagaggactgtgtggagggcagaggctgaaacgatggccgcctgccgagttcctccacatgacccctgtggcgaggagcgctctgctggggactgcgccagtcggtgccttccaggcctggactctcagctccgatgctgcttttggccagagttcccaaaggcgggtgtggttgtctttggtgggaaggttcatgcgcaccgcgatagtaataggggagcaagcactcgctgagcccagtgcagggcctggaccgtgctccatagcaatgcactgatcttgggctattggtttgggaggaaagagggagcacaaggactggacacggggccatgggaagagaggtcacggatgggagaaggacgagtccgcatccgatcggaggagtttgtcactcagtgcctgagtgggaggcactgtgaggcacggtatgaggccagtcagcagcatgcgggcacaggccagagaagccagaggggtttgctggtgggtgggcccccagcctttgtccatgggaacgtgcaggtctggggagcttgccgatctcggggtgtgacgggtaaccgggctggcttgtgtcccagctctccttctcaggctcactggacccctgaccggatatgatctgccatttatccaaggcttttgaccagagcctcttgggcttccttgccaccatgtgccctagctatagggcttcggtaccctcca

SEQ ID NO: 562082 - DNA, 2434 bp, Homo sapiens
  misc_feature (1060)..(1060): n is a, c, g, or t
  misc_feature (2421)..(2421): n is a, c, g, or t
  misc_feature (2424)..(2425): n is a, c, g, or t
  misc_feature (2427)..(2427): n is a, c, g, or t
  misc_feature (2430)..(2431): n is a, c, g, or t
atcacagcagcccgggcttaactcaaacaatgcacttccctaaaagctccacagcttcaggtcgtagtgaagaatcaagaacttcgcacagcagcacaacacacacaatatcttctcctcctagcaccacatcagcgcttgttgaagaacgtaccagctactacagcagcccgggctcaattgcaacaacacactttcctgagagctccacaacctcaggccgtagtgaggaatcaacagcatcccacagcagcccagataccaatggaatcacacccttacctgcccattttactacctcaggccgcattgcagaatctaccaccttctatatctctccaggctcaatggaaacaacattagccagcactaccacaacaccaggcctcagtgcaaaatctaccatcctttacagtagctccagatcaccagaccaaacactctcacctgccagcatgacaagctccagcatcagtggagaacccaccagcttgtatagccaagcagagtcaacacacacaacagcgttccctgccagcaccaccacctcaggcctcagtcaggaatcaacaactttccacagtaagccaggctcaactgagacaacactgtcccctggcagcatcacaacttcatcttttgctcaagaatttaccacccctcatagccaaccaggctcagctctgtcaacagtgtcacctgccagcaccacagtgccaggccttagtgaggaatctaccaccttctacagcagcccaggctcaactgaaaccacagcgttttctcacagcaacacaatgtccattcatagtcaacaatctacacccttccctgacagcccaggcttcactcacacagtgttacctgccaccctcacaaccacagacattggtcaggaatcaacagccttccacagcagctcagacgcaactggaacaacacccttacctgcccgctccacagcctcagaccttgttggagaacctacaactttctacatcagcccatcccctacttacacaacactctttcctgcgagttccagcacatcaggcctcantgaggaatctaccaccttccacaccagtccaagcttcacttctacaattgtgtctactgaaagcctggaaaccttagcaccagggttgtgccaggaaggacaaatttggaatggaaaacaatgcgtctgtccccaaggctacgttggttaccagtgcttgtcccctctggaatccttccctgtagaaaccccggaaaaactcaacgccactttaggtatgacagtgaaagtgacttacagaaatttcacagaaaagatgaatgacgcatcctcccaggaataccagaacttcagtaccctcttcaagaatcggatggatgtcgttttgaagggcgacaatcttcctcagtatagaggggtgaacattcggagattgctcaacggtagcatcgtggtcaagaacgatgtcatcctggaggcagactacactttagagtatgaggaactgtttgaaaacctggcagagattgtaaaggccaagattatgaatgaaactagaacaactcttcttgatcctgattcctgcagaaaggccatactgtgctatagtgaagaggacactttcgtggattcatcggtgactccgggctttgacttccaggagcaatgcacccagaaggctgccgaaggatatacccagttctactatgtggatgtcttggatgggaagctggcctgtgtgaacaagtgcaccaaaggaacgaagtcgcaaatgaactgtaacctgggcacatgtcagctgcaacgcagtggcccccgctgcctgtgcccaaatacgaacacacactggtactggggagagacctgtgaattcaacatcgccaagagcctcgtgtatgggatcgtgggggctgtgatggcggtgctgctgctcgcattgatcatcctaatcatcttattcagcctatcccagagaaaacggcacagagaccagaatctgagggagagcagattcggccttgagaacgcctacaacaacttccggcccaccctggagactgttgactctggcacagagctccacatccagaggccggagatggtagcatccactgtgtgagccaacgggggcctcccaccctcatctagctctgttcaggagagctgcaaacacagagcccaccacaagcctccggggcgggtcaagaggagaccgaagtcaggccctgaagccggtcctgctctgagctgacagacttggccagtcccctgcctgtgctcctgctggggaaggctgggggctgtaagcctctccatccgggagcttccagactcccagaagcctcggcacccctgtctcctcctgggtggctccccactctggaatttccctaccaataaaagcaaatctgaaagctcanaannanaanngaa

SEQ ID NO: 562083 - DNA, 172 bp, Homo sapiens
  misc_feature (54)..(54): n is a, c, g, or t
  misc_feature (78)..(78): n is a, c, g, or t
  misc_feature (95)..(95): n is a, c, g, or t
  misc_feature (107)..(107): n is a, c, g, or t
ggctccccctgccccccggcccccgggttctcgggtcggggggtttgggggggncttggaggtgacctgcttctttgnttcatcagcggctgttnccccagggctgngggggcctccttgctctggggggggtcttcgtccatccttggtgggggggggtgccccgcccctt

SEQ ID NO: 562084 - DNA, 794 bp, Homo sapiens
  misc_feature (781)..(781): n is a, c, g, or t
  misc_feature (784)..(785): n is a, c, g, or t
  misc_feature (787)..(787): n is a, c, g, or t
  misc_feature (790)..(791): n is a, c, g, or t
aattgataaacaatagaagtttatttggctcacagttctggaggctgggaagtccaagatcaaggggctgcatctggtgaggactttcttgctgcatcacagcatggcaacatggcagtcttggccaccacagagcacagcaccacatggggaagctgagatggagcgtctgggtctcacttttcccagccgcagcccagtgatgcagggtcggaggggtggtcggcagtgggaaagggcgtagggcagatgccgggctgactcttccttttgccagaggaaatcccctctgccccctagtcctccccctaccaaggctcccatcactcatcacggcctctccctacagaccagaatctgagggagagcagattcggccttgagaacgcctacaacaacttccggcccaccctggagactgttgactctggcacagagctccacatccagaggccggagatggtagcatccactgtgtgagccaacgggggcctcccaccctcatctagctctgttcaggagagctgcaaacacagagcccaccacaagcctccggggcgggtcaagaggagaccgaagtcaggccctgaagccggtcctgctctgagctgacagacttggccagtcccctgcctgtgctcctgctggggaaggctgggggctgtaagcctctccatccgggagcttccagactcccagaagcctcggcacccctgtctcctcctgggtggctccccactctggaatttccctaccaataaaagcaaatctgaaagctcanaannanaanngaa

SEQ ID NO: 562085 - DNA, 1291 bp, Homo sapiens
acggttgtttaagacactcttgtggggcactacacagctagtttgctctcacaaatgatctggcccttttcattcaagttgttggtggggcactctctacagtatcgggtggtcactcctggcagcgacgtcgccgtttttggacaaaaatttttgtacgaaaatgatagggcataatttattgcttggccttacattgctctgttcgcccaaaaccataccgtgctggaaatttgtaggttttcttggctgtaatccggcattgtatgccttgtgggctcccaaacggatccctagtggctttagacacacaatgtgtgcaagcaaacgttgggtttctggtcattgtaaaggggatgtgatctcacctcccgaatccctattggcctggtaaaaatggcacacaacttaaagtagactagaagtctggttgacggaggaacttatctcagaatggtgcaattgttgtccataagtctaaaaagaatggtggcattatgaaggagtgcaagtctagccctatcagagtggcccactcctagcggcatccaggggccagcacagaggaccattgcaccactcgagcacaggatgaactgggttcgaaatcccggctccacacttagcttgaccatgtgacttgtagcaagttattaacctaacctcagccctgctatgagatttccttcactcgaacatgtagcgatcaatacatttggactctacacgcaaggaatgggtaactgtcaagaattaagataatacatatcaagagcatttgtgacagtgccgtcacgtatcctcctccaggtaggctcgttatgaccttcttcaccgttccagttaattacgttcgcatttcgagcatcttgttcatgctccagttctaagaaagtcacacgatccactgagcagcacagccaacaccttctctcccagacatcgtgagctgtgatcaatgatcatcagctatgattaaatagcctagtcttatgttatgacattgtgctaagtgcgacactaacacacacacagaggtccttctagaaattgccagctctataagtggacgagtaactgctataatccagtagactagacgcacactgcacttaggcaaacagtggacaatgtacatatggcgtgaacatttccgaatattctgacaagtataatgtactattatataagacaatgtcgggccgggcgtcgctggctcctaagccgtgttaaacccagcactgttggtaggccgaggtgggatggatcacctggaggttgagatcttcga

SEQ ID NO: 562086 - DNA, 355 bp, Homo sapiens
cttgcgagggggaaccccgtgcgggatttttcctccgacactccggtatctccttcagactcacaaacctctctggggtcctcccttgtctccctcaggtctttgccctcagcccacagtatctctttcagctactctgaatacttttctagattccagctggagtcagttcccaggcacccacgaaacaccaacaatactacacccatatcactgactacatagtatacaaccccaggcctaaaaggactcttactgtctctctacatatactctccaaccaactccagatatcagctggagtcaaattcccacacccaggagtaacctagaaactcacagaacttactggcac

SEQ ID NO: 562087 - DNA, 140 bp, Homo sapiens
ccatggatgagacggcttcagttacttcctcttgaccacactgcctcgtgacactgtgctgctgctgtcactgctgccgtgcactgtcaccggctcagtccctgggcccctctaccctcaggcataccccgcccagcttc

SEQ ID NO: 562088 - DNA, 1109 bp, Homo sapiens
gaaattatgttaagtgaaatatcaatgaaaataaagtttactataaaaaaaaaaaaaaaaaaaaaaaaaaaaaaaaaaaaaaaaaaaaaaaaaaaaaaaaaaaaaaaaaaaaaaaaaaaaaaaaaaaaaaaaaaaaaaaaaaaaaaaaaaaaaaaaaaaaaaaaaaaaaaaaaagaaagaaaaagaagaaaaagagagagagagagagagagagagagaggggcggggcgggtggtggtatatgtgttgttatggggcggagggtggcgtatttgatctacagagctggagttattattattattagtggtgtagagacgggtgcgagtagtatgtagggtaggcagtttgagtgggagggagggaggggggacgaaagagaacacaaacggaagggggggggggggggggggggaggaagggagggagagagggaaggacagaagagaacagaggaggaggaaggaggggagagaggagaggtagtaacaaaaaataaaaaaaaggaaaaagaaaatagatcaaaaagaaaagaagatcaaaaaaagatacaaaaaagaaaagaaagaggaagaaaggaagaaggacaaaaaaaagaaacgacaaagacgaaaaaaaagaaaaaaaaaaaaaagaagagaagagaggagaagatgaaaaaaaaaggacgacacacaaagaagagaaataagaaggagaaaagagaatactaggaaggaaaagagaaaagcgcatggcagaagagcagaacggagagaaaaacaaggacagaacagaagagaagaaagggaaaagaaacagaagaggagaggaagagaagaagacagagaggcagaaagagaacaaggagaggagggaacggaagaagggagagcggaaagcgaagaaaagaaaagaaagagaaaaagggggaaggaggagaagaaacgaagagcgaaggaggagaaagaaaagaggaaaaagaagagaggaaaggaagaaaaaaaaaagaaaaaaaaagaagagagaagaaaacaggagaaggagagaagaaaaaagtaaaaaagagagagagaaaagaagaagaagagaggcaaagagcgcaaacggtaacgtagataaagacaaac

SEQ ID NO: 562089 - DNA, 367 bp, Homo sapiens
  misc_feature (44)..(44): n is a, c, g, or t
tgactctagaggacccgatgtatcgcccaacacacatacacatntattcttgtactattacatgtcttttaaaaatatttatctggtcgagtgtggttgctcatgctgtaatcccagcactttgaggggcaggcagatcacttgaggttatgagttcgagaccagcctggccaacatggtgaaaccccatctctactaaaaatacaaaaattagccggatgtagtgatgcatgtctgtggtcccagctactcgggaggctgaggtgggagagtcccttgaacctgggaagcagaggttgcaagtgagccaagattgcatcactgcactccagcctgggtgacagagtgagaccctgtctccaaaaaa

SEQ ID NO: 562090 - DNA, 958 bp, Homo sapiens
  misc_feature (1)..(2): n is a, c, g, or t
  misc_feature (113)..(113): n is a, c, g, or t
nntatataagatagccacacacgacgatcgtctgaatgattgtgcaggttccagcgccgcagtgtctcgcagactggccatatgcttgccaaccatctgtgaggtggacggcnacgcatttccaatggggggcctataacacttgcgtgtgggagaacttggaagacgcttattcaattggtccgaggaacattctccttgttgggcgacgactcctcctctcatatggccgcccgggtaccggccattgggcggtggacccaggtcctgttgcacccacgggtttggggaccccctcggtcgcgccacataggggcccccctctttttccgttaacctgtgaaatgttgttgatacagccctgttttgaaagctttggcgcagatcccccaaggtggtctaattatgtcccacggcgcaagggagtgcgttccatggttctccccccccagaacgtgttgttgctcctaatggaagatgtgcgagtattgaaaacgcgcccgttagcgtgttccgacgcccgaaactctgttcccccagaaagtttacagggcaataaggggtcgtgtgtcgggcattgtctgcaaaaagaagatctcccgctctgcaggcccgtggcgccttggtggacgcccccccgcgaggtccacccacccactctgggagggccatggcgcaagtgcagcttcaccacagttcacaggggtttccacactcaaccctcggccaccataagcgggacacacgcgtgctgtgtagaaaaaaatggcatagtatgcacctcccgcgcatacccacaggcgcctccctaccatggcccccacactcacgggagagagtatggccacagaaaatattgttcataacccgagcgaccgcacgaggggtcccgagacgcaccaacatatcgcccttgtttcccccccgggggcccagacgggtctgcgcccacaaaaca

SEQ ID NO: 562091 - DNA, 149 bp, Homo sapiens
cagaatgtggctctgagtgcagaggacaagcttcttatgcgacaccagctgcggaacacaagatcctgaatgaaggtcttcccaaccaggtcctgaagcccttcctggaggattccaagtcccaaatctgctgccctattgtgggcaca

SEQ ID NO: 562092 - DNA, 214 bp, Homo sapiens
acttcttcgagttactaggagatagtgcgagacaatatctccttcgggtgagcggaaatgttctggatcttgatcttctgacgaataataggcgaaagtctgcttcgagatcggcctcctggtcactggtggagtcctggatctggtagcttctgcgagtcactggtggagttctagaacgtgagcggcggcgtgtagttggtgttctagacct

SEQ ID NO: 562093 - DNA, 1960 bp, Homo sapiens
  misc_feature (35)..(35): n is a, c, g, or t
  misc_feature (1601)..(1601): n is a, c, g, or t
  misc_feature (1606)..(1606): n is a, c, g, or t
  misc_feature (1609)..(1609): n is a, c, g, or t
  misc_feature (1615)..(1615): n is a, c, g, or t
gatgggaagagcagtacctacatcaatgctgctcntatggacagctacaggcaaccagctgctttcatcgtcacacaataccctctgccaaacactgtaaaagacttctggagattagtgtatgattatggctgtacctccattgtgatgttaaacgaagtcgacttgtcccagggctgccctcagtactggccagaggaagggatgctacgatatggccccatccaagtggaatgtatgtcttgttcaatggactgtgatgtgatcaaccggatttttaggatatgcaatctaacaagaccacaggaaggttatctgatggtgcaacagtttcagtacctaggatgggcttctcatcgagaagtgcctggatccaaaaggtcattcttgaaactgatacttcaggtggaaaagtggcaggaggaatgcgaggaaggggaaggccggacgattatccactgcctaaatggtggcgggcgaagtggcatgttctgtgctataggcatcgttgttgaaatggtgaaacggcaaaatgttgtcgatgttttccatgcagtaaagacactgaggaacagcaagccaaacatggtggaagccccggagcaataccgtttctgctatgatgtagctttggagtacctggaatcatcttagttgggtgagactctttaaagtgcatccatgaagaaacctgtccatctattgagccagcagctgttgtacctgttacacttgtgcagaaagattttaatgtggggggtgggagacttttacatttgagaggtaaaagtattttttttatgaagttgtgtatcttaataaaaaggactgaattagtttttattactatattaaagcatcaacatttcatgccacataaattatatttaataagaaccagattgaaatgagaacgtattggtgtttgtacagtgaacatgccaccttttttctcatggtttcagtagagcagctaccacatgttgcatgagttcatactttctacgtggcatttttctccctttctaaaatgaaagctgatgaatcttaaaaggaagaagaaaagaaaagctgtgcaaattcatagtaaagttcgttttttatatgtttccagtgtagcagatctctatataaatatataaatatatataactggcttattttcttttaatgtgcaatgatggctggatcatttaaagttctttttagaaaataacataagccaaagactcaagtgtaaatatgtctatatggagaaagcacattatatttattggttacttacattccttttttgatggctaaaatactaccaccacacaatcatcttttttttcctgaagaaagctttttctttagctaaaatcaattgtaaacgatttttgtagattattttttgtatgttttagtgtaagtagaagataaactttttattcataaaccaggaagcaatgttctttatagtgattctcttgtgtacatgcttgtgaattaaatttgtgtaaaatcccttggcaattgggtcttttaatataggacccaaattaaaacattttgctgaatatgtatagtttttcacaatttcatagggaaataatggnttggngancatacntgagaaatgtgcacattaaaagggcttgctgacaacttgcacaatgttgaacatagcctttaagcatcatttaaattttaaagggatggaggtttttagcctgtgggccaacactggtcaagagaacaagatggcaacatatatgctttcagggtcaaatttgagcaaactgtgaactgtgagggtgagatgtgaacacatcaatgccagattcctgtgttgcgcattgtcatggggattttaagtgaacctttctaaatgtgggcttggtcacatgctccacgtagctgtgaacttacaatcatcagcttgcaggttgtattgactaaagcatttcagtggcct

SEQ ID NO: 562094 - DNA, 851 bp, Homo sapiens
  misc_feature (35)..(35): n is a, c, g, or t
gatgggaagagcagtacctacatcaatgctgctcntatggacagctacaggcaaccagctgctttcatcgtcacacaataccctctgccaaacactgtaaaagacttctggagattagtgtatgattatggctgtacctccattgtgatgttaaacgaagtcgacttgtcccagggctgccctcagtactggccagaggaagggatgctacgatatggccccatccaagtggaatgtatgtcttgttcaatggactgtgatgtgatcaaccggatttttaggatatgcaatctaacaagaccacaggaaggttatctgatggtgcaacagtttcagtacctaggatgggcttctcatcgagaagtgcctggatccaaaaggtcattcttgaaactgatacttcaggtggaaaagtggcaggaggaatgcgaggaaggggaaggccggacgattatccactgcctaaatggtggcgggcgaagtggcatgttctgtgctataggcatcgttgttgaaatggtgaaacggcaaaatgttgtcgatgttttccatgcagtaaagacactgaggaacagcaagccaaacatggtggaagccccggagcaataccgtttctgctatgatgtagctttggagtacctggaatcatcttagttgggtgagactctttaaagtgcatccatgaagaaacctgtccatctattgagccagcagctgttgtacctgttacacttgtgcagaaagattttaatgtggggggtgggagacttttacatttgagaggtaaaagtattttttttatgaagttgtgtatcttaataaaaaggactgaattagtttttattactata

SEQ ID NO: 562095 - DNA, 858 bp, Homo sapiens
  misc_feature (35)..(35): n is a, c, g, or t
gatgggaagagcagtacctacatcaatgctgctcntatggacagctacaggcaaccagctgctttcatcgtcacacaataccctctgccaaacactgtaaaagacttctggagattagtgtatgattatggctgtacctccattgtgatgttaaacgaagtcgacttgtcccagggctgccctcagtactggccagaggaagggatgctacgatatggccccatccaagtggaatgtatgtcttgttcaatggactgtgatgtgatcaaccggatttttaggatatgcaatctaacaagaccacaggaaggttatctgatggtgcaacagtttcagtacctaggatgggcttctcatcgagaagtgcctggatccaaaaggtcattcttgaaactgatacttcaggtggaaaagtggcaggaggaatgcgaggaaggggaaggccggacgattatccactgcctaaatggtggcgggcgaagtggcatgttctgtgctataggcatcgttgttgaaatggtgaaacggcaaaatgttgtcgatgttttccatgcagtaaagacactgaggaacagcaagccaaacatggtggaagccccggagcaataccgtttctgctatgatgtagctttggagtacctggaatcatcttagttgggtgagactctttaaagtgcatccatgaagaaacctgtccatctattgagccagcagctgttgtacctgttacacttgtgcagaaagattttaatgtggggggtggggccgacatttttgggaggaaggaatacaacattcatttcataatagtatccttacaataagatcacaggatggcgcaacgttgggatcctcttg

SEQ ID NO: 562096 - DNA, 211 bp, Homo sapiens
  misc_feature (8)..(8): n is a, c, g, or t
  misc_feature (13)..(14): n is a, c, g, or t
  misc_feature (17)..(17): n is a, c, g, or t
gccagggnggtcnnganttcctgtccccaagtgatcccatctggcctgtctctacctaaaaataaaaaaatttagccaagaatggtggggatgccctgtaatcccagttacttgggagacgagggaggggaatggccggccctaaggggaagaggtggaggtaagcggagaatggggcgctgcactccgccggtgaagagcaagactgact

SEQ ID NO: 562097 - DNA, 154 bp, Homo sapiens
ataccagcagcaagactagggtcatatggttacacatagtgacttataccaagcatttgaaaaagaacaccaatctttctcaaaatcttctaacaaaaaaaataaggggacaatacttcactaattgcattttatcgagtgccacaattgaccc

SEQ ID NO: 562098 - DNA, 234 bp, Homo sapiens
cgtatacggtcgggtgcgtgagccagacacaccactgcgctccaccttgcgacagagtgagactctgtctcaaaaaaaaaaaaattttttggcgggctttgggggcccacacttggggccctggcttctggggctgtttaaacacaagattaccttgaccccagggggctcctttgagcggggaaacggcccattgatgtccagctgggttgccaggtcaagattttttctaaa

SEQ ID NO: 562099 - DNA, 162 bp, Homo sapiens
gatagctggtccagagatacaacaggatgaataccatcccccagacccgatccatatcagtcacggatccttgcagagtcggaatctaaactggtatagcatccttgtggaagttgattacattctaagtgacctaccagaaagcatgggacacatctgggg

SEQ ID NO: 562100 - DNA, 1295 bp, Homo sapiens
  misc_feature (35)..(35): n is a, c, g, or t
gatgggaagagcagtacctacatcaatgctgctcntatggacagctacaggcaaccagctgctttcatcgtcacacaataccctctgccaaacactgtaaaagacttctggagattagtgtatgattatggctgtacctccattgtgatgttaaacgaagtcgacttgtcccagggctgccctcagtactggccagaggaagggatgctacgatatggccccatccaagtggaatgtatgtcttgttcaatggactgtgatgtgatcaaccggatttttaggatatgcaatctaacaagaccacaggaaggttatctgatggtgcaacagtttcagtacctaggatgggcttctcatcgagaagtgcctggatccaaaaggtcattcttgaaactgatacttcaggtggaaaagtggcaggaggaatgcgaggaaggggaaggccggacgattatccactgcctaaatggtggcgggcgaagtggcatgttctgtgctataggcatcgttgttgaaatggtgaaacggcaaaatgttgtcgatgttttccatgcagtaaagacactgaggaacagcaagccaaacatggtggaagccccggagcaataccgtttctgctatgatgtagctttggagtacctggaatcatcttagttgggtgagactctttaaagtgcatccatgaagaaacctgtccatctattgagccagcagctgttgtacctgttacacttgtgcagaaagattttaatgtggggggtgggagacttttacatttgagaggtaaaagtattttttttatgaagttgtgtatcttaataaaaaggactgaattagtttttattactatattaaagcatcaacatttcatgccacataaattatatttaataagaaccagattgaaatgagaacgtattggtgtttgtacagtgaacatgccaccttttttctcatggtttcagtagagcagctaccacatgttgcatgagttcatactttctacgtggcatgaaatgttgatgctttaatatagtaataaaaactaattcagtcctttttattaagatacacaacttcataaacaaaatacttttacctctcaaatgtaaaagtctcccaccccccacattaaaatctttctgcacaagtgtaacaggtacaacagctgctggctcaatagatggacaggtttcttcatggatgcactttaaagagtctcacccaactaagatgattccaggtactccaaagctacatcatagcagaaacggtattgctgtcaggggagaaga

SEQ ID NO: 562101 - DNA, 723 bp, Homo sapiens
gttttcgggcttgtaccgctggcggtgcggcctggtgtcggcttgcaaggttctttctgtgttgttctctgccctgccagggccgtaagctggtgcgtgcgggtagcggggctctccgaggagccgacgcggggaccatggtccacctcactactctcctctgcaaggcctaccgtgggggccgtttaaccatccgccttgccctgggtggctgcaccaatcggccgttctaccgcattgtggtgctcacaaccaagtgtcccaggatggccgttcgtagagcagctgggctcctatgatccattgcccaacagtcatggagaaaaattcgttgccctcaaacctagacaggatccgtcatctggatggctgggggccaacatctctaagcctatggaaaagctttcgtgggtctatgctggatttttccctctgcatcctatgattgattcaaaattgctgagagatgcgaaaggaaaacgggcacgtgaaagtccttgtaagttctcagaaaaacagatgcagaagctacagatacagaggctacagagaccataaatgaggttgacttttagtgagccatagcagtgggaacaaggtcaaggtctttctgaaacacttgcagcgatctaattgtgtagatttggggtcactaaatggggttatcctgacaaataaaaaaaacaagaaaacaaactttggcggcgttaacgccctagaaat

SEQ ID NO: 562102 - DNA, 1072 bp, Homo sapiens
ctaaccaagcgtccgtggcaggaatttgttgtgcgtggtttccttgtataggcgtaatcgaattattaactggggcgtattgggagtaactgctagtagtatatcatggagacttatcatactagaatatgtttcatttaacccatacaagccgcttcgagagtaagtaagcacgcagacgttgcaccaatcaggacgtaatgatttccgggtagcccatggaggcgattgatagagagacaattaacgtcgttggagtcgaggttggagggtggagacttctccatgaggcttggatcatctcgctactctgcatagaatttgatactgtcgatgcttgcatcttagaggtaataacgaagtccaagagtagagtctagacatttggaagattgagggtgggtacttagggcaggttggattggtcgtgtatagcttttaaattaaggattaatggggataaactagtctagtagaccggctaaagggaggatcgtatacccagtagagccatcgcagttctagaagtacaactagtcccaggtggtcacgcactcatttccaataggagggcaatttgcatgtgcacattaggtaattccaccaggggaggtatgcgatggtaatcccccggttattccgttggacattcggcgatggtactggcctcttggatgagcccttatccattttggtgtttcccattcgaagtgggacgggaagtgcgtaatttccataatgcgacttctttgatagtccacaatgcaatccacaggcctttgagagtacgccccgaggggaactgcttcgagtcctatcgcgtcgttggaaaaagacttcctagccaagaagttgccccattggttagagggggagtcttttctagccaccaagcggaaggcgtccaaaacattcaaccgatggagtacgtatcgagagatggtcccctaaaagattagtaaccagaagggcacagccatgggacatacgcaggttgcgcttaatttgagctgttacaaggcctcttcataaagtttaatcaccctttagcgtccaattgttaggaccccga

SEQ ID NO: 562103 - DNA, 320 bp, Homo sapiens
aacgcaggaggcctgactcttctgatgagagaagaacaggcactgctgagacgcactgatttctgacagctctgaagacagcagtgctgctgggcgcctgaacgccgtttacaaaggtattaggtgctcaccctggccgccgctcctctaaagacgctccaccgcaatgagatgactctgtgtctcctccagaattttctgggctaactcttgtggatccagttttgggttgctttcttcttgggatttcacggtactgtccgtttctgtgctagactggtctgattctcctgtatctgagcttgctagttttcccacct

SEQ ID NO: 562104 - DNA, 295 bp, Homo sapiens
tttttccttttaaaaaaaaaggggtttttttgggcgggggggggggtttcccccctttttcccccccctttttggggggggggggggggggttcccctgggtttttttttttaacccccccggggcccccggggggaccccccttttttttttaaacccaaaaatttttgggggggggggggggggcccggttttcccccttttctcccaggggggggggggggaattccccccccctgggggggggggttttcccccccccccccccccccttccccccaaaggttttttttta

SEQ ID NO: 562105 - DNA, 623 bp, Homo sapiens
gttgtatctgtgtcgtgcccggcatggctttgggcaattgaatgcacttaccacttcagtgatgactatcctccctccagtggagaagctgaaaacggtgctgacagaaggtgaaagacttccacatcaacttcctgtgataatacgcgtgagacgcctgagccccagcgggagacatgtaccttgtgctcttcctacccaatgcccgtcaggctgaactcgcctcccccgtgactctgcctcgtggcctaggaaagaggccgctggtcaacttcgtcatcattttgcccctggagacgtcttctttgtgcctggattgttgagagcggctctcttaatgagcaaaaagcattctatatgcaaccgaggagtaagaggggacctgctcagcaggtgtgaccaggttctctgaatctgtcattgtgtgtgcttctggaaagttcatttggggtttacaacaactaggatgtgtcgggtgagatgttgcagatcacgcgcagacatgagcccgctgtccgccgcaaaatgtgtgacttaccccggtgcacaaagccgcgcacatctaaacccacccaccataataaagtcgaatattccccaaacaaacgtgaagcacccgtact

SEQ ID NO: 562106 - DNA, 382 bp, Homo sapiens
cagtcactcctctcatttctaaaatagggacgtggccaggcacggtggctcatgcctgtaatcccagcactttgggaggccgaggcaggcggctcacgaggtcaggagatcgagactatcctggctaacacggtaaaaccctgtctctactaaaagtacaaataattagctgggcgtggtggtgggcacctgtagtcccagctactcgggaggctgaggcaggagaaaggcatgaatccaagaggcagagcttgcagtgagctgagatcacgccattgcactccagcctgggcaacagtgttaagactctgtctcaaatataaataaataaataaataaataaataaataaataaaaaaaaataaagcgagatgttgccctc

SEQ ID NO: 562107 - DNA, 880 bp, Homo sapiens
  misc_feature (2)..(2): n is a, c, g, or t
  misc_feature (104)..(104): n is a, c, g, or t
  misc_feature (173)..(174): n is a, c, g, or t
  misc_feature (225)..(225): n is a, c, g, or t
  misc_feature (254)..(254): n is a, c, g, or t
  misc_feature (268)..(270): n is a, c, g, or t
  misc_feature (279)..(279): n is a, c, g, or t
  misc_feature (294)..(296): n is a, c, g, or t
  misc_feature (298)..(298): n is a, c, g, or t
  misc_feature (315)..(315): n is a, c, g, or t
  misc_feature (320)..(320): n is a, c, g, or t
  misc_feature (325)..(325): n is a, c, g, or t
  misc_feature (328)..(328): n is a, c, g, or t
  misc_feature (330)..(331): n is a, c, g, or t
  misc_feature (339)..(341): n is a, c, g, or t
  misc_feature (343)..(343): n is a, c, g, or t
  misc_feature (349)..(349): n is a, c, g, or t
  misc_feature (630)..(630): n is a, c, g, or t
  misc_feature (654)..(654): n is a, c, g, or t
  misc_feature (676)..(676): n is a, c, g, or t
  misc_feature (682)..(682): n is a, c, g, or t
  misc_feature (684)..(684): n is a, c, g, or t
  misc_feature (686)..(687): n is a, c, g, or t
  misc_feature (690)..(691): n is a, c, g, or t
  misc_feature (705)..(705): n is a, c, g, or t
  misc_feature (722)..(722): n is a, c, g, or t
  misc_feature (741)..(741): n is a, c, g, or t
  misc_feature (744)..(744): n is a, c, g, or t
  misc_feature (751)..(751): n is a, c, g, or t
  misc_feature (783)..(783): n is a, c, g, or t
  misc_feature (790)..(790): n is a, c, g, or t
  misc_feature (804)..(805): n is a, c, g, or t
  misc_feature (808)..(808): n is a, c, g, or t
  misc_feature (861)..(861): n is a, c, g, or t
anaattatttggttactgtatacagacatagcctaagtaaacaatcaaataaaacataactacatgcatatatttctgaaaatgaaaataaattaattactganatttttaaaacttcagaattctattatttttctaaaatatctaataaatcaaaatttactaacactttnnttttattttaaaaccttttaaaatatatgcttagatatatatttaaaggangtattttactatttctaccaatatcattnactaaatgcttaannncctaccgcnatgttagccactttnnnanaatataaaaattaaggnctgcnttgcnggngnngttatttnnnancaagtnagacatacacaaaagccctaagaataagaaaagagagtgtaaaacaactagtattttgtataattcatattaaagtaaaacacacacacatacacagaccaaagttagggaagatagtaaaattcatttaataggcatgttccatataaccattttgttacaaattttgcattttccacatgaaaaaaaatcacagtaggcacatactagaagcaaaatatgtcagacaaaaatatcctaaagatgtttctgttatcaaacttttacaatttttccaagangtttttgaggtttgggaaaaagtntggggtatttttggcaaaaaanaaacanantnnatnnatgttagttttgantattgttctttctcacnaaaaatgtccataattttntanaaattcnatgaagttttaaatcaatcatgtttgatttanatttacnaagaatgatttgcnnatnacaataaaaattgaattaaaaatacatcaggctaaataaatccaaaagagaanagtgaattttgttgggttt

SEQ ID NO: 562108 - DNA, 767 bp, Homo sapiens
  misc_feature (402)..(402): n is a, c, g, or t
  misc_feature (457)..(457): n is a, c, g, or t
  misc_feature (519)..(519): n is a, c, g, or t
gaatcctcctcagctagaaagagttggtggggagaccaataaaaataaactgtgtatttatgaatatattctggtttatctccattttaggattattgaaatgtaatgcaaaattacttgataaccaccaaattctttggtaaattgcaactatttctgtccccttgtttttctctctttaaatgcagtttgtgagtcttcacaggtaatgttggacttttctttgtagccctattggccaaaaatggttagacaagtcactgcaactctacagactaatttgtaccatggttgcactaatactttcaacagctcccttaaaatgcactttgaaaacaatagccatcatttaattgtaggatatgcagtaaaggaaaagaatcttatattttgatcagattnatagaaagtggttaatcttaactgttttgttccttgtctgaagaaagaatgaaanagctacatgttaggctgtgagtcaggctgcctgagaggagttgttttttagtctgaagttcntaattacaaatgactgctcagattaccttttttttctttactttatttgacttttggtttcattacaggagaataaaatgtatatgcctgttacaagaagaaactactgaattactcatttatttttccttctactatggttgataccatcttttgacgttttgccttggagtagtttttagttaatactaggtcatggtttaactgaaatgtcttttccagctgaggagggatctctaaatcgccgg

SEQ ID NO: 562109 - DNA, 325 bp, Homo sapiens
accatgtttcccggtaccatctgctcgccatgacgaacactatagtaacaaaccacggtccatgaagcatattagtaactctcagctgcatggatgcaggaccacacccaagggtgcacatacactccccaccctctctgcagagacaagcaacaccgatccgacccaacccagcctcagcgggaaggcctctcttcctccaccattaccaacaataccgactccaacagaccactcggcttactgtcccgggcttaccagatgaccagctaatgttttaagtgaatggataagttaaagggaggaagaaggggtggagtgaaag

SEQ ID NO: 562110 - DNA, 280 bp, Homo sapiens
cagcatttccagcgggcaagcccacaaccgtcaaggttgcggagaaatgcacgttcgttattgccgataccggcacctctggatcaaccgctgccgccgtcgacggcgtctctatgctgcgcgacatccagccgcgcgtggtggatcgggtggtagaagaccttgcgaatttgaccgatgacgtggtgtactcactgggcattggcgatccaattcgggtgggccaatccatgcacgaggctcactcactgttggcctacctgggtgtttcgtcaccgtc

SEQ ID NO: 562111 - DNA, 254 bp, Homo sapiens
cagagatgatgcgacggcactccagcctgggcgacagagcaagactccatctcaaaaaaaaaaaaaaggctgctgaattcgggcagggcttttaaaatcccgggcccagggggttcggtaactcgggggcaccgtggttagtgcccttcttaggccgggcaattaccctcgttcctcaatttagcattgggccagtgtctctaacattctctttacccagtttttacgggggccggtgtaagagcctttcacca

SEQ ID NO: 562112 - DNA, 210 bp, Homo sapiens
  misc_feature (19)..(19): n is a, c, g, or t
tgatttttgtgcttcagcnctccctattagtggggattacaggcgtgcaccaccatgcctggctaatttattgtatttttagtagagactgggttttaccttgttggccaggctggttttgaacttttcacatcaagtgatctgcccacctcgacctcccaaagtattggtattacaggtgtcagccactgcagacaaccaagagtgtcg

SEQ ID NO: 562113 - DNA, 284 bp, Homo sapiens
tccgggatccaaaccccccggcccctggggaggggggttttttttaaaccgtttttaaaagggccgggggttttttaaaaatggaggtcaccttttttttttccaaaggatttttgggcggtgggaaaaagggccaaagccttttcccaccgcccttaacggtgggtttttttaaaccaggttttttaaaatccctaggtttttaaaaaccatggggttgggggttttttttgggttttttttttttttaaacctgggcccccggtaaagggtttttcccatta

SEQ ID NO: 562114 - DNA, 340 bp, Homo sapiens
tttttgcgattttttttcgtttagctcatcagctatctttagtggggttttttggtttgttggttttgagacggtgtcttgctctgttgcccaggctggagtgcagtgatacaaactcggctcactgcaacctctgcctccagagttcaagtgattctcctgcctcggcctcccaagtagctgagactaaaggcgcctgccacacgcccggctaatttttgtatttttagtagagacggggtttcaccatgttggccaggctggtcttgaactcctgacctcagtgatccaaccgccttggcctctcaaagtgctgggattacaggcgtgtgccgtcgac

SEQ ID NO: 562115 - DNA, 290 bp, Homo sapiens
tgaggatccctctctccacactggcagttgctgcatctgttggtttctaaaaaatatgtccccagcccagtagaaatgcccaaggcttcaggcacagagaataactttcatataaagatctgagagtctaggaagagcatatgaaactgtgatacgttaaaccagtgtgccgccgatgcatgtcttctttgtagaaaccagagataattcaaatgctctatgactctgcactgtgtctcaatggcaggacgttacagataggccagttgctgctcccagtgtggagagag

SEQ ID NO: 562116 - DNA, 331 bp, Homo sapiens
cgcagaacaagctgaaagcttggatacatatgtcagtggagtcttctgagtgtgtcctggaagaagtcgaggctcccaggctctagttgctggttcttacatgccaccactccacagttccttcaccagattgattcactggctcatgctgatatcataaatgcggtcaagaagtttgtttctggccagaactcaatggcagcaagtggaaatttgggacatacaccttttgttgatgagttgtaatactgatgcacacattacaggagagagctgaacgttctctcagcccagagcagctcgcccctgagttgcagctcgcccctgagtt

SEQ ID NO: 562117 - DNA, 516 bp, Homo sapiens
  misc_feature (516)..(516): n is a, c, g, or t
ccgggtcctaattaattgagaccccataaacaaaattcctttgcccaaacaaacttaggtgttcaaaacccagaaaggcttttgctcccctgccaaacagaaaagctccaaaaaagctaaggggggcacaggctgttcattttatgcaaaaggggcgggcttgatttgaccaagggtgtgctaagcctaagcgcagtttcatgaagctgcaggcttcaccccacctcggaaaggcgggggtctttttggagacagaggaacttatcacaaaatttgggaaattgtgggaacggaattccccatgcccttgttgaagggacctgcggttctcatggtccaacaataaaacaggggggtgattaccttggggatttaaaaaagggggcgattatccacattttaaggccacacccttagggttaaaccctctgggaaccgtttgaaagaaaggcctcccccaacccacaacaattgggggtttttaccgaaggccatattgggggttttgtgaccccn

SEQ ID NO: 562118 - DNA, 171 bp, Homo sapiens
  misc_feature (46)..(46): n is a, c, g, or t
ctgatagaaagtattgcagccagccgtggtgcggcacttgtatccnagctactcccaaggctgagcaggagaattcttgagcccaggagtttaaggttgtagtcgctagacggcgcctgtaatagccactgcactctagtctgggggacatatgagacccctgccatctca

SEQ ID NO: 562119 - DNA, 132 bp, Homo sapiens
gaatcctagctcggtaccccagtttacagcgtagggtcagtttacaacgtaagggtcattttacagcgtcagggtcactttacagcgtccgggtcaatttacagcgtcagggtcagtttacaccgtcagggt

SEQ ID NO: 562120 - DNA, 834 bp, Homo sapiens
gtgtgtgctccgggctcggaacacacatttattattaaggaaatccaaaaaagatctaaaagaatcttggtaaggaaaccccaaaaaaattgacaaaggaatccgcgtctcccccgccggagacttttatgtttttgcttcctctttgataaaagtaacccggtgaagcagccgagagcgacccgcccgccgcggccccggagaagctccaagaaggaaccaagagaccgaggccttcccgctgccggaccgacaccgtcacctcgctcgccgccggcagccggcagccagcggcagtggatcgaccccgggctgcggccgtcgagtagtatcaattccgggtggatttttggtcccttctgcgctttgtgtccccgttccacctgacgcgcgtgctctccgcgtgcccccgagcccgcgggcccgcgcggtctcccccactcttggccggccaggcggccacggacacgtcgggtcaccctggatgcggacccccgttgccggacggatggtcgccaaggtggtccccagagcacgcgtccgaggggccgggccgcgtctaggaggcggggacacacggaacgccggggagcgtagaaagcggaacgacaagggcgccccctcggcgacgacagcgacatcacagacccgggccgcggaggccccacgcgcacgaagcgatccgcgcggcccaggagacggcaggggaaccacacccggcgggcccacgaagggtcctgccgcggcgggcgacccacgcgacggcacgcaggggacgcggaggcaccgcgtgggaccccgcggggggccgggggggaaccgggccacaccgga

SEQ ID NO: 562121 - DNA, 142 bp, Homo sapiens
  misc_feature (83)..(83): n is a, c, g, or t
  misc_feature (92)..(92): n is a, c, g, or t
  misc_feature (131)..(131): n is a, c, g, or t
  misc_feature (135)..(135): n is a, c, g, or t
agaaagaaagatagatgtttggagattcaacaagcaacatttgcttccaaacatggcacacaaactggatatggtggcatgtncctttagtncgagctgctcgggaggctgaggcaggaggttcacttgancctnggaggct

SEQ ID NO: 562122 - DNA, 781 bp, Homo sapiens
  misc_feature (451)..(451): n is a, c, g, or t
  misc_feature (457)..(457): n is a, c, g, or t
  misc_feature (781)..(781): n is a, c, g, or t
atggccgtgaatcaatttttgttgtaatcgttataatgaaaggatgctgaacattgtatgtgaggtggtgcttatgttaattagcttgactggagccattccacagtatatacaggcacacctcactttattgcgctttgctttattgcacttttcagctattgcatttttttaaacaaattgaaggtttatgcgaccctgcgtcaaacaagtctatcagcaccatctttccaatagcatgcgatctctttatgtctctctatcacattctggtaattctcacaatatttcagactttttcattactggtattatgaaacatagtgatctaagcaacagattttcaatgtagatgaaacagccatctcttggaaaaagatgtcatctaggactttcatagctagagagaagtcaatgcctggcttcaaagcttcaaaggacaggctgactntcttgntacggcccaatgcagctggtgactttaagttgaagccaaaattcatttaccattccaaaagtcttagagtccttaataattatgctgaatctactctgcctgtgctctatacatggaacaacgaagcttggatgacagcacaatattataagccaactgatgcgagctactactcataataaacgattcctctcgaaccattactgcttatttgacatccaccttgacacccaagagctttcatggagatgtcccaagaccatgagtggtggttttcatgccttgaagcccattgatcgagcaattttgactttttttattttn

SEQ ID NO: 562123 - DNA, 855 bp, Homo sapiens
cgcaagcgttccgtggcgactgggcgcgacacgtatggctgtgggctatcacaccaggtccactgtggatcacatggcaagggacaccaacctaggatgcgactcaagggccaccgagtcggcgtccgtgatcgttcgtgaccctagagaaccctaacactaggactagtggctctgtcatcctctgtgtcaagctaattcatggataaggatgacggagtgcgctagggcatgctgtacggcaggcgtagccaagtactacccgtcctattggaaaggtccaccagggtgaaacgtgctcaccacaacgattggaaccctagaagtccgtccgaaggcgtgtagtcgagacactatcttgagttctactagaagatgtgctccgatgcgcgaggaagtccttgggcatttacgcttactacgtccacacaatgagagatgcctcggtcataacaacttagccgatagcacactagatactacacaaagtttaagcctaaatacccagggacaataggagcatttcactctcctaaagcttggcaggcgaagggggagcaagtcctatctgccaatggggaaccctatctgggccgcccaagttgttgcctcgccatatgcatagaccctaggacctacccatcaagagtaccgacatagagcaaagtatcgcccttagtacgaagcggctgtaaacggctcgtgccacgcagtttgtgccggagcgccaaacagatttggccaaacgataggcggcggcgggcaaagaaggggcgccccatagattggcgcctcccctggaagacgacaatgccccatgggtgtccccatggcgtgacgcctacctcctttggt

SEQ ID NO: 562124 - DNA, 884 bp, Homo sapiens
tggccgggcgtggaggctcacgcctgtaatcccagtactttgggaggccaaggtgggtggatcacttgagatcaggagtttgagaccagcctggccaatatggtaaaaccccgtctctactaagaatagaaaactcagccggttgtggtgacacatgcctgtggtctcagctatttaggaggctgaggcaggagagttgcttgagcctgggaagtggaggttgcagtgagccgagattgtgccactgcactccagcctgggcgttgcagcgagactcaaaaaaaaaaaggtattcggttctcactactcaaactggggagagaatacctacacaaaaacaacaaaaaaaccagaaaaaccagagaccattctcacaaaaggatacaaggtccatacttaaatgtattaaatccagcagtgttttacacacttatgtgtctccgggatgtcttatacggtggaaagaaaaagtacctgggagatgtgtttgatacagttcaaacgtgatttttaaaaagcgagatggtgtacggaaccatgagtactagcaaagaacttcagaatcatttccgtaatgagacttgcggccggtacatcttgcattatgtgtaggtgaggtaatattcctctgggtaagggtttgcggggtggtgaataactggaggcgtcagacgggaaagaaattggcttttcggatttacccctgttcataagcgggagaagtggtatataaatttacatggttcgggtggcaagaaatcggcgggggagagtgaatccggggaggaggttcagggagagcgaaaacaacgaagggggacggacggaatgaatattttcccccaggggtgttttatattaaggtggttcgtcgctggtggtta

SEQ ID NO: 562125 - DNA, 285 bp, Homo sapiens
ccatgctgggctaggcaggcacagcccggacccgttccttgatgaaacggatcatccggggcccccgctcggatcacaattccccgtggaaattgaggacgactctgttgtccagcctacatggcgcagtggggctctccagtaggaagctctcggcgtaatgttccaggggcaagttcaccacctgctcgatgtgcccgccttaatattcataggggtatatgcagtctacaatcacccacttatccacgaggttgctgaacttgcccatgacgctgcaaactg

SEQ ID NO: 562126 - DNA, 1012 bp, Homo sapiens
ggaggctctgtgcgcacttgggacacagggtgcctcatgaattcatatcctcatttgaagtcacgtcgatttgttctcatattattccagatgggggaagattgatagcgcatagaggtctctaagacggtttgccacaggaccaaacagccagttggattcagactccgggctgtgctatgtttgacctatgtcggatcgaaccatggtgggttccatatggactgtcacgtagtgaggccgctgttcctggacctgtggggactataccagcatgtggtaaaacctccaacatgaccacgtggggctgcgagacgtgccttagaatcaatcgtttgcgaaagtaagcgatagctcgctgaagccgtgggtccgttcgcctccgtgacgagggagatagggacgaggaccaccccagtagggtcgacgggcgaggttgagaggacgaggagctgagtaaacagttgacccatcatctggcgtgcctagagcccaagcagcgcgcggggcgaaggaggcgtgcttataacgaaatgctgaggcgggtgagggtgaaggagccagcctcctcgcggctcggcccgacgagactgtttggcagacaggtgatccggcggattgctgcagagcctggccacgcgtgggaaattctacccgctcgtcctggtgaccgtgtgctcgcatcgataaccggctgtggatgcggccgggcgaccaactccagggaggatggacctaggccgggggtaggtggagctgaagcagcggtgaaagcagctgggatctaaccggcatgtgctggcatgctggttcccgtgaatccgtccagactacgggggccgccctgcgtggtcgggatgggaatgttccggggtgaacaatttgggcggtgtcccggggcaggcccactgggaggccagctgaagccccaactgggtcagcgcggtcaccaaaagaaccgagcgccgggaagggcagctatccacttagacgcgccgaaaacaccagggga

SEQ ID NO: 562127 - DNA, 408 bp, Homo sapiens
gatgttgtcttgagataataatgtcttctatgggggctggaaggggaagactacttccttctactgcagagttgctccatgctgctttcttccacagacctactttgtatgaaatgctcccatttctcaggtgttttccttccttgatccccttctaacaatggcctcctgaggttccacattttcttttatgccagtttattcattttctcattcattaatccaaaagatatacggagtgctagaatctaatgagaaagagcagagctattgaaaatttgaagcaaggccaggctcagtggctcatgcctgtgatcatagcactttgggaggccgaggaaggcggatcacctgaggtcaggaattcgagaccagcctgaccatggagaaaccccatctctactaaaa

SEQ ID NO: 562128 - DNA, 298 bp, Homo sapiens
gggattaactgatctcacggtcaagcacgcggtactcctccttggatgtctcagccacagtgcctatcagtgatactgagtggagagcacacattgcccgagggcctacggagccctcggagtgctgagtcaaaagagtctccctcgaattggtgggcctttagcaagacttggcttcttcactgggagagcttttattcagtgaggctgctagcaccagtcctccctgcgggcttgccaagaaggagagtgctgaacagggtgcattcctcttgtgctccgggcctgactatcaccg

SEQ ID NO: 562129 - DNA, 169 bp, Homo sapiens
aaagggggggaaaacttttttttttaaaccccccttccttttttttggccaaaccggggttttaaagggtttttttaaaattggtttttttaaaaaaccccctccaggaaaaccccctttgaaccgggaaaaggggtttttttttttttaaaaaaaaaaatttgggcca

SEQ ID NO: 562130 - DNA, 299 bp, Homo sapiens
  misc_feature (91)..(92): n is a, c, g, or t
  misc_feature (100)..(101): n is a, c, g, or t
  misc_feature (156)..(156): n is a, c, g, or t
  misc_feature (186)..(186): n is a, c, g, or t
  misc_feature (293)..(293): n is a, c, g, or t
  misc_feature (295)..(295): n is a, c, g, or t
gaaattagcgatgatcctattccatcacagagattctactccatagaccacttcatcgagaaccgcaaacatatcatacacaatcgccatnnccctactnntcctagacctaacctgactagaaaagctattacctaaaacaatttcacagcaccnaatctccacctccatcatcacctcaacccnaaaaggcataattaaacttacttcctctctttcttcttcccactcatcctgaaaaaactcctaatcacataacctattgaaccgagcaatctcaattcaacatagtncnccat

SEQ ID NO: 562131 - DNA, 821 bp, Homo sapiens
  misc_feature (413)..(413): n is a, c, g, or t
agcggtgggggttgcagtgagcggagatcgccccactacactccagcctggtcaacagaaacaaaaaaaaacaaaaaaaaaaaaaaaaaaaaaaaaaaaaaattttttcccaattggctcttcaatttttgaccataatttcccgggatcaaataagggttaaaaaaattgattgctattcaacaccagggcaagaagaaataaaggcaaaaattttttctgggtctgggtttggagagacgccttcttaggggacttggacaacaactacattattgccacacttcttaaaagacccgggggggtctccttaactctcagcgcgattgtccatttacactgtggctggcgaaaccttgtaacacgacttcccagggctccccattcacagggaagatttgcgctctcctgantgagaccgttgccatagtgtggcccgtggcaccagtgggcttatttctggaaaaaattcgccttccaaggttgaactctctttaaacattcccacagtttagaagaaaccctttaaatttacagcggggttgaaaaccccagaaccccagggggggccttcttaacttaagttgtttcactctttaaactctccccacaaaaagccctttcgggttgtgcctttgtttggcaccagaaaacagaaaaagcggggaacgagagagggcccctaatatgccgggtattaccctggggcaagcttgtgtcttcccctgtcaagacaagaattttgcttacccaaatttttaaaaccccttttttgggcagggtttgtctgggccctcttgttgaagcccaattttttttac

SEQ ID NO: 562132 - DNA, 136 bp, Homo sapiens
cacgaggcgcgcgacgaaatcgagaatggccgatttggccgcgccgtcgctccagctcgcaagctccctcatgacggaatccgccttgctggcgcatgcgaccgcagtgctgaaacaaatcgcgcgcaacggccaa

SEQ ID NO: 562133 - DNA, 146 bp, Homo sapiens
tgaggtgatctagaggatcccaggctttatacttccttagcttagaggtcaggcatacttcctcaaggctttatacttctataagtatgcatggacctctagtagctaaggaagtataaagcgtggagaaagtataaagcgtggag

SEQ ID NO: 562134 - DNA, 109 bp, Homo sapiens
gatggcgtagagcctagcatcagcgcaggctcccagccgagtccgttatggccgctgccgtcccgaagaggatgagggggcctgctcggtcgaagctgctgcccggctg

SEQ ID NO: 562135 - DNA, 1216 bp, Homo sapiens
  misc_feature (659)..(659): n is a, c, g, or t
gccgcttgcccgtcgtgtcgctagctcgctcgtgtgctgcgttgtccctgctccatggctgctcttctgtgctgtgctgctgtgctctcgccctgtgctctgtgccctgtgtgcccctgcctgctgacccgtggctgtggtccctgccaatgtctgccctaccatgctggtgcttgcatgtcacagcatgtgctcctgtgggcctgccatgcacgtgcccaactgtgtagttgcttgttgccagcacagtggttcatttgggcactacatcagtgcaagtcacttacaccccaactgccaccagcgagtgtgtacacaacatggcacacacatctcgttggccaaaatccaaccagtccatccagcttcacgcagtgctttgtccctgtggcatcattgcacacacaagtgtcaccttgggcggcagcaatgtgggccttgtccagagcccaggccacaatacccacatcttacgaaaaaccctttatcacctgaagcaacccctaggcgaagtctgttgtgggatccaacccactcagctcaatgccttggtaccagctgagcacacatgccaccgggaatgaaatggctatgaggtggcctagacgaacttggcagcggtgcaacctgtgacaagacttttcaacccagtacatttnctggcccccgataaagcaaaacgaaagtgagccttaggaggcccttcctattgtcccagcttagcaaaggtttgccttagggaactcccacttgggttccgaggccaacataggttccaaccaatttttggaggctttgctccaaattagccccctttccctggtgtaacaccaatacattgtgtctgagtggccatgtggccgacagtccccctggaacttaggacattgagggcttgcgacaaaccgcagggtccattgcaattcaccccgtaccagcctattccgtacgttgataccaccaagaaacagtttcccataagcacaattccccatagagtttcccagacgcaagcattaaattcccttaaacttgtggggcagttcgggtcaaccctttggttggaagtactttgggttccacccagtagatttgacactacgaaacatgcgcgcagcctagcatccaaatgtgtcaacagagcccaaactaggcgggagtaggggtcagcgaccagccttccacgtccagagaaacgctgcgtccagttccttcg

SEQ ID NO: 562136 - DNA, 325 bp, Homo sapiens
attacggcgttgttctggattcccgtcgtaccttaaggggaactttaaaattgtccggggcccttaatgtcctgcaaataaggagggaggatgtccttaaggtccttgcagcaggaccccacttaggtggcaccaattttgacttccagatggacagtacatttttaaagggaaagttatggcactatttataatcttaagagacctggtaaagcttttctgcgcttgtcaatgttccattaaaccttctgatgcagtttatactcagatctgcacgctgtctgagttctctcactgacactcattgctgcgttatctgacttat

SEQ ID NO: 562137 - DNA, 820 bp, Homo sapiens
gcctgtgtgaatgagattccacgccctgtagctcccgtgtctcagtggcgctaactagccacgcagagagattggttgcatctcacacgaaatccgcaggactacgtggactcatatatgcggaagtactcttgtcctctcaccacttcatttgtattcaggctctgtgagaaactcttatccagtcaacacacgatggccagcaacgttaccaacaagacagatcctcgctccatgaactcccgtgtattcatttgggaatctcaaggactctgtgtggtccacgaaatctgatgtggaggcgaatctttccgaagtatggcacaacttgtgggctgctctgttcataagggcttctgccttcgttcagtatgttaatgagagaaatgcccgggctgtgtagcaggagaggatgtgcagaatgatcgctggaccaggggtttagaatattaactggtgcagagccaaaaagtgaaccgaggaaaaagcaggtgtgaaaacgatctgcagcgagaatgtacggggtcaagtaaacaggacaacccttcctccgtgccccctcctaactcagtccctctttttggaacttgggacttattgactttcaaagggactatcatcgatcaggattgtacagtttaacccaagccacgtggtaccttccttccctcctcctaatttgtcggcgttgtagttgccttcgaaaacggtcacagggtgtatcacggcaaaaacacttccacgaaggggaaaaagtggttccaattcctcaaggagtggacacggggggactttccaagtttggaactttgacacgcgc

SEQ ID NO: 562138 - DNA, 238 bp, Homo sapiens
agaggatccccattatgcacgtgacgatgtgaaggctcgtccctccgagctggcgttaccccgagaatggacagtgcagaaaacgatggatggggcccagtgagaacacctatactccatggacccccacactggagcggcagtgtggagaccatatcgcaaccatgagtggactacataccgtggccaatcatacaacaagatccaatccgcgacctacatgccaacagaccataca

SEQ ID NO: 562139 - DNA, 108 bp, Homo sapiens
gcgtcgaccttcaagcaccgtttttacagaaaggcgaatggcgtttaaaagtttattgtctcggctggggtggtggctcacgcctgtaatcccagcactttgggaggc

SEQ ID NO: 562140 - DNA, 107 bp, Homo sapiens
gtcaaatccagcaggcacgggtccagggccagtctgggggtccgggcccagctggcgcatgcatctttcagcaccagtccagccgggggtccacggcagctcgcaat

SEQ ID NO: 562141 - DNA, 398 bp, Homo sapiens
cccttgggttcattgaatgggccacggggcccaaccctaaaaaattttgggcccaaggtttccgccccccctttttaaggggtccccgtccccctggctggctccaaggtgtggaaaacctgggagtggtttccgtcctggggccccaggaggtttccccaaagaacgactggggcaggtgctggaggaggtcagtggacaaaatggggaaatgtggaaacccccaaagccccttttcaggcagccctgcctccaaaaccgacaaatgggtaagggggccccaaacctggctccccccgctcctgtgtggaaaaagggccacaactgtcccggatggttattttttcctttcccccaacccctttggaactcaagtaaatcccatgcatgttgggtga

SEQ ID NO: 562142 - DNA, 845 bp, Homo sapiens
tgcttgcgaagaaggtatggcctgtcccccctcgttggtctagaagcgttggggagtgtggtcgccccccaactgttgttagaatgggtcggaaggcgaacgcccccacgaggccgtgcaaatggaggtcgccgcggctggacacccgcccagttggtcattgcaagagaccttgcctcgacgaggtgtacccacaccccttgggggggcccccgtgctactcggtgtgtgcaggatatatatgctttgggcaacgccactcgttccgtcgagcgcgaggggccgaactgccaacaaaaccgccgggcgcgcccaagcgacgaggtgcgtccgtccgagaggtcgccacaggccgaacccccacacacgtggaagcgccacgagacgggaccgcagacgcggcaccaaacgggagcactgcattaccctgccgtgatggcgccggccacgcgccccctgcctgcaagatgcgcgcggcgcgggagagagaggcgcggcgtctccgagcaaactgtagcttttggtggtccaccaggggcccgtcgtgaaagtccaggaagggacatagctcttgcggtgatcgagaccacatgcgcggatgataccccgcttcacaagtgcaagcgagacaacatcttgcgagcggcaccccacgggcaagtctatcattttctatggcgccgtgagagcgcgagcggcttgttaattcaattgtaggttttgataaaagctcctcacgttgtctttgtgggcaatcccactcgatgaacgcccacattaggtactcgccagatcgtcgggagagcgcccccagaaaaattcaaaacgagcgacaacataacgca

SEQ ID NO: 562143 - DNA, 651 bp, Homo sapiens
atattctggcacatctgtactttaaagttcactctaaaatctgccctcaaatctagaactgctatcaatgacagaggtcagaccaaagaacaagcaactgcccccaaaagaaaacggaggtttcctaaacgcaaagcagacattcaaatatgcactgatcaatggtgcactaaacaacactttgctaggaatttgttaaggcaaaaggaccctttctacagtgaatgcaaactatctaagaatgaatttttaaaagtttaatatttctaaatattttggtagagacggagtctcattaggttgcccaggctggcctccaactcctgggctcaagggatccaccttccacctcccaaagtgctaggattacaggcgtgagccaccgtgcctggcaaaaagtatttcacagttattcactgatacatttcctacgtttcaagttaggcgagtgtgattgaatcacccttatttcatctcagcctgggttttcacatctgcaaaagagaaattaacttatttgagatcacagtctagtggttgaagtttaaatttataacttgaattgagtcaagctttttaatattgctaagccacttatagatgcattattattatcaggttattgaaatgagattgtagataaattcctct

SEQ ID NO: 562144 - DNA, 359 bp, Homo sapiens
  misc_feature (71)..(71): n is a, c, g, or t
  misc_feature (97)..(98): n is a, c, g, or t
  misc_feature (114)..(115): n is a, c, g, or t
  misc_feature (154)..(154): n is a, c, g, or t
gccctttcccctggctggcagcgcggaggccgcacgatgcctggcagttcactgtacaaagcacgtgaacncagcaggaagttccgtccagcagctnnctggcagcgcttccgnntcaaaaaagtttccggggacaccgcctagacacaggctncacacacggaacaatggggagatcggcgaacttagcacgggttcccaaaacggcctggggggccccacaatggcccaaccgaaacaacgcgaagggccttttgtggcctttccccccttacgactgagaactggttctacacgcgagctgcttccacagcgcggcacctgtacctccggggtggcgctggggttggctccatgac

SEQ ID NO: 562145 - DNA, 239 bp, Homo sapiens
aggagagaagagaaaaggagcggagaaccggcaaaggaaaagccggaacacaggaggaaactgcaagccagtaaagacaagggatagagatgcggatgtaagacaagcaataagggaaaatggagagtagtaaggtgaatgagactgcaaactaaaaaaaggaagaaaaaacgatagtagatatagtgtgatatagatctaaaaacggatgtggatattggcaaacgggatgtaataac

SEQ ID NO: 562146 - DNA, 426 bp, Homo sapiens
gttccccgggtggggcgtacggaatcataactgtcccatgtggcgtccagtattgcggtaccaaccatccaccaggcacggacgcgctaagcactcagattgtggctctctccaagaacgtttttctctctgctcatgtgtcctgctaattgaatgacttgtcttgggagtggtgagtttcctctccccggaaggcagtttttatttgccactttttaggacaagaaatgtcgcatggcgtacgctcggtgctctcgagctgggttggatatgcccccgacgtcgacttctcatgacaaggaacttaatctttaagtgttggaaaccatcttaaaatgcatactagatctgtcaaagctcatgaagtcagcttcgtcagttattatgcctcggttcgatcctgtttgacatgttttcaacatttcc

SEQ ID NO: 562147 - DNA, 441 bp, Homo sapiens
tcactgggttctcatgatcgtgcctgcctcagccccaaagtgctgggattacaggcgtgagccactgcgcccagcctattagttcattttcatactgttgataaagatacccaagactggataatttataaagaaaaagaagtttaatggactcacagttcctggtggctggggaggcctcataatcatggcagaatgcaaaaggcacatcttacatggcggcaggcaagagagaatgagaaccaagtgaaagtggaaaccccttataaaaccatcagatctcatgagacttattcactaccatgagaacagtatgagggcaactgcccccatgattcaattatctcccaccagttccctcctacaacacgtgggaatgatgggagctacaattcaagatgagatttgggtggggacacagccaaaccatattagacagtg

SEQ ID NO: 562148 - DNA, 1524 bp, Homo sapiens
  misc_feature (371)..(371): n is a, c, g, or t
  misc_feature (464)..(464): n is a, c, g, or t
  misc_feature (519)..(519): n is a, c, g, or t
  misc_feature (627)..(627): n is a, c, g, or t
  misc_feature (755)..(755): n is a, c, g, or t
tgggggaatggtggtgtattttctagccacttgtgttttgggaaaacctgtatggcagtgattatattcatattttcctgtccaaagccacacgtgaaaacaggaggcagagactgtgttactcgtgggtggtgactctctgggtcctcgaggtggtctcttcgtgggcctccgtggtcccttctgggccttataggctagctgcccggggcaccagaggtacagggtgaaagcaagggtacgcagcttggggggaagggaggccgtggtccgtggactttaccgagttcttattaccacgtggtgggccctcaaacctctcccgagaacgaggggccagagaaactgtggtgggcagcctcgattggagnttctcatagggcgtgggcgtggagaaggtgtgggaagcctcattgtgaatagaacctcagtggagtgggaaacatattttgtggagaacaggncattccctcctttcgagggagaagaactcagtggcggactataaagcgtggtagncaatttcccatgtgtgcgcacctggggccaagtgagatcccatattatctttatgcgaaaagtacactgggtctcttctggggttcccccaggtaatgttgtgggacncaacccaatatttgactctccctatttttccccctgtggtggaaccctggggtccctgggacttaacacacaagaacacactgtgtgggagctccaaagagggccttcaaaagaagccaagagaaagngggggcccaagtacaaattacaagaggggggaggtcacaatgtgggaatcctcaatcttgagagaggaccagtggcttattcggggaaacactcaaaaaggggggggcccaaaagggcgccgcgagttgttccaagggggcttctctgtggcctgaaggggtttagaagttcttgccgagtgcccccacaaaatagtggcgccaatggttgtgtggaacgagcactaggaggtaggctcctattctccccacatgtgtgtgggggtcgcccaccacgtcccccactgtggtgaacgctcatcatgtggttctccacacgaagtcgcttctctgcggagaaaaacaggtcttcgtgggccacagcgtttatgtccccctctcttgtggaagaagaaattcaccggggggtgagttatctatgagacgacactcttatccctctcccccaccagggggggggccgctgaaacagcaggaggagtagagagtacccacccccgcccctactgttagtaaggataagagcggtagtagacaagacagttagttcaccaagatgaactcaccttctagtgggtgcctcagcaaagattgtgtaccagcaaccacgaggagaaggatggactagtttaaaccacagcatgtagacgagtgagctaaagtgtagatgtatagactgtaacgtaaagacacacaacaaccacatgactcgtgagaaggaggaagataatgtagataacaaccccactgcgaccacgcactggactat

SEQ ID NO: 562149 - DNA, 397 bp, Homo sapiens
cagagcaagacaaagcaagtagagtcggtatctggagacctttttgcaaagaaggtaggttttggtgtgatttttaaactcttggtattaactatttttttattcttttgtattatgatgttttaaaatcaacttttgaagggttttttgcttgctatatgaaatatattattaaactgatttagttgtcctatattcttggaaagtatttctggttgcaaaagggtggcatttttgtaggagcagatattgaaactgctaataaattagaatcaaataataagggagaattcaattcattttggaaccaaaaagggaatgaaacacttttgcaaattgatttgtattaactaaatgctccctttaaaaaataaaattctggaacgatgaaaaaaaa

SEQ ID NO: 562150 - DNA, 378 bp, Homo sapiens
ggaggatcccccaagcagtcatacagattcacctcatataatgagagaaataccgaaaagtgtcccataccttagagaaaaagatcagcaaatacaacagagcacaaatacttagtgaatgtggaaataaagtttctccgctcttctggtctccatcttatgggttacactgcagctcgttgctcttcttacaaaggaaacacatgtgggaaagttagaacaggagccaagtagataagattagggaaagagccaggctacttctagcctcaaagctctgactggctaaataggcctctctccacaagcatggtcccggatgtaactagacctgtatgagatccactaaggaaaccctgagtctgtattaactgcttg

SEQ ID NO: 562151 - DNA, 767 bp, Homo sapiens
ccacgcgtcgctttttttagttgattattaagtgcacaattcagtgactttaaatacacagtgtcttgcaattgaacccactgagatagaaaacgttctggaactgtcttcatcacccccagaagtggaaactcccattacccaccagatcacatccttcagttcatccccttccgccacagacgcaccgtgccgcggccacgaaattcgtgctcgtgcgtggcctcgtgatgagaacttctgccgtggtattgggcgtgtttacacgcctaacgcgtggatacttacagtcgggcaccaacatattgtgtgatctcctgtgtgaggtggtcgctggggcgcattgtctgcatctttgtagcgtactacagtgggtgtgttgtgcacccattatgagcccattaaagtggtgttgtcgcgaggcgtatagcacaaatatagtgtgttgtcacacacggtggtgtcacaactcgcaaacatgtggaaaagcccgacgggatatctgcacaaacaccgcgttgcgaatttgcctgtttccttataatgtggggcgcgttgcgatagtagcgctaaattctcccccctatgtgatgtgtttgtgagtgcaagagaagacaacctcgacagagtttctatttctgcgtccacactattcgtcacatactgaggagttgtcgcatagtgtggccagcactaatgagtcggggcgggttatccttctctccaccagagctttaaaatttccccagagagggtttaactcacaa

SEQ ID NO: 562152 - DNA, 108 bp, Homo sapiens
gcagaagcaggaagcaagggcttggtgagggcagaagcaggaagcggcagaagcaggaagcggcagaccggcagaagcaggaagcagccgggcggcagaagcaggaag

SEQ ID NO: 562153 - DNA, 439 bp, Homo sapiens
tcaggttgagtgtcttcttactatattatctgatgtgtatgctagttagcatattgtgtcactgatactgtttacaaaagtctacgcagtgtagcgcaaggccgtgtctttgtcggaaaactcgcttattccattaacaaaaactacatcaagtgtgcagatttgtctggcaagaaaagaaaaagcgaaaagcatttttgcaagttccagagatacctgcattgttctttctaactcttctacttctcacacagacaagaggctaattctggggcgttggcaacgcgaacacacaaagagattcacgttaacgaagcaattctccattttgtctcacactggcagaggacactctttttgtgccacacactgggtcaatttttacactccctttctagaggggggccaattctgtgggggggaccaatttctttttgaa

SEQ ID NO: 562154 - DNA, 706 bp, Homo sapiens
tgttttgaatcatccgccgcgactttgcacaagaagggttttggtggttccaaagtaatggtggttcctgctggacaaggtttgcacgggtgccactctatagttaggtggtccccgccaccccgctgctacgtagtagggtccccactgagtagaatttacgctgcgccgcggagtatgtatataagatgccgctctgaattttctcaagaaatgtgcccccccaatcaaaggctgttgcgtgcttttacacaaaacactacagtgcgtgcagttgacccatcttctctgtggcccccccagcagtgagttaggcgtagatacacagatgtcccagaattatcatttgttcgtggctgacaaacaaaatatatcgtggtgtaatagacatatttgtcgtccgggtcccacagtgaaatatggggtccacagaataactcacgagtgacgtagtacacggtcgacactcttcagagatagcgctgtctctttgtcgaatagaaccaagagtttgtacagacaattgtacctcctacgttagagctcattttataaacatatatttttctccacttctaataccacactatatgatcttctttctttacagtataatttccacgatatacagattgacaaataggtgttcctacccactcactataacaaccactagtcctagatgcgccccatcaatgatcgaaac

SEQ ID NO: 562155 - DNA, 221 bp, Homo sapiens
  misc_feature (12)..(12): n is a, c, g, or t
  misc_feature (45)..(45): n is a, c, g, or t
ctgtgctctagnggatcttaaaatagcgacgcactgatgataacnaacaggagatctaaaggctctgctccaattccacagatggcctttcccctttattgagaaggttctggttggagaaagccataatcggaccagaatatctttaatgggtaggctaaattataagccactggactttcccttcctccttccgtcgggctaaattttccggggtaccg

SEQ ID NO: 562156 - DNA, 917 bp, Homo sapiens
agggatctggaggcggcggtcggtggacatgtgctggtggtgccggtcgtattctccgggctgcggaggggttgccattaggggactacctgaggtcctatctccaggctgcggtgactgcactttccctggagtggaagctgctggaaggcggaccggccgccatgtccacgttcaggcaggagtgactgtggatgtgaccattatgatgatggtgggacggagctgtgtgcatgctggccatgttttgcgcatcgtgctggaacgtgcctgtgcatgaatgtgtgcacgtgtgcaaggagtacgcatgccaatgttcatcaatgaagctgccgcctgtcatccagcctggcgtggggtgagccgtgaggagatctgacgcgggagtgtgaacatcctgcgggagatcctggcacccccatacatcatcaccctgcacgacatcttcgagaacaagactggacgtggtcctcatcctggagctggtctctggcggggatgctctttgacttcctggtcggagaagtgatgtctgctgactggatggacgatggccacccagtttcctcaagcatgatcctgggacggctgttcactaccttgcatctctaagccgccatcgcatcactttggacctgaatgccggatcaactatcatgctggctggaccgagaaccgtgcccaaacccacggaactcaagctcactcgaccttccggcactcgcgctcctaaggatcgaggctgtgtgaatcgaggtttcatatgaaacaatcttctggctatccctgggagttcggtggcacccaggagacttgttgaacctactgcagcccgctggtgcttggtcgtgccggtcccatgtgtgatccattggttgtctctcaccctaatattcttgtgacgtacctggccgtcg

SEQ ID NO: 562157 - DNA, 258 bp, Homo sapiens
agaggaactgtagtatttggtattcacataggtctatgacatatgtagcctactcatgctctttgccacccaagctatcttatggagtgtttttttttttaacccaatcatatagtggttagttatttacacatttatggcactattgcacacagcttattttgcaggtaggttatccatgtagatcaaaatgtttgtagctcagttggtatttatttatttatttacctttctccatacgctaccacaggagtcgac

SEQ ID NO: 562158 - DNA, 596 bp, Homo sapiens
ccatcaatctatatatttttccttcatcagtattgtgttgtcttaattaccgatactttgcagtaaggtttggagcatgggggtgtgaattatcctaacatgttttcttttcttaagattattttggctattttgagtcccttacaattccatgtgtattttagaatcagcttgtcagtttctagacagaagtctgttgggatacttgcagggatttcatcaaatctgtagttcaaattgtaaagtactacaatattaaatagtccaattcatgggtgtaaggtgtttgctaattatttaaatattctttaaacaataatttttaattttcagaggaaaatcttgtatcacattttccaaattaattattatttctttttttgatgctattttaaattgaagtgttttcttaaattcattttggggttttcattgcagatgtgtgaaattgatttttgtacatttaccttgtttgctgtaatattgctgaaataatttacgagttctatcgttcggtggattccttaaaattttctatatacaagaatgttattttcaaataaagttttatttcttcctgttcagtaaaaaaaaaa

SEQ ID NO: 562159 - DNA, 107 bp, Homo sapiens
  misc_feature (35)..(35): n is a, c, g, or t
  misc_feature (49)..(49): n is a, c, g, or t
  misc_feature (91)..(91): n is a, c, g, or t
gctgaggacacatgcgcttttgtagaatttaacanctggtgtttttctngaaaaatatatatacatatattgctttatttgaaacaaattnaaatatgctgcatttg

SEQ ID NO: 562160 - DNA, 101 bp, Homo sapiens
ccccgatagcccgacaggtcccggactcggacgcgtggtagcctaaagtcctggggagcttctgtccacctgtcctgcacgaggagtcgtttccaggcccg

SEQ ID NO: 562161 - DNA, 523 bp, Homo sapiens
cctgtggaattgaagaaagcaccttgaggaagagaggcaggtgccggcgcaggcaggcctgtggctgtggtttgcagccatggcagcgttctcatttaccacctaagcagggttggaggttgcaggaggtctgcaggcgaggtgggtggcatgggggccaggagcgctggagatcatctttctgggctgccctgggcttcccgcggggcccaggttgctctgtcaccattctatatacctcagtcacctgccgcccggctgctcagcaggggtgtttgtgaggccctgggggtgccccggaaggggcaccccaccgcccctgttgggaaccagagcagaatctgtgggcttgtcgcctgccagtagtataagcaacactttctgttcaccaccattgtcccttgcattacttctttcttacagcatatttttaacataaagctgttagactttatatatttctaataggtcagacattgcctatttttcatacatctggtgctgcctttttgtaaaactaata

SEQ ID NO: 562162 - DNA, 428 bp, Homo sapiens
ccaaggcaggttaaccatccaagggaggttaccggctctcctttctcacacagggtggacccaggtctcccccatcccccaggccagccagcattttgataacattgcatttcacacttcccagcagtcctcaagtaaccacacaggggtttgggtgtccccagcttgtcttgcctacttaagggaaagggcctcatgttggtgagagtctagcagggtcagacgtctcacgcacccagtttcactcactccttaaccaaaccctgcagagatattactgtccccatttcacagatggggagactaaagatccaggagggtgaatcagaatttgaactcaggtgtttctgatccatggaccaacgttctttcctctcctcaaggcagcctcaactccctcttgatttctgaattcctaaagaaaaaaa

SEQ ID NO: 562163 - DNA, 365 bp, Homo sapiens
aacaataccccaagagcagacaggatatttgtaaaacatgagaatttaaacaaattaaagcaagcttagagaaaacccacaggaggtaggagggacaccagcttgtcttgcctacttaagggaaagggcctcatgttggtgagagtctagcagggtcagacgtctcacgcacccagtttcactcactccttaaccaaaccctgcagagatattactgtccccatttcacagatggggagactaaagatccaggagggtgaatcagaatttgaactcaggtgtttctgatccatggaccaacgttctttcctctcctcaaggcagcctcaactccctcttgatttctgaattcctaaagaaaaaaa

SEQ ID NO: 562164 - DNA, 550 bp, Homo sapiens
  misc_feature (13)..(13): n is a, c, g, or t
  misc_feature (16)..(16): n is a, c, g, or t
  misc_feature (32)..(32): n is a, c, g, or t
  misc_feature (40)..(40): n is a, c, g, or t
  misc_feature (43)..(43): n is a, c, g, or t
  misc_feature (54)..(54): n is a, c, g, or t
  misc_feature (56)..(57): n is a, c, g, or t
  misc_feature (84)..(84): n is a, c, g, or t
  misc_feature (98)..(98): n is a, c, g, or t
  misc_feature (107)..(107): n is a, c, g, or t
  misc_feature (146)..(146): n is a, c, g, or t
  misc_feature (185)..(186): n is a, c, g, or t
  misc_feature (223)..(223): n is a, c, g, or t
  misc_feature (247)..(247): n is a, c, g, or t
  misc_feature (252)..(252): n is a, c, g, or t
  misc_feature (266)..(266): n is a, c, g, or t
  misc_feature (268)..(268): n is a, c, g, or t
  misc_feature (282)..(282): n is a, c, g, or t
  misc_feature (290)..(290): n is a, c, g, or t
  misc_feature (294)..(295): n is a, c, g, or t
  misc_feature (327)..(327): n is a, c, g, or t
  misc_feature (344)..(344): n is a, c, g, or t
  misc_feature (384)..(384): n is a, c, g, or t
  misc_feature (388)..(388): n is a, c, g, or t
  misc_feature (391)..(391): n is a, c, g, or t
  misc_feature (426)..(426): n is a, c, g, or t
  misc_feature (463)..(463): n is a, c, g, or t
  misc_feature (465)..(465): n is a, c, g, or t
  misc_feature (481)..(481): n is a, c, g, or t
  misc_feature (487)..(487): n is a, c, g, or t
  misc_feature (530)..(530): n is a, c, g, or t
tctttctgaaaanaanttaattcttttgtcantgccaaanaanacccaagtctnanncaccaaaaaaaaaaaaaacttcttcanttctcccccctganaacccccanctactgaaagggctttaagggcacactgccaatgaaaangcagagtgcatataccatgtccttaacttgtttcaaaannacctattctggcagtatccaattcaggtttcagtgcncccttgtttgaaagtggtcttcanaaaancccacattttaaancnatttggaggagcanaaaaagtnaaannggtaaaagcctttcagaatttgaaaaggtagnacttgtctaaaacaggntcattttttatgtggcaaatgccacaaaaaaggcaaaaanatanaanaccaaaatttacgcaaaatggggaagagaatccanaaacacgacaacaaagctgccctaaccaatgttccananaaagccacccccaaanagaaanaacccattaaacattaccagataggcatgaggtacagaaaaanaatttttctttccagctcca

SEQ ID NO: 562165 - DNA, 310 bp, Homo sapiens
agtcaaacgtttgtgtgggaggcatgtggacaggtgacgttctgccaggccttctaggcgtttacccgacacatcagtgttattgttctaatgcctggagaggaggctctatccagaggaccctgcaccacaggtggcagtggctggtgttactcaaggtccctggtggcggtgtaagctgagtgccgtgtcctcggctaaggtcacctgacagggcttctctgcttgtatcagagactttttttaaaaaaaagtattttttattttgtgaatctagtctaactgtgtcctcccaccacaaacgtgggat

SEQ ID NO: 562166 - DNA, 194 bp, Homo sapiens
agtgcacagatacatcagggtagacttgatctaccctgatgttatctgtgcactggcacaatattatcttgcgtgcctttctagaagatgctgtatgacagggtaagaaatccaaatgttaattgtttgtggccagctgatctgggactagaaccttttgtctgaaagtgccctatgacagtggcctgatatcg

SEQ ID NO: 562167 - DNA, 358 bp, Homo sapiens
aagccgtgaacggtatcctcgggatcaacaggcatcagccccctgtttgctccacatcggcgggcgactcacacgtaatagtcccctatgtccccagagtcgtcttcttcttattcttcctcttcctcacaattagggtcatagtcctcttcatggctgtcagacccctggctcatcatgtccactgacatcttagcatccagccgggttgcagctcaggacagcagctgcattattccccctccccccaaacactcaccgctttctcaaatgcattagtatttatgtcttctaagggcggcaacacacactcagtgtgcctttttccccatgacaagttgtaccagaaaccattcac

SEQ ID NO: 562168 - DNA, 569 bp, Homo sapiens
ctgtcaatcttcagtagcccttaagactttctctagctcctacttaataaccagttcttagaataataacttttaaaaagctacacctgccgcggatttagtaagaagaccatagccttcaaatctccaaatgctccaaagcttattctgagcgtgtggtggctagatgttgataagaggaaaagaaaggaactgtttacttggttgggaatacttatttgggggtaacaacaatgtggacaatggcacaaagttattagaaggaaaattaaaccctctgtctgggcgtggtggctcacgtctgtaagcccaacactttgggaggccgaggtgggcggatcacttgaggccacgagttcgaggccagccttaccaacatggcaaaatcccatccctactaaaaatacaaaaattagccaggtgtggtggtacacatctgtaaccccagctacttgggaggctgaggcaggagatttgcttgaacccagaaggcagagattgcagtgagccgagattccaccactgcactccagcctgggtgacagagcaagactccatctcaaaaaaaa

SEQ ID NO: 562169 - DNA, 277 bp, Homo sapiens
agacattcactgcttatggcatcataactagcaatctctgcttcttcttcacacagctgtcttctctctagtgtagtgtttctgtatagtagatttctaattcctatattttctcttctaaaatttgttatctaccatcaattataaaaatgttaagggtattaataatatgttcaggttatgtatataatatagaagttctgatgtttaaaccttcatacattataggagaggcatcagcaaaatgaattgatatccaatatatccgacattagat

SEQ ID NO: 562170 - DNA, 114 bp, Homo sapiens
gcgcggacctacgtgtccaaatgagctgttcctctttggactaacagattaaatttacaaggggatattagatggtgttctgtgtggcaatatttagacagattgacactaagc

SEQ ID NO: 562171 - DNA, 995 bp, Homo sapiens
ggcagtccggcggttcccgcgggtctgtctcttgcttcaacagtgtctggacggaacagatacggggacgtctctgtccagaactccgaacgccctccgatttcctctccgcttgcaaactccgggaacatcttctcggaccatctcctgcgttctagggacctgccagcagccgtattcggtgagttatgctccttcttggccaaaccaatcgcatgagcatcccaaggatatcgtcaagaattatatccaccgatcgtaggcagagcacgaccgatacaaacaagcactaggctcaactttagtaccatgacagagaccacatacctacaaccctaacacttcttcttacatggcgactatacttatatttcgcatcccgccgaattgcattgattgtacatacctgtgcatagcgacgatgcaggccgagcttacgtatacccgtggccaatctagagccgtaaccgcaggtacaagcttgcgaaaataagggctataacagccaacctcagtattcgtccccctagctactaggcacatggccgagacgaaagacgccaatggcggatagggcacacagacttacccaagtatgacacataccgtttcgtatacacacagtggcagactactttcaaaatagagcaaacagggccacaaagtcaatgagcaacacgtcactttggaaacggtatgagagcatgggatccaatgaggcaccacgtatacgcgagtgcaaacggaggcatcaacaagaactcggcacgatggacaggggcgttttgtgcccccaaactagggaagactcgcccattatggttgggcaagtacaactagcacacaagaccgtgtgcctctatggcaaacaagaccacagagggaggggacaccacacgatacagttgagtactaaggagagaaactttgcacattgtctccaaaataatggtccccaccctaatataggaggctgacattatgatccctattag

SEQ ID NO: 562172 - DNA, 842 bp, Homo sapiens
cagaggtgtgatcttagctgggatgcagcttggaatggatggaccgcacccgtgtctgcatcgtagcgagcatctcgggaggagagagtcctaccctggctgctggtgtctccggtctcagaagtggagatgcagaatgttctgtgaaagacccgtgacatgtattaatatcgatccggtcttagattgtgggatcggaggtgattatctattggagatattgtaaatgggagaagattcgctaggaggatgaagaggaagtgcagttctttcttgtatacatgttagaagggttgagtcgtatggcttgtgtaatagatcctgagacatgatggatgggagactgatgatgatggttagtacaattccagaatgagttcatgttcatgaaatggtgtgctttaggagtaagggggggggtagaatactcggtatcagtgactggtcatgcacatggtcaattatcatggtgatcggtacggaacgttgggattaccgaggatgaacctgcgttttggttatttgtaggggacaacgaatgtggctaagaaagagtggtggggtccatcacctcgctgtaatcggtgggaggagtagctcttgtggtgggaaaaccggctggagaaccgacaggatgcatgctgtcgtggattaaattatagatgatttgaggagatgcatgagaatctgtgtgctgtgaggatggagtacgtgcgattatgaatacacgtaacaggtgaaggaatccttgtattggggcaagtgacatttgggacatcgaggggggaaggccaaggtgatgcagtgggggagttgttacaggcaggatttgagaataaagg

SEQ ID NO: 562173 - DNA, 154 bp, Homo sapiens
aaaaaaaaaaaaagatcatcagccggtcctgcctgagcctaggattcatctttcttttcaccgtaggtggctgactgggcattgtattagcaaactcatcactagtacatcgtactacacgacacgtactacgttgtagctcacttggggatcc

SEQ ID NO: 562174 - DNA, 992 bp, Homo sapiens
  misc_feature (32)..(32): n is a, c, g, or t
  misc_feature (38)..(39): n is a, c, g, or t
  misc_feature (44)..(44): n is a, c, g, or t
  misc_feature (610)..(610): n is a, c, g, or t
  misc_feature (631)..(631): n is a, c, g, or t
  misc_feature (673)..(673): n is a, c, g, or t
  misc_feature (678)..(678): n is a, c, g, or t
  misc_feature (770)..(770): n is a, c, g, or t
  misc_feature (773)..(773): n is a, c, g, or t
  misc_feature (776)..(776): n is a, c, g, or t
  misc_feature (784)..(784): n is a, c, g, or t
  misc_feature (800)..(800): n is a, c, g, or t
gagagttgcagtgacctaaacaggaagatggnctttcnnaactnccagtgatctctgaagccgactctgaggctccctctttgctctaacagacagcagcgactttaggctggataatagtcaaattcttacctcgctctttcactgctagtaagatcagattgcgtttctttcagttactcttcaatcgccagtttcttgatctgcttctaaaagaagaagtagagaagataaatcctgtcttcaatacctggaaggaaaaacaaaataacctcaactccgttttgaaaaaaacattccaagaactttcatcagagattttacttagatgatttacacaatgaagaaagtacatgcactttgggcttctgtatgcctgctgcttaatcttgcccctgcccctcttaatgctgattctgaggaagatgaagaacacacaattatcacagatacggagttgccaccactgaaaccttatgcattcatttggtgcattcaaggcggatgatggcccatgtaaagcaatcatgaaaagattttcttcaatattttcactcgacaagtgcgaagaattatatatgggggatgtgaaggaaatcagaatcgattngaaagtctggaagagtgcaanaaaaatgtgtcaagagataatgcaaacggattataaagacanatggnaaaagaaaagcagattctggttttggaagaagatcctgaatatgtcggaggttaatattaccaggtatttttataaccaatcagacaaaacnggngancgttcaanatgggtgtgccggcantatgaccacttggggcctggcatgccgactggaaaggccgcgtgcaggggtaatatggaccggcagtgggaaacccgttcgaaaacaaggccacttgaattggccatgggcacccgaaaggggtggccgagatttaaactggggcccagggggggaacaccaggggcgctacgcgaaaacgaaggggctcat

SEQ ID NO: 562175 - DNA, 1047 bp, Homo sapiens
ggacgcgtgggtcgacccaagcgtccggttgattcagggaaactcttatgatatctacataccatctcatattcagggcaatatcacgtcctcatgctattgtcatcattgacctaagaacagagtggaatggaaatgctctgtcgtgctatgacggatgagaggaggtgtatagtaaacaccatatggaccggataactaaggatgtggtgctcacaatggggcagaaatgcccacgatctgtgggctacatacattccaatcagataatgggctggggcgagcaaagctatagagatccggtcagtggaaacaggacatatggatggagtattaatgcataagcgagctcaaaggttaaagttactagtgtgaaagaaaatgataaggtatataaagcataccgtgcgatctggaggaagtagccaagatgttaataacatgacacctcaacagaaattccatgatgaactggtaacagaagagcacttggcacttatcttcatggcgttatttctaatttaaacagaacataacgtcatgtggacttatgccagtctagaggcagaaatcagaaggcttggaatgaacatatcgcatttcccatttacctctccctccgaccgtcccagtaacagatcccatctaaacaaatgatgcagacctgggtggagaaggagagaaaacaggtggcaggaactatcaaggaagatcaccaagaaatgatgacacaagacagggaccaacagatggaccaagtgcccaacgaaaatagagaatagagaagaaataatagagtagctcttaaagaataaacatgggtaatagtggaattataaggattataaaactttatgatctttaaacaccttacagtgtgaagaaatggggaaagaatgcattatgtaaagttgaattttagatatgatgtcatatagagtatagaaattgagagatgaaaattaagaatgatacaagtaaaaaaggtacagatatcaaagctacagcttaaacaataggagtactaacaacctgataaatacaaaa

SEQ ID NO: 562176 - DNA, 932 bp, Homo sapiens
  misc_feature (32)..(32): n is a, c, g, or t
  misc_feature (38)..(39): n is a, c, g, or t
  misc_feature (44)..(44): n is a, c, g, or t
gagagttgcagtgacctaaacaggaagatggnctttcnnaactnccagtgatctctgaagccgactctgaggctccctctttgctctaacagacagcagcgactttaggctggataatagtcaaattcttacctcgctctttcactgctagtaagatcagattgcgtttctttcagttactcttcaatcgccagtttcttgatctgcttctaaaagaagaagtagagaagataaatcctgtcttcaatacctggaaggaaaaacaaaataacctcaactccgttttgaaaaaaacattccaagaactttcatcagagattttacttagatgatataacaatagaagaaaagtacagagcaaattatggagaataacatagaaatgacactgatgaattaaaatcttgaacatgaacaataattaatagatgataacatgaggaaaggatgaaagaaaaaaacaataaatacaaagataacggagatagacaaaaaaatgaaaaactatatgcatacaaataagatgcaataaaaggcggatgaagggcaaatgataaagcaatcaatgaaaaaagaataaaaatatcaaataataaaaaaatacgaaaaatgaagaaaaaaataaaaaatatgaggaagatgatagaaggaaattaagaatagaaaaagaaccgactaggaaaaaagaagaaaaaaaaaaatgagaaaacagacagctaccatgcaacaacaagggataaataaagaaaaaaaatagaaaaaaaagaacaaagcacagatatccagaaaaaacgaacagaaagacagggacaaaaaagaaggaaaaatacaaaagaaaataaaaacacaaaacaagacaaacaaaaggaaaaaggaaaaaagaacaagacgaagcacaggaaaaaagaaacgaaaaagagaaaaggaaaatg

SEQ ID NO: 562177 - DNA, 578 bp, Homo sapiens
  misc_feature (32)..(32): n is a, c, g, or t
  misc_feature (38)..(39): n is a, c, g, or t
  misc_feature (44)..(44): n is a, c, g, or t
  misc_feature (336)..(336): n is a, c, g, or t
  misc_feature (394)..(394): n is a, c, g, or t
gagagttgcagtgacctaaacaggaagatggnctttcnnaactnccagtgatctctgaagccgactctgaggctccctctttgctctaacagacagcagcgactttaggctggataatagtcaaattcttacctcgctctttcactgctagtaagatcagattgcgtttctttcagttactcttcaatcgccagtttcttgatctgcttctaaaagaagaagtagagaagataaatcctgtcttcaatacctggaaggaaaaacaaaataacctcaactccgttttgaaaaaaacattccaagaactttcatcagagattttacttgtgagtaccnggcaatatactgtctagccctaagaaataacttaattctttttctcgggggaaagcanggtgcgagaggcaaagaactgataggggaggatcactgtttatttgcgtaaaatgaaaatcagcccttccctgtaaacagagtaaactcaaactgcaatccaaacttgagttctcagcattttgcatttagttcttaagcaaatttatgtgcaatttttatgattttaaaccataaacattttt

SEQ ID NO: 562178 - DNA, 1471 bp, Homo sapiens
cggcggcacactggcggcttgcggcgtctaagctgcttctccggctggcacttcccacgggcacctgctcggcagcgctgctggcactcctgctctgcctacccctggctctggcgcacagcactgcttcctaccacctactcctccactagcaggcacgcacacactccctgcgtgccacccgccgccctacctctccgcgcccccaacaccccttgccctcaaaacacgcgcctgcacacgccaagcaaagcctccttcacccgcacgcgctgcgcacgcgcgcgccaccctgccccccacgcgcgcacacgctcactgcgccctctctgctacacctctgccctcgttcaacacaacccgacttcgcaccacatcttactctgcgcttgccttgcgcctgcctgcacctcccacgccccacggccacgcacggccctctctgctccccttctcttacctccccacgcctctacaagcctacccacaacggccccacttctggctctctctcacatgtgcccccactctcttacacacgggcgcgcagacactccggctgcgccactgcccctgcatcagcctccacccttcacgcgcctccaacccacagcgccttgcccaccttcctcttccaccagcaaacaactctggggaccacaatggcttactgtgccttctccactcctcatccgcaaccacttctccccacttcccccctctccacgcaggattgcgcagcctctctcgcacctccccctcaacaccctccccacacccccgacccccactggcttctaccccaacggcaaccaactggcgccacgttggcaccgccgcacactcatctcctggctgcaaacattccacgacgcacgccccaccaccaacctcgcaacccactccccggcccctctacaccacgcactcccgcctgccgcccggcaacctccccgcctgccccagccgcacccacaacccacacgcttgcacccaactcatctacggccccctaaccctggcccccttccccccctgcgcacctgtgccccgccgcgcaccctctcacccctgttggcgggcccgccccttctggcttcacccccccttggacccgcccccttggcgcctgcgcgccccttccagttatccccccttttggcgccttccatcttacctcccctaagcgcgcaaacgccgcgctgagaaccctgggctcccacaccagccactctcactcgcactaggatctagcgcgccccccaccgcacaaaggggtctctccacacctcccccagcgcccccgtcggcaccgcgcccagcgcacaccaagccgcggcagcaccccgccgccaacaccgcgccaacaccacacatctccccccacacacaccggcgcctcacccgcgccacccggacacacccctcgcgcaccccccttctcacactcacactccgccgcccccctcag

SEQ ID NO: 562179 - DNA, 512 bp, Homo sapiens
  misc_feature (32)..(32): n is a, c, g, or t
  misc_feature (38)..(39): n is a, c, g, or t
  misc_feature (44)..(44): n is a, c, g, or t
  misc_feature (380)..(380): n is a, c, g, or t
  misc_feature (382)..(382): n is a, c, g, or t
  misc_feature (399)..(400): n is a, c, g, or t
  misc_feature (417)..(417): n is a, c, g, or t
  misc_feature (428)..(428): n is a, c, g, or t
  misc_feature (439)..(440): n is a, c, g, or t
  misc_feature (451)..(451): n is a, c, g, or t
  misc_feature (505)..(505): n is a, c, g, or t
gagagttgcagtgacctaaacaggaagatggnctttcnnaactnccagtgatctctgaagccgactctgaggctccctctttgctctaacagacagcagcgactttaggctggataatagtcaaattcttacctcgctctttcactgctagtaagatcagattgcgtttctttcagttactcttcaatcgccagtttcttgatctgcttctaaaagaagaagtagagaagataaatcctgtcttcaatacctggaaggaaaaacaaaataacctcaactccgttttgaaaaaaacattccaagaactttcatcagagattttacttgacaggaaaggccatgtgaggacataggggagaaagcagccaccattggcaagncnagagagagccctcaccnnggaacgattgggaccangcaccttgatncttggattttnntaggcctccangaactaggatggttttaccacaatgaaggaaagttacatggcatttggggcttntgtattg

SEQ ID NO: 562180 - DNA, 386 bp, Homo sapiens
  misc_feature (32)..(32): n is a, c, g, or t
  misc_feature (38)..(39): n is a, c, g, or t
  misc_feature (44)..(44): n is a, c, g, or t
  misc_feature (385)..(386): n is a, c, g, or t
gagagttgcagtgacctaaacaggaagatggnctttcnnaactnccagtgatctctgaagccgactctgaggctccctctttgctctaacagacagcagcgactttaggctggataatagtcaaattcttacctcgctctttcactgctagtaagatcagattgcgtttctttcagttactcttcaatcgccagtttcttgatctgcttctaaaagaagaagtagagaagataaatcctgtcttcaatacctggaaggaaaaacaaaataacctcaactccgttttgaaaaaaacattccaagaactttcatcagagattttacttgatctccctctgtcacccactgcactcgagcccgggtgacagagcgagactctgtctcnn

SEQ ID NO: 562181 - DNA, 553 bp, Homo sapiens
tcatgatggtcatgggctgttggcgcctctgaggtctgactgagtcgatccgctggtgcccgtcctacccttccaaagccgtctctaccctagttgtgctccaaacagaagcaaagccaaggctgagccgtggctggtctccctacagacgtcctgtagatgtgcaattttgcttaggcttgtcgcacacaaggtacagaccctaggaattttcccatctgcttctgtggcaacaaaaatgccaagtaagctccagccttggagctgtaccaccagcgagtgaagcgcggctcccagaacgcggctccagacgcaccccaggtgcttttctttctttctttgttttttgagactggctttcgctcttgttgcccaggctggagggcaatggcgtgcaatctcggctcaccgccgcaagctctgcctcccgggttcaagaaattctcctgtctcaggctcttcagtagctgggattacaggtgcccgacaccacgcccgggtcatttttgtacctttagtagagatggggtttaccggtgttaggcaggatggt

SEQ ID NO: 562182 - DNA, 1107 bp, Homo sapiens
  misc_feature (32)..(32): n is a, c, g, or t
  misc_feature (38)..(39): n is a, c, g, or t
  misc_feature (44)..(44): n is a, c, g, or t
  misc_feature (725)..(725): n is a, c, g, or t
  misc_feature (746)..(746): n is a, c, g, or t
  misc_feature (788)..(788): n is a, c, g, or t
  misc_feature (793)..(793): n is a, c, g, or t
  misc_feature (885)..(885): n is a, c, g, or t
  misc_feature (888)..(888): n is a, c, g, or t
  misc_feature (891)..(891): n is a, c, g, or t
  misc_feature (899)..(899): n is a, c, g, or t
  misc_feature (915)..(915): n is a, c, g, or t
gagagttgcagtgacctaaacaggaagatggnctttcnnaactnccagtgatctctgaagccgactctgaggctccctctttgctctaacagacagcagcgactttaggctggataatagtcaaattcttacctcgctctttcactgctagtaagatcagattgcgtttctttcagttactcttcaatcgccagtttcttgatctgcttctaaaagaagaagtagagaagataaatcctgtcttcaatacctggaaggaaaaacaaaataacctcaactccgttttgaaaaaaacattccaagaactttcatcagagattttactttacagtacgggtggctggcaagatggccgcactaggcaagagctccagtctacagctcccgcacgagatcaacgcagaaggaacagcagtctcagccggttagcacgcaccaagcagatgatttacacaatgaagaaagtacatgcactttgggcttctgtatgcctgctgcttaatcttgcccctgcccctcttaatgctgattctgaggaagatgaagaacacacaattatcacagatacggagttgccaccactgaaaccttatgcattcatttggtgcattcaaggcggatgatggcccatgtaaagcaatcatgaaaagattttcttcaatattttcactcgacaagtgcgaagaattatatatgggggatgtgaaggaaatcagaatcgattngaaagtctggaagagtgcaanaaaaatgtgtcaagagataatgcaaacggattataaagacanatggnaaaagaaaagcagattctggttttggaagaagatcctgaatatgtcggaggttaatattaccaggtatttttataaccaatcagacaaaacnggngancgttcaanatgggtgtgccggcantatgaccacttggggcctggcatgccgactggaaaggccgcgtgcaggggtaatatggaccggcagtgggaaacccgttcgaaaacaaggccacttgaattggccatgggcacccgaaaggggtggccgagatttaaactggggcccagggggggaacaccaggggcgctacgcgaaaacgaaggggctcat

SEQ ID NO: 562183 - DNA, 841 bp, Homo sapiens
ggagtagctccagaatggtcgttcctgaaaaggaagcactcggaatccttccgaacttgccaagtccatccatgattcagagatactgcgcttctctcgttctctgggatttatagtgtctctgatagtgaatcgtccgatgtatttgctagtttgcttcttttcgtctttcaatgacttgatcatctgatatgctgtctggagaaaaatcagaacttttgtccagcacagggaggtttcagaaagtgattttggattttctgtaagatgtttgaatttagttctaggggacaggcatctctcatcccggagtaaatttctgcctttgacctgcatggattattctgtcaggctgcggaatttctcgtgcacctacctgtagtatggggcactctggttttggtctgcagagtaagaaggtggagagaatgagctgtacttgggttaagcagttgaaaccttttcttcgagcaggatctgtaaaagcataattgaatgttgtttcacccccgtggatccagtgggcccgacagcgcaacaggtgtgcagatttctttttgaaacttcctttgtgtcccccgctccctctggcctcagctaaagaaaatgaatcctataaccaggttcatgttcacttgcttggccttttcagcactgattcctgaagaccttactatagtctttaaacctgagcctggaacccaaagggctttgtggggaagtgtcttaaattcacttaggggtgccctttaaaatctttcggtttgtacagcccaatttctatggcataaaatgacagatattctccaatattggtttacggcttccaaaccggaaaccc

SEQ ID NO: 562184 - DNA, 100 bp, Homo sapiens
gatggataacacatgtacaggaagaacacacagactccaagagcttccctccaaatatatgatgaagttcctgtaaatcactagattcacctacagcctg

SEQ ID NO: 562185 - DNA, 623 bp, Homo sapiens
gcagtgcctctttgctgtatcagcttgagagatgacgttgtcggccttacgctttagttgagtgagcagattttggtatatggactgagatggggggctagttttttcacgtgaccgccgaactcggccgtattgtcagtcggggctccccctcggcctacctctgtgtactcacgccagtgcaaggggcgactagtttccctacgcccctattgcctgtagaccaccccagcgccctactccttgagtgaggtagtgtcgctccgctaagctccctggattattggtctcaattgttgccccgaggggtcctatggttgtggcacgacggatacgctatgaccgcatgggacttactggaactccggcttgccttgctagaggggccatcgcttgactcggcagcctttctagtgggccagcgaggggttatttccatcggctacgaaacatggagactcccacgcctcgccatagatacgtgtgcacaataagagcaatatctcacgggtggagacaatgcagacagacgcccccaccgccgcctcgtgatcgcgctgtgcccccccccctccccgcctacctcccgtttcccccttgccatttaaaaacgccaaacatgc

SEQ ID NO: 562186 - DNA, 157 bp, Homo sapiens
  misc_feature (6)..(6): n is a, c, g, or t
cccttnggtactcctccctggtggttggtgtaaatgagtgaggcaggagtccgaggaggttagttgtggcaataaaaatgataaccatacacaacactaaaggacgaacctgatctcttatactagtatccttaatcatttacaccaaccaccagag

SEQ ID NO: 562187 - DNA, 234 bp, Homo sapiens
gacctccttcacagcatatgagaactccagttcttctgcattcttgcacactttatttaaactttttaaatgtagctgttttcatggatgtcttataatatctcataaggataaaatttgcatttcactaatgaataatgaataatgtcgaacatctttttaaccatctgtctagcttcttgggtgaagtgtgtgtggctggagagagggagagggagggaggctggtggaagg

SEQ ID NO: 562188 - DNA, 316 bp, Homo sapiens
cccgtgaccggacacgagttttgctttcaatttacttttggcattaggggtattaaagcggatggggtcttaattttatgccctcaaatgtattgattttgttttgtggtttctacctttctttaatctttagaaagtcctctcaatcttcatattgtcttccacctttatggttaaggctgtataatcaatctttgattcatcaacaatatgtgtatgtttatgacgtcaaattaagatatgattccgctacccgatcgctatcacactaggcctaccaagttaccgctcacgggtcccgggctggaatgcctaa

SEQ ID NO: 562189 - DNA, 125 bp, Homo sapiens
gcagcgcggaggccgcacgatgactcggagttactgtaaaagacgtgaaccagcaggaggttcgtcaaggactcttggcaggccttcctcaaaaaggtcacggaagctgaaaggtccaaccatgg

SEQ ID NO: 562190 - DNA, 766 bp, Homo sapiens
  misc_feature (351)..(351): n is a, c, g, or t
tttacaaaagaaattaaaaaaaaaaattagccggatgtgttggtacacacttgtaggcccagctactcaggggtctaaggtgggaagatcacttgagcccaggaggttgaggctgcagtgagcatgattatgccactgcactccagcctgggtgatagagcgagatcctgtctccaaaaataataaaaataaaatagatactgtctacatattttaatcatttcccacttaaggcatgtggtgaggaaataggagaaagaggatgtccctttggctgtgctaatttggccttatctagactgccaccctgggccagtgcaggctactctagacactactgactcatatttncctcctcttttgtaccctcttctttctttctctaactattccttttactagttatgaaggcttatcttttcttaaattatctttactaaaaagtccaaaatgttgcactgatggagagattttatcaaggttaggttacagttggagtttgtgctggaagagttagaaacaatttctaatatacagtaatacaagatcaaaccctatgccacattctcttactattaattctgtgctaagaaacaatagaccttttctgttcatcaagtttatattttggcagcttgagcgatctatatacatacttaaaccttcaaaatattatgcctgataatacagtattctttgcctataagcaacagtaatgaactattggtaactaaagggaagaaaaaaggaaagaaaaaagagagga

SEQ ID NO: 562191 - DNA, 705 bp, Homo sapiens
  misc_feature (603)..(603): n is a, c, g, or t
gagcagacgatgtacgaggcggggacttcggtgtgatacctgtcctgtgcgccagtgctctagaagcagagttctatattctccgtgtggctactctccataccgtatatgtgcgttgctcgacgatgtctgatggaaggcattcgccgggacatggaggatgaaacgcccatgagagtgccacaaactatctattggcgcgatctgtggaacctagaaaggaccgactcaagggatccactcgagattactacgtgtgcactagatcgatgaataatgacgcaaccgagctatactcctcttgagaggaagcgggactagccattggagtgggctggtatgtctgagaggaaactgccgcaaggcaacattatgtccacatgcagccaggcaacattgatcttatgacagagccatcacaaattcaagggtaagaacttgggcaagatttagataaagtgtattgtcacaagacaagctgagttaaccgatttgaattcactttggacaaattaggccattcattccaagttgagtacataacaaggacaggtgatctcgtgtgacctatggcccattgatggctatacatataacggttgngacattgacgattttcacagtacgcattcgatgacattacaagattcgatagcagtttcagcatgacacctggacataatgatggtatggatcgtagaacct

SEQ ID NO: 562192 - DNA, 927 bp, Homo sapiens
  misc_feature (1)..(1): n is a, c, g, or t
ngtttgcggccctctcgccgcattttcttgggcccctcacgatggtgcccccccggatcaaaggttccgccccctcctttggtgtgcccgccctctctgctcggaagaggcactcctcccttccggtttgcggcctcgtccagttctggctgtccccgaatgctggctgtgccccggagccccggtttggggaaccccccagttgtgccagacgtgtcactctcccttctcgcgccgatgggtccccgttggtgtaggtcctggtgcataagcgtacacgtcccatcagtctcatcgtttgccagcgtccccgcgcccatttttgttccgcccggcgcgtctgtattataaggtgcatccttcattgcccccagcctccggttgtccgccatcgcaccccagacagtttgcagaaccaccagccagtgagactggtgcttgtcctaccgtgtacccccgcatatcaataaggtggaacttttcgcgagcaaaacatgtcatagtaaaggagtggtggccccaaaataaataaattgtggtggcaaattcttataggggcaattattccgtggttctctcaacaccttacgaggcgcttcattatgccacccaggtctcacgtcaggcgggtataatcattgagtgccagctctttaagacaaatgttgcgcacccctccatcacgaggtcttgatgtacccaaagcggtggctcctccctacgccagtttgtatcacattgctaattagtacccaccaatacgggcagggacagttatcgaatgattaatactatgagagaggagcttatgagcgtcctgagtcggcgagccccctgagacataacggtccgtgtctaagaatagggcgggctgccacaacaggaacaaaagtaaattctttaagcacccctcgaaccacaaagaca

SEQ ID NO: 562193 - DNA, 83 bp, Homo sapiens
cccaaaattgcctttaaaaaaaacccgggggggttgaaagcctttgaaccgtgcaggggatgcctggggcccgggccctttgt

SEQ ID NO: 562194 - DNA, 81 bp, Homo sapiens
gccgcggacacggccgtgtattactgtgcgacagtaccctaccgtggtgacccgagaggctttgactactggggccaggga

SEQ ID NO: 562195 - DNA, 241 bp, Homo sapiens
ttgtagagacaggtttcatcatgttgcccaagttggtctcaaactccgtcagctcaagccatctgcctgccttggcctcccaaattgccaggattacagatgtgagccaacatgcctagcctgattgagctctaattcttcagatatgaataaacaactatggtcaaataatgcagtgcctcttcatcttcctccccaagcagtgcagacacttgtggattgttgggcacacattatggag

SEQ ID NO: 562196 - DNA, 344 bp, Homo sapiens
  misc_feature (238)..(238): n is a, c, g, or t
  misc_feature (261)..(261): n is a, c, g, or t
  misc_feature (271)..(271): n is a, c, g, or t
  misc_feature (330)..(330): n is a, c, g, or t
atcctgccggaaaggtagctgtactgagagaagctgggtttggggtactcaacgaacctgctgtttctacattttttttttgaacctaaaattccttcaaaacagttaaaacaaaagacagttatgctaccctcagcttgaatgccttacatgtgtgtaggatatagataaattttctctctctatagttcttagccgtgtaaatttgttaatgtacaagtgagttctggagatcctnctccaagagaaccaggtgtatcnagtatgttcnagctccccgtgttcctttgttcttcaattttaaaggtttaaattcctaagttctttatnttactccttgcctc

SEQ ID NO: 562197 - DNA, 500 bp, Homo sapiens
acgcagtgatacagactcatttccatggtttggtagagcttcaacttttggtctaaggccaccacattcttcaatcataatactaagttactcagttccacctagtctctcagcagcctgaactatatttgatatggcatccaggataagcagaataatcttggcatcttatgcagtgaagaggtcatcaacggttctattatgccacagtgaacaagggtacacaatctgttcaagtgttccaccactggtatagtagggcacggcccacacagcttcctttggtgtcttaaattctgccttagagagaacgctgccgcaggaatgggactaatccatgatacacaacttgctgtatctggtcctggcgtccggctgtgatgtctgacattggtccacgtagcttccttctgaatgtaagtttaggggtgggtgagcaggccgggaaagacggcgagtgctcctggaatcaatcacaacctgagtcgggattaactgct

SEQ ID NO: 562198 - DNA, 1153 bp, Homo sapiens
tgcgcgcgcgcgatcgcgctcggatcacggacgatgccgccatcactgtcgcccgcccaggtcgcccctcagccgcttcccctcgccatggaggcgaggccgccgcagcagccgcaggggctcggagccgcgaggccagggcaggcggcccttgagggcataggaggaggacacgaacacgccggcacggaggaggcacgaaggcggaagccagatagacctacgtccccaaggtgggatcccgccccaaaaggcccgacgtctcgctgacacacaagatagcgaaaaacgagacacagggtactgagatgggacattgccaactaggacccgcgagaaaagggagaatgcactgccaggtccaacaggtaacacctaagcgcactcagcgacaagttggaatctccgtggcgatcacagatacacccaggatcgcacataggcaggcgggaggagaggggagagacaacggaatcaaatgggtgtacaacggtaggcccaaacgaaaatgggcatagccaaagaaggggttcaggcaccccatgtgctgcggaacgcgaaaagtcacacaacggaatacaacggacagacgcaaccaattcaaagacggcgacgagaaaaaaacacagatacacaacggcaacacggacggggcccaaacaagagactgatgcgaaagacgtgccgcaggaccgtgacgtaacacagacagacagcgatggcgtccataaacacgacgaagggaaaccaccaaggaacagtcgcacgacacgacagaaagtaataccgcggaccaggggagacagcccgagcttaaacatataagccgacggggccaccaagatgacgtccaggaccgtcctgagccaacgtagggggacacccagcaagagcagcactgaacagagacacccaagagtggtgatgaggggccaatgcagcagcgcgccaccaccacaaagtggggaaacaggatggagacttgccaccggaagtagaggcaaggctgaaagaagaaagaacagggaaacaccagccaccgcgggtgaaaaggagcacaatacccaggacagcacgaaggagaacggtccgagtcccagagaaacaagtgggaccctctgatagaccgaatgacggcagccgccacagcata

SEQ ID NO: 562199 - DNA, 281 bp, Homo sapiens
atttgctgagtaataaatcttagtattactgatgataatgtttccaggcattatatgcttcttattatggtacaaaataaggtatacaacaccacctagttagactattcttgccaaaaatatttaatttgagtccagtcaagcctttaggtcttatttttagtttataagaaaattacagaacaaattagaaaattcctgtgttaggtattgactattattttggataacaaagtgtagatcattgcacacgctttgcagttgttatcgttttgccctct

SEQ ID NO: 562200 - DNA, 1733 bp, Homo sapiens
  misc_feature (1)..(1): n is a, c, g, or t
  misc_feature (1032)..(1032): n is a, c, g, or t
nactgtgttattgagtgtttactacctcactctacctctccgtcaggtccgttttgttgtcgtggtctctatgttttctcctgctgaatgtgttgtgctcctacatctatgtagtggttttcctctcactcattggttgttgctctttttgtgatctctctgcttttttgagtgggtcttgcgtccccctgattgggcgtcgcaatgtctgccgtcagcttgctcctgatttttgtgcctcactatgcacccttttggggcccctacctctacctcgcgtggttgcgcctcggggggtgcgagacaccccaactgccccgagggtgttgttcctcctccccgcagaactgtggtggggtgtgttcccccaccagggggtggctactgcgctcacaatggtttttgttttttttttcttgcggcgcgctgttcttttctttctagtagttgacttatgggggccacaccccgggggttgtgtgtctctctccactatgggcggttatgcccctctggtggtgaccgggggttcatacacccaccacctgtccaggcgcccgtttgtccaccaagatgggctttgtgggaacttcgtcccggagaggggcgttgtcccccggagcgcgggctttcctaggagcttttttttctcagaggccgccacccctcgtgcgcgcctttacaccactggcgttctacacaatggggcccccaaggcccctcaatcttgtggcaaaacagttttggcgccacaccaattatgttgggggaaccccactagtatcctccccctcccgctcacatattgtggatcctcgcgcacctatcttcgggccacaaaatgggccccaccactcctgcgcacacaagagtgcggcgccctcgtagccgtggagcgtccctactagagtagtctcttgatattgtgaggacctcacagccgtttggggagagcccaacctgtgtggagggcttgtgggcgccacacacgcgcacgagctgtctctactttctcatgagcggtgctcaccntactactatcgtagagagcctctttggtgtgtctcctcccacagcgctccctcttctcatctccgccgcgctgcaggtggtgtctctacttttctcatcctcacagcactcgtcctcacatctctctcagcactcttctctcgcagcaccacgacacacactctccctctgtgtttctgtggccacacacacgctgtgggggagacccccccagacactcacactcgctcccgagtgctcgttgagagccacccgcgcgcgcccgcgtgtgttgtggggcccagcactctttttggtgagacacgcgctcgcctcacgcgagaactcggtggtcgcgaggttgggcccacgagacctctctcgcagccgggtccacacccaccacccacggccccgctgggccctctcccagccgcgttcttcggcaccttccccttcaccaccctctccccagatgtaagctctcatggaactttcctctttggacccaccgccacgctgccacttgagtgccctctgggagtggccctcggttcctcgggggaactccacggtggcctcccctcgatttcctcgtggggaacccccggtttccgggcccgggcctccttggaataaatggttattgttactaggtcccccccttccctctttttctggaaacccaaatccagcctcccccattaagtcctccctgcccc

SEQ ID NO: 562201 - DNA, 279 bp, Homo sapiens
  misc_feature (23)..(23): n is a, c, g, or t
  misc_feature (31)..(31): n is a, c, g, or t
  misc_feature (166)..(166): n is a, c, g, or t
cggtcggcaagaataggtatgtnactggtantataaaaatgcgattttatcataatgatttttatccaaatcatgtcaagggtgatggatcattctatataatctaaggatatttaagtggcagctggagatggttggaggcaagatgggaaagtaactgctgaangtggcaaagatgaatgttaccaaatcaaaggtgataaccttgagcaagaaaacttgaaaactcagggacaggaacagtaagagctaagttaacaagtcagggcacaaggggta

SEQ ID NO: 562202 - DNA, 512 bp, Homo sapiens
gtactctaagatccggctcagtgatctcactgtacgcttgggctcagtgatctctggctcagtgatctctagctcagtgatctcagcttgtatgtctgggctcagtgatcctttgggctcagtgatctctgggtcaagtgatctctgggtcagtgatctctaagagacgcctggtgggtgctcaaccacatggggcgacccaaaagacgcccaaaacaagagctgctcaggaggcactaaatgttgacggtcttggccggctttcacatcctcaatttcagcagacagccagcggtaagtgcaatgacggccgcagcacctcaaatggcctttgagttccagtgtttgtttgcctgaataccaagggtctttctaagcccaggcaggtgaggcaatttcatgtctgtgatgtgcatccgctccactttatcccttgtgatccagggctcaaatgggcttatttcaaagactcttgctacccatcgataggcaaaaagcggcaaggggaatgg

SEQ ID NO: 562203 - DNA, 404 bp, Homo sapiens
ggggggggttccccccggggcccgggaattttaggggcccccctgtttccgccccggaatgggggtttttttttcccccccttttttggcccgggggggtttttttttttccccccccccaaaaaccggggaaagaattgcccccccttgccccggttcccccccttttaacccaggggaaaacggggggggggggggttcccaaacccaggggccgttttttggtttcccttttgcccccaggggggtttttttttttttttttttttcccgggttgggggggcctttcccggggccggtttggcccctggggtggttttttttccccccccttttttgtttttttccggtttccccttttcccgggggtttccgggccaaaaaaaaaaatttttttttttta

SEQ ID NO: 562204 - DNA, 218 bp, Homo sapiens
cttgaagttgacccagtccagacacctattactcccagcgctggcagagctgacacacaggattcagtggggctgacatcgccaacatctagcaatgaggctgcgttgcacgcggcgcgggaagggacacacttccgtagcacactactcaactatcgacgtacgccgttggagccgcgtcctcgacaggtgcactgccagcaaaaagagcaaagatc

SEQ ID NO: 562205 - DNA, 341 bp, Homo sapiens
cacgaggccaacgcccatttctacaacatccctgccagctcttctgccggacctggggctacgctggagcccatggatcggaaagcagctcgaaggcacaatgacagttgtccttagccatctgcacccccctgggctgaaataaacgcacgcacctcccatcctaatcatccaatgctcaagaaacaacttctacttctgaccttgccaacggagagcgcctgcccctcccagaacacactccatcagcttaggggctgctgacctccacagctacccctctcccctcctgcccacgtgtaaaacaaagccaaaagctgagcaccaatggatgaatggag

SEQ ID NO: 562206 - DNA, 156 bp, Homo sapiens
ctgaacgtcaccaatcaactcacaatgagaaattaccggccaggcgtgtgactcacgtctgtaatccccggactttgggagggcaaggcaagagcttgagcttgagcctagacgtttgagaccagcttggtcaacacagcaagaacctgtttcttt

SEQ ID NO: 562207 - DNA, 360 bp, Homo sapiens
  misc_feature (11)..(11): n is a, c, g, or t
atgggatatgnagggcctgacctataataaatttccctaaagttgtagggatacacaatcgacatacaaaaatcattgctatttctaaacactaacaatgaattgtctgaaagggaaatttaaaaaacagtatcaaataaactactttggaactaactaaccaaacaagtgaaagacttaaacactacaaattataaaagattgatgacagaaatttaagccaaagtaaattgaaagacaacccatggattgaaagagtactgtattattaaagtgtccatattactcaaagcaatctacacatttaatataatccatatcaaaatcccaatggtatctctcacagaaatagaaaaaaaa

SEQ ID NO: 562208 - DNA, 258 bp, Homo sapiens
gcatagaactaccatgtaatccaacatcccactcctgggcatctacccagagaaaaacatgactcgcaagacacatgtactccgatgttcattgcagcactatttacaatagcccagacatggcaacaacctaaatgtccattgacagaggagtggcttcagaagtggtacatatacacaatggaatattactcagccattaaaaagaacgaaataccagcattctttgcaatgtggatgaacccgtcggctaattta

SEQ ID NO: 562209 - DNA, 231 bp, Homo sapiens
  misc_feature (170)..(170): n is a, c, g, or t
  misc_feature (180)..(180): n is a, c, g, or t
  misc_feature (190)..(190): n is a, c, g, or t
  misc_feature (195)..(195): n is a, c, g, or t
  misc_feature (200)..(200): n is a, c, g, or t
  misc_feature (204)..(204): n is a, c, g, or t
cagtcatgagcttcttgctgttgttgcggccgtgcatcatcatggagttagtgaggcgctccacaatgggacactgagctttggggcagcgttgggcggcataccggcccttgactgtgagggcaggtacttggcatacttctccttcacagcaatgtaatcctgcaggnaaatgtcatngatctgcacntcatnggtgntccntttcccaaagagctagaggtctggggt

SEQ ID NO: 562210 - DNA, 130 bp, Homo sapiens
gcggaggtgcagcatctcctctcggcatcatggccgccctcagaccccttgtgaggccagagatcgtcaaaagagagaccaagaggttcatccggcaccagtcagaccgtatgtgcaaatagggcgtatc

SEQ ID NO: 562211 - DNA, 159 bp, Homo sapiens
tgcaagtataagcattcttgatacgctgggcccgggggctcaagcttgttaatcactcagcactttgtgtaggccgatgtcgcgagtagtatcacctaattgtcagggaattcgaaatcgggtaccgacgtctcgaattacgtgatctgtcgttcatag

SEQ ID NO: 562212 - DNA, 1135 bp, Homo sapiens
cctgccccctcccagcccggcgactgctctgggcccgtgcgcacctgcacggctgggggagccgctcgccgtgggagcgtcagtgagggcacgctgtctgcggctgaacctgctggaagtggcctggtgatggaaccgggcctcgtggagatggccctgagggcccccgcactgctgccgcgtgctgctgctactactgcctgctcctgcgcctgccggctgcccagcagcctgccgctgctacagcgccacggtggagtgtggctgccctgcggttgcgcgtctgtccctgctgggaatcccgccagggacgcagacactgttcctgcaggacaacaacatcgccctgcctagatgcctgggagccctggcgccactcgccgctctgcgccggctctacctgcacaacaacaagcctgcagcgccctggaggccggcggccttccagcgcgcagccagagccttgctggagctggcgctcactagcaaacggctgcgcggcttgccgcagtggcggcccttcgtaggcctggcccagcttgcgcgttgctctacctaggcgggcaaccaggctggctgcggttgctggatttcaccttcttgcacctgccgcggaacaattgcagggaggcttcaacattgcaaagcacaaacagccattggagcttgcttggacggacccagtgatcataagacggaggcatgtcccatcccttagcaagtggttggaacctacacgcagggaaccaggatggggcaaccaatacagacacggaaaaggacgctggaaagcacccattgagaccaaggtcttgcaaaggttactagcgaccgtcacaaagaagaagccccaaatttggagcggcctttgttgaactattgggcccaccattgagaaaagatagagaataggagagatagcacttaggaaattcaacaaggagaggcgccgagagacaaaagcaggagatggaaacaaaacataccacaaggggaacacagggaaacagcaatcagatgtagtagagaagaaagcacaccgttgacacaatagaagaatccagaaaaatgattacatggagaacataaatacccaataagagagccaacaaatataagcaaaaaaggaaacgct

SEQ ID NO: 562213 - DNA, 822 bp, Homo sapiens
tgttcccaggtgacagcccccttaacctcagtcctctccagtacagtaatgcctttgatgtgtttgcagcctatggaggcctcaatgagaaatcttttgtagatggcttgaattttagcttaaataacatgcagtattctaaccagcaattccagcctgttatggctaactaaaaaaaagaaaatgtatcgtacaagttaaaatgcacgggcccaagggggattttttcttttcacctccttgagaattttctttttataagcttatagtagggatacattcaagctgggttaaaaacaataataactaaaacatgcatcatttttcattggccaaccaagcacaaagtcatttaatactggacggtgatatttcaaaggtatactctcagatatggcctcttacagtatttaagatatagcaaggacatggctgatttttttttataaaattggggcctaataagggggtcatgggcctttcctaatggtataattcaatttagtacaaagttggtcacaatatcagaggatatatatatatggggcctacgacatggtatggcatctatatcttttaactacagtgatctgtgacagcagcagctcacatgtggaatatgttacggaaatgtgtaaaatatccatcttaaagaattcaatatgctaaaactggtgtaccggaatatcttaaagggggggaattaaaggtcgataattgctttttaacaaaagtgttttcggtgaacgtttaagaattgggcataatactgcgagaaaactgtactcgaactattaattggcccatatgtgaatatgaaag

SEQ ID NO: 562214 - DNA, 396 bp, Homo sapiens
gactaataacactgaattcagcttttgtgaatcttatctgcagatatgtacagaccacatcctaagattgacttctgcctcaacagaaatacatgagccagtgccttattggaaatgatttgcgtgttttaagaactggtgtatataggtacatcttgaatgttctgctttccttgccttatgcctgtacttcacctcagccttcaattccattgtgtctccttgctacttggtatcttgaaatctggtacgaaactattgcatgattcctgcacctttggttctggatatattataggtcttttatagtgaatttggacaatttaattccattgaagtaattcaaggtcactatatcgggttagtaaaaactccaatacaactttaaatacgcac

SEQ ID NO: 562215 - DNA, 181 bp, Homo sapiens
ggtttcattgttcaggggacaatcgttcgttcactgctaacagccttcttcgtcagtatcgtgagtgatgcagtggagccgacttgtgtacatactgtaagaccagagaggaattcggtcttccagcagggagatgaagaacaagatcttgctattatggcctctttgaagacgacagccc

SEQ ID NO: 562216 - DNA, 398 bp, Homo sapiens
  misc_feature (33)..(33): n is a, c, g, or t
agatttattcttgttaaggaacggccacaaaanttgcacgtcaatgcaatgcacgtcttcaccatccaattgaaagctgaatttatgttttatgtatacagtaactaagatactgttttaaatggcatacaggtctgctctgactttacacggttattgttctatttagttattaatacttatttccaaaaaaggtcttaggaacgtttgtatgtaaaacattttgttattcaattattttatgatcagttttcatatgtacttaaaatagtaggtacccttttatttaaattattatttgtatgatttctcagaatagttcctgattacactaaagagggtttttagtctctcttactacaagaacccttggtttggtcttgaacataagtcgacgc

SEQ ID NO: 562217 - DNA, 120 bp, Homo sapiens
agctcagcgagaagtgactttgagctcacagtgtcaccgcctgctgatgggagagctgaattcaaaaccagggtgtctccctgagcagagggacctgcacacagagaggggatcctctag

SEQ ID NO: 562218 - DNA, 382 bp, Homo sapiens
  misc_feature (332)..(332): n is a, c, g, or t
  misc_feature (364)..(364): n is a, c, g, or t
aattcgcggccgcgttcgacacggctgcgcagaagacgacagaaggggaacagggagtgtactgatacaaattgtttgtcaggaattgtccttgatttacagaaacaacattggttcgtgattggctatccattgttgagctatgcattattaggttaattgcagctgcttgtggcaatagcaatcagtttcaacagttgaagacatagctcaaaagggagggggagtagaaagtgattgctgtatcgtttaatgtctctctggggcctgataataaagacttgcatccctcagatgttatttctcagtaactagcatgtattaagttaacnggattttgtcgtacaatgtgtatattttgaangagttagattgttttgtc

SEQ ID NO: 562219 - DNA, 125 bp, Homo sapiens
  misc_feature (2)..(2): n is a, c, g, or t
gngaggtggaggttgaagtgagccaagatcatgccattcaaaataaaataaaaataaaacaaaataaaataaaatattagttgggcatggtggcatgaacctgtagttctagcgactcaggaggc

SEQ ID NO: 562220 - DNA, 476 bp, Homo sapiens
atataagtacagactggggtcttgcatatgttagcccaagctgaacttaaactacctggactcaagcaatccttctgcttggcccccaaagtgctgggattgtgggcatgaactagtgtgaccagactccatgtattaatatcaactctcactcctgaattcagttgcttagcccaagataggagtactctgatgcagacattattgggctctattagggtaagaagtatgtgtctttgtctggccacatcttgactaaatatagtctactctgaagacctttactggcttccctctttcatctcctgagtatgtaacttgcacatgggcagctatccagtgacttgtaccagagtaagtgtgtacattaatgtatatttagctctgaagcaagagtgatatactccaggacttagaatagtgcctaaagtgctgcagccaaagacagagcggcactatgaaaagtgggcttgaag

SEQ ID NO: 562221 - DNA, 132 bp, Homo sapiens
tacatccctgatatgcgtctcagatctcatagaacacagaaattttagctggaaaggactttgctatagatcactgggtcgaatatcattctttttggaagaaggtttactcagaccaccaagagcctacat

SEQ ID NO: 562222 - DNA, 875 bp, Homo sapiens
taaaaccccccccccaaaaaagggaaaccaaaaaaaatatcacccccttttaaaaaaggcccattttgggggggggtttctcaaccccaaggggttttggggtttaaggaaaaatatgggggggggataaacacaaaatagggaggaaaatgttgtgccccaaaagaggacgatgaaatccgcggaggaccaccggggggtcatcacaaatattgtgtccccccgataacatcccgcgcaaaatggggtacagggggcaacctcagaaatcctctggaggggctagcgagggaggagttaaaaaaagacccccagacaaggtggatcacagcacggggcatgaaaattatagtgggggtgcaggggggctctctataatacaccaagtagggcgaccccgggggagagtgagaccccccgggacgagcagaactaaccgggagaggttgtgaagcagaggagagacaactgggggggatgcgcgaccacgccccaaacgggagaaagcggaaccaacaactcggagagagccgcccgcgacgagtgggtccgacgccaaaatttattgtgaccccccggggagaaactcctgtaaagaaaaactcttgttcccgcacacaagaggcgcgtgagcgcggagcctcgggaagaataagtggtgcgctccgaaaaacacacgcggacgacggcgtggagaggggagcacaaaatatcccgccgggggaacaaattaccaggagaaggggcgcggcccgagagacaacttaggcgaccgtcgttaaagaagaaaagaggcccccacagggggttttgttggcaaaggaggacaaccccccattttgcgggagggatgtcggcccccaaaatagagggag

SEQ ID NO: 562223 - DNA, 550 bp, Homo sapiens
gggctatattgcatgcgctgagtgtgcggcgtgtatcaagatgacacctgcttcagactaggtttctaaatgagcacatgcagggagcgccccgtgaagtgaacatgtagtatgagcaaaatataaaattaatttataagccactgaaattttcggattgtatgtaatggcagcataacctaaaccatcctgactcatataaaacttggctcctagatatgggttagtgtaataacaacaataagcataacaacaataaaactaaacaatcatttagagggcgataactaagaacaccgctatcagaagctgaagggatggtgctctgtttggtaaacatctcacctgtgctactgtagacggcagatcatgaccctgatgacctaaagaacaggatggtacaacagagagtgagtagtgtgtgtagggggctgttggatgcattctgaaagtactcacaagctattcaaagccaaatgatttcatttaattgtcataataactgaccacccctcacctgttgtagctactatgtaaatgctgcgaatat

SEQ ID NO: 562224 - DNA, 242 bp, Homo sapiens
  misc_feature (76)..(76): n is a, c, g, or t
  misc_feature (99)..(99): n is a, c, g, or t
  misc_feature (142)..(142): n is a, c, g, or t
  misc_feature (153)..(153): n is a, c, g, or t
  misc_feature (209)..(209): n is a, c, g, or t
ctatctccttgcctgtcaaggcaggccgggctcccagggctccccttgcgtggggcatgtaggtgggggaggcgtntgcaggtcaccctgggggcccanccctctccccagccttgcctggctgagctgtgttccagggganccctggaaaanccctcataggcagggagggggtttccgaggccagcatccgccgccccgtgtcgcancctggaataaaatgtggctctggcatggttcca

SEQ ID NO: 562225 - DNA, 82 bp, Homo sapiens
ctgggagctgtccaggaacctcgacaggagccggacgggccacaccatccacaggcaccaaatggacgacccggcgcttcag

SEQ ID NO: 562226 - DNA, 317 bp, Homo sapiens
  misc_feature (1)..(3): n is a, c, g, or t
nnngggggaacagggtacttgtttttttcaccccagggttggagccccatggcaatgatcacggctcactgcaatgtccactccccaggcttaagcagtcttcctgtttcaggctcccaagtagctgggactacaggcatgtaccaccccacaccttgctaatttttggatttgaattttttgcagagatggggtcttgccatgttgcctaggctggtcttgaacttctgagctcaagtgatcctgcccacctcagcttcccaaagtgctgggattagtggcatgagccactgcgtccagcccacggtaacatttct

SEQ ID NO: 562227 - DNA, 419 bp, Homo sapiens
agcatgccccgagtcttaaacaaagagctctccattcgacctcctgaaatcccaccccagatgaatgtctcctcccagttagccacagagggtagctcagacttccagaagtacacacttgcattaaatgcacgcagccagtcctatacgttgacccttggtccaaccctcagcttaagcgcggaaagaagtggttctgatccatgcccacccagatctcctgaggagtctggggttcccaggcaccagatttgcagatcctgcacaatggtccttcccggactggctcggtatcccctaccttaatggtttctctgaacacagttggtggagaggcaaaaatcactgtcttacacaggtcttctcacacgtggacagctcagcaggcccacacatctgtacagggcccaccatgagct

SEQ ID NO: 562228 - DNA, 289 bp, Homo sapiens
taccccaccaatgtgcgcttgaaccggggggactccatgccaccagtcaagcgtcggcggatgaattgaatcgaccccccggatgacgttttctacatgcccacagaggagaccaggaggatccgcaagctgttctcatcctcggaaaccaagcgtgttgtccgccgtccgaacatgaccatcgccttgcgccagagccaggcccttccgcagcgaccaccaccacctgcgctcgccaaagatgagccaattgtcatcgaagaataggaacaaccaccgcgtgcggccg

SEQ ID NO: 562229 - DNA, 194 bp, Homo sapiens
gtgccacttacattcaaaggtggaagagaactgttccagattacaacactaaagacacattatgaaccacatgcacgttttaacctcactggccctcatgtggggattggggtgggaaaactagaagaggtattcttttctaaatttttatgggtttttttttttttttttccttttttttttttttttttttt

SEQ ID NO: 562230 - DNA, 736 bp, Homo sapiens
aggaaatggggtgccgattgtatgggtctactatagaacaagggtaatcagaacatggaatcaggtggaggcgacatatttaggatttgccgcttccatacaatcacacgcatgactaatacggggtctctgcaaatgtaacgggctccaacttcacttaaggcagtcgcacgatgtctgcacaacggattggccctagtgactcatgctacacgcatgggctccgacactgacccggctaggatcactgcgtccatgcaaaaaaagtcgaatcctgtcattgaattgaatatgaatttctctaactctctccagaaaatggatggagataaccttgtctttaaaaactgtaggccagccttagccactgtggagcccttgcctccgagctctggcttcaaggggagctcttctccaggttcactaggtgaattgatttattattatcatattgataatgtgagattctttagccactttggggagcctgtctctccagaagcctttcttagtggtgccacagttggagcccaggggccatgtgtgcgctgatttcatgtgcatgggtgacagggagtactggttcactacaatgctgagctttctctactagctgtcctcccataatacaagagatcgggagatgcccctgggagcttcgcaccggaatctgaagacgggaggaacgcgggactacaggcggacaggcggggagacaagccgggggagccgggac

SEQ ID NO: 562231 - DNA, 182 bp, Homo sapiens
cgtcagagtctaatccaactgaaccacattagaatctctaataactgttattctgtgccatctgccatcacagagactctgctagggtgtaactgaggtggaaacatctctgatgccattattgactttcactatgacctgtccatttttcatgtgagcatttaggtactccccactgacaa

SEQ ID NO: 562232 - DNA, 556 bp, Homo sapiens
ggggcagtggaggggtgggaggctggtttaccaagggctttctgaaactggaggctgctatggggtatgctccttgagtttgtttgtttgtttttttttttggagtgggagtttcaatctgtgtttcctaaggctggagtgcagtacaggggcatgatctcggctcacggcagcctccatctcccgggtccaagagactctccggcctgagcctccggagatagctgggactacaggtgtgccatcatgcccagctaattttggtattttaagtagagatgagttatcaccagtgtgggccaagcgggtcttgaactcctgacctggggtgatcggcccaccaccacctcccaaagggctaggattacgggcatgagccacggctccgggcggggcaactaaacttttcaaagaaatcatatcctatattaactctagcagtgtcacacctcttggcaagggggtccatcacctttacttataccagggtgtgcccagggtcttctcggtgcaggaaatatcactagtccagaacatacttaatctattttcggga

SEQ ID NO: 562233 - DNA, 828 bp, Homo sapiens
gacgcttccatagcaaagggttgcccttggtacaggaggacgcgggctgcaggcttggttcctggcgagtttctaagcccccgctgcggtctagaggcacccggtgaaccatgtcggagatcctgtgccagtggctcaacaaggggagttgacagggtgtctcggaccgtgagtcccaagtcatttgcaaaggcattttcccagtggctaatctacttggagaagtctacaccaagtttgaacttcaggcatgattttccagcaatttctctggacagcaggggtttcaacgtgccaaacttaataactttttctcgctggggaagccaaacattttaacccttctgggtgtgcagttggatcacgaatgtggcccatggcatcattcacagaaaacgcctgggggttggcaacaaaaggttgttatactcacttgtgtccattgctcttcagaacacaacgaggaccaccgtggcctgctggagtgggaagatgcaaaccatgcaacgcctgacaacattttaacagactttcaaaaacattgaacacgtgcatactctttccaagagaagactttagacacattgaatacccacggtccacacttgatttcaatcttgatgcggcattacccttacgggtttcccaggaaaacaataccaaccccgttgcaaaggaacgactctttgccccattttgccattttgacgcacaccttgagatgattccaaaacttcaaggaagagcaagatgtttggcttttgggaaaggcaaacttaaatggaagacacgccacattgcatacatgggcacaaccaggcgggatta

SEQ ID NO: 562234 - DNA, 1217 bp, Homo sapiens
gacatggcgtgcggctttcgccgcgctattgcttgccagctttccagagtgttgaatcttccacccagaaacacttgcatcacatcaactatctggcagcttccaactttcccaacaacagaagcaagctagcctgacttttcagcatttctgtggacttccttctacttcggcacaacaagacacatgacccattcaagcacccagcactatctcaacagcttccaatgcccacacgcagacctcacccagcacgaatgcgtacacgatgctgcatcacacgctggctgcagctgcaacatccagctcacctagcgctcccacagcgacctggtacaactctctcaacacaatcacaacccagcagcagtcctcctctccacacccacaagccaccagcttgcctaacccaaaccaacgctcacctctgcccacgcactgggcatccgacacaccctcaatgcggcatttcaacccaccaggcttggcagagcgcattctccagaacccatcagtgggccacccattcagcccccaccgaggccaacagcgcacacagcaaactctggcaaggggcactccgcaacagacttctccgagggcaagtccccaaccccgataacagctgcgtcaggaccccgacaaacccaccagcccttcccccaacgcggctccggggtgcgcccccagctatgctgggccggcctctctcttcgacgcccgcacgttcccaacttccacgcgccaccacactgtcgcctccaattcacgggccaaagcaacttcgtttcctaacacacgcaacaagcacatgcttccaggcggcacaccaattcgccaacgcgttccgcactcaagaggaaaacctacccccaggtgtcaacgccttcggaggccgcaacctcggggcagggcccaccgggccaagcacctcgcgggggactccacacacacccctggggcggaaaacacgcggcgcccttcaccccaggccccagggtcaacccgcggggaccctacactgacgcgcgaacacagctgacccccggggctacgatgcccccacaacatgaccccccccataaaaccagcccccacttccccatcccatcacaggcaaacccgaccgcgcacaccttgcatcaaccacaagcgcacttcccagccccaccacacagccaacacagcacgcagccaagccgcaccagtgacagtac

SEQ ID NO: 562235 - DNA, 136 bp, Homo sapiens
gtctctggaagattaattgtcaaaagaatacaccgccttgatatgggctgtcatttaggtcccataattgtggcttgctattgaaacatatcatccccaattggaccgtgcagaactattgtgctgagagggtcac

SEQ ID NO: 562236 - DNA, 376 bp, Homo sapiens
  misc_feature (105)..(105): n is a, c, g, or t
  misc_feature (137)..(137): n is a, c, g, or t
  misc_feature (227)..(227): n is a, c, g, or t
  misc_feature (303)..(303): n is a, c, g, or t
  misc_feature (328)..(328): n is a, c, g, or t
tggctcccagtttggcagaaacgggaaaactggatgcaaccaagtcattgaccgaataatctttatatttaaacgatggaccgaaatcaccgtgcgccagttgtntcaggtagctgaaatactgtgtcatgatcggntcattaagatgatatttcgcttcgatattggccatcacttctggcggtaaagtacgttcgccggtaaaagggcttcccggcgcgaggcgnatcataaagaacgaaatagtaataagaataaatagcgtcggaatcgcttccagacagcgacgtagaataaattttnacattgccctaccttctggcctgtncttctgtaatgcgataaaactcagacaccgtggagcaggacacttcct

SEQ ID NO: 562237 - DNA, 1267 bp, Homo sapiens
cgagacagcctggccaacatatgtgaaatcccgtctctaccaaaaaatacaaaacaaaaaagaaaaaaaaattatgccacggtgtggtggtgggattcctgtagttcccgagatactcaggaggctgaggtgggaaatttgtttgaccctggggaggcagagtgttgcagtgaactgagaagtcacgaccactgtgttacgtccagttgtgaggcgacagtagttgagaacccaggtctcaaaacaaagaaaacagggtgtggtggtggtggtgtactctattatgtgttattatttttattattaccccaccacaccacactactttctccaattaccaaggtcggcaattataccgcgccccttgtgggatatcacttaggcggcgtgcggagattatctcacagccaccacattatctacattgtctcgtgggataaaacaaagaaggacaacaagacaaatcataggaaactttttcgtgaggagaaagagcacagacccttttgggtcggacacctcagagcgccatagctgtatcatataaacctcgcaccacagaggggcgatacgagtagacattcgcccgggatagcgaacacaggtgtgtgtttctcctatacaccactcttattaaagcccccgcaagacatatgtttggacaaagaagcctgcgtgatccctcagatagcaaccagagaaatttcgcaggtacaaagcacaagaccggaaatagatcccggcgggaacaacctcgagggcgcaacctacaatgagcttccttatatacatacgacaccgctagcagcactactgagggttgtgagtctaaaccaacccaaatgtgttgagcgagatatgagggaacacccccaccatacggaggggggacgaaacgacccgaagcaacgactcagaggaaacacgcggcccaagagagagagattgagaggagcgcccaacaggaaggaactaaagcagcaaacagcaaccacaactacacatcagtcgaccacacgaggagaaggccaagtgcccccgagcgagaaagaggagactagcaccctttagtgaatacgaacagaaagcgcaggttgcgacagacacgcgactcattatcaaacagccgagagcaacaaaacatcgggggccccaccacgagtagaaaacacccaagggacatagcatacgcgagacgcgcgaacacaacacaacagatacaccgagacgggtgagtcaccaaaacagggggcccactcaaacacgg

SEQ ID NO: 562238 - DNA, 756 bp, Homo sapiens
cagcgcgcaggttgtccccggtcccctcgcccttcccttctccggtggcctacccgggtcccttacactccacagctcccggtcccgtcatgtcccagaaacaagacgaagagaaccctgacggaggagagcggcgagcgagagagcaggacacgcaggagataacgaaggtacttctgcactgacgaagcagctgcaagaggcgaccgctaaaggccaaattatccaaggccataggacacaagcctggaggctccgcactgtccctcatgactgagactccagaacacagggccagaagtagctctcgactcaggagactacaacagtggccgaagcccagatgaacgatataacgcaggttgcacaacgctgtcagaggagtcagcacatagataacctggtgtacctggatgaatctacgatactcacagccctataggttactgtgcccagtagaaagtccttcgacatcgtacaaccagcacaggacttgccgggtgtatatccctgagactgcccttcttcctcctcctttccttccagatccctcctgttaccgtctcatactaatctaatacgcgtccaggggggatgcataactggggttcacccctagtttccaagcaatctttcctgcagcgcgttgtctattagcccagacaaatgacctggttgagtttcttcgccttgggggcgcttgccttgaggaacatggctaagttgtactgatttggagacacgggggcttcctcc

SEQ ID NO: 562239 - DNA, 1238 bp, Homo sapiens
  misc_feature (189)..(189): n is a, c, g, or t
gatgccttcctacagtgtccatgaatataatatctagtgatgcaccactctcgctttcataggcacatacgtatgctaataatcgtcatcattacccttaatatccctctcccgtaacataatggcggtcacgaaaggtatatacactaactagtcgcctgccttcatatactacgcttatatcatcantaaacccatcaacaccacaaaccctactatagccaagtattggtgcctattgggccatgactagatcttgtgccagcctgcgcaagcaggcggtggggcctagacccgtagctagtgctccaatcgtgccaacacgatatgggcctaagacatgacgtagcgataagcctaaagcgctacgtccatatgctaacaactacatcgtcccaagcgaagttatattgactaccacgtgacattgaccttccaagaaaaccacataactttgaatcgacacaaacaaccagagctctaattattcagcatcatccctctactatttttagaggcaaatccaacaacaagctatttagcttgttccccaaaccttttcctccgaaccccctaaaaaacccccttcctaatactcaaactaacctgagattccttaaccccctccacaaatctatgggacaagacacagggccagcttatccacgtgaaaccccttattccgcgaagaaaatcacaccttctcatatcatcagttctcgcacagaattctctctaaatatacacctccaagcgccggaagatagacacagtatacaatatcactcatagcaaaacacacggttatacccaccatggtggacaactaccaccgcgtgatagcgtgaatgaccaaagaagcggtgctgaacaagagaacacatatccatcattatgaactcagtagaggtggcatccacccatcatatacgaagtgatgggctatgcaacggcacaccactcccggcggaaagacaactaacacagccacatcgaaggcaagcgaatgatctcacgctgggcggaacaatgacacgagacgcacgacagtaacgctagacagcagaggaatctagacaacagtgagccagtgcaacacagagtcggaacgcacaacgactaacaggacgggtcaggcagcaacaagcagatagtggactaacatctactacgcacacattactttgggacaacaccaggaaagagtaagacgacatgatagagtgaggggggggctg

SEQ ID NO: 562240 - DNA, 246 bp, Homo sapiens
tgtggcctgcctcctcccattcctagggcctggacccctcagctgggactatgcagtaatactgggaaaagggcaagtgaggcagggaaggaccctggtgagggccacacggcaagagtgtgctgcagagacagggccagcagtcctcactggcgcttgcacttgcaggtgcgagagcgtttccgccgcgcaggcttccgctgcttgtggagcctggcgatgcagaccccttggcgccgccgcacg

SEQ ID NO: 562241 - DNA, 234 bp, Homo sapiens
cgaggtttactcaattaaaaaaatattcttactcggtaataaaatagaaaaatctgagaatctgtagcttagagaactacagtgtgggatgtctataaagaccaggttattttatcagctcctaacaccccttaatagaagcttagccaagacttgcactatttcagtctttcccattccacattccatggactcttgaagagacattgatgaaacggtacagccatttaggta

SEQ ID NO: 562242 - DNA, 233 bp, Homo sapiens
cagtcgagtatcagtctgaccaacatggtgacagcttgtatctactgaaaatacaaagaaattgggcaggcatcgtggcgtgcactgtaatcccagctcgtcgggcaggctggggcaggtgaattgcttgcaccaggcaaggtgggagtaacagtgagccaacattgtgccagcctgggtgacagagggagactctgtctcaagagaaaaaaacacaccacaaacacaagagt

SEQ ID NO: 562243 - DNA, 812 bp, Homo sapiens
ggtggtggctaacgcctgtaatcccagcacttgggaggccgaggcgggtggatcaactgtggtcaggagttgagatcagccaggccaacctggtgaaaccccgtctctactaaaaatacaaaaattagctgggcgtgatggtgggcgcctgtaatcccagctacttgggaggctgaggcaggagaatcacttgaacccgggaggcggaggttgcagtgagccgagattgcaccattgcactccagtctgggcaacagagtgagattccgtctcaaaaaaaaaaggaaagggaaaaaaaattagctttatacctctttcttggtctcaacggccaggaaaatttctggaacattccaaatttcaggtggaattaatccaaaacaaaatttttataaggtttaaaatatttttacttcttatagtaataggtatacttaaaaagcctcagggtatatatcttctaaacagttacaattcaggtgcagttacattaaccaattatgtctctagtggagaacaactaaggcctatttcactgtgtgtagcctcaaggtgcctaccttgggtggccaattaaattattcgtagattacctgatggtaaaaccatccgtttgtgttcacattggcaaaatctcaaagggcctgtttattgtactcctggacattataatctattgcgatctcaaggattgcaggtgggggactagaattagtcccatttataactcaattggttgggttacacaatctccttttccagttatttcacattggctctccaaaggttattgcgacacggttcctttggtg

SEQ ID NO: 562244 - DNA, 929 bp, Homo sapiens
atcaccatggcggctgggaccctgatacgcgtatccgtgaaaactggagggccttcaaggctctcatcgctgctcagtacagcggggctcaggtccgcgatgctctccgaagcaccccacttccattgtgggcaagactcaaccgctaacccatgaaattgtctccgctaaatttcactgtcgcggcaatggtcccagcgagtctgagggtgatgatggtagttctgtgtgtcaagagagcaatcgccattgcctactatgtgagcaatgagtgagctgcgtgggaagatactccagaggcggcaggcccaggatgatgcgagtgggtgagcttttgcctggagttccgcatatagtagcccccaagtcagctacctgggtgtgccccatgctagcggcatcatgctacgataacaaacaggccactgagaatgcaaaggaggaagtgacggcgaattctgggtgctgctggatgcttacttgaagacgaggactttactggtgggcgaacgagtgacataggctgacatcacagatcgtctgcaccctgtagtggctctataagcaggtactaggagccttctttccgccaggacttgcccaatagcaacacgctggttcctcaccttgcattaaacagtcccagttccgggctgtctggggggaagtgaaactgtgtgagaagatggcccagttagatgcgtaaaaagttgcagagaaccaacgtaaagagaggaccagacacggcaaagagaaagggttcacgggtgaaggagaaagccagaagccccgaggctgcagcggacgggaggcagaacaaaggcggctggcccttgctgctgaaggggggagaaggccgaacggtggagcaggcgcctggtgctggaacccaaaggccaggaaccccttgctcacctgcccaggactac

SEQ ID NO: 562245 - DNA, 141 bp, Homo sapiens
gagtgtttcaggtattctgtgttggttgaggcaccctagcgcaggctggtgtgacgaactgtgactttttggcttcatgacagcctcatgttgatcacaggccaggccccaggttgcttctgtatcggtgcctgagagcag

SEQ ID NO: 562246 - DNA, 608 bp, Homo sapiens
  misc_feature (145)..(145): n is a, c, g, or t
  misc_feature (150)..(150): n is a, c, g, or t
  misc_feature (172)..(172): n is a, c, g, or t
ggaacgagccaaaacagcacacaaaatggacgccataaattctgaaataaaagtgtatgatgtgttctgagtcactgtagaagtcatgcatttattatcaagatagaaaagagcagagaatgacgtggacattggtctcggaggnctgcntaggtggtgcggtcccgggggnattctggcatgctggctctctttgaccgctgcgcggcagccctcgccgcctgcccggcactggctccactccagaccactttggcacacggctgctcactcctgcctcctcggcgtccctcttctctcaacgcctgcatttccctgcctccccaagcaggaggcttcgacgcccccattctgccctgccaacttacaactccctgacagcatgtgcacagcactattcgccgcggaattcgcacggcctcgacttacttggcgcggaatcagagtcccattccacaccgaagccccatccacgtggcctgagcaacacccctgtgtcccctgtatctgtctcactggctgtctttctgccagtttcttaaagaaccacaccattactgcgatttgccgttcgaagcgtcgtcccaacaatgcagatggttctgaca

SEQ ID NO: 562247 - DNA, 253 bp, Homo sapiens
accccgactagcgcgacagctggaaacggcctgtggcccagaggtcttctccgaaaggtgagggtgacatgctgtgcttttgtgcccaagctcaccagccctgggccacctcagtgcagtagtacaccatctcacggcagtagcacgccctccgtgggccgtctggcctgtggctacttggaggtgacggcactcccatgtgctgactcgccccatccctgccacgctgtggccctgtcgggctagtcggggg

SEQ ID NO: 562248 - DNA, 177 bp, Homo sapiens
tgatgctgcggtcgctctacgacgactcccccaactggtcctcacgctccgaaaacaacaacacactacgacaccgggtcctacttccacttacttcctacgcgcggtactccacggcggctcgggcctgctttacacaccacctctagctgacggacccactcgttggggtacccg

SEQ ID NO: 562249 - DNA, 433 bp, Homo sapiens
  misc_feature (115)..(115): n is a, c, g, or t
  misc_feature (148)..(148): n is a, c, g, or t
  misc_feature (192)..(192): n is a, c, g, or t
cggggctagaggaccggcagctatcggtcaatagctagtggccacttgatcacaagactgaagctacttctccactaaaaaaaaggggggaggtgacaacagccattagcaccanaatagactctctctgacatcataatagactgtntaaaacagaaggttggaaaggaatgactctcaggccagttcagntttaaggcgggattggccaatgccccccggggaaaaaagggccatctgaaaatcacctctaggagtttgggggaccaactgcgtgaagacaggggacaaagtccaaacccctacttgagaaggggaagagagcagctgggcaggacagcctcggaaaagcccatcgcctttgggccaaattggttgaagcggctttggtttggtccccccatggataagggaaaggagaaaaccaggccag

SEQ ID NO: 562250 - DNA, 335 bp, Homo sapiens
caaagcaaagcacagcagagacagcacagcacggacagcacagacatcacagcatagacagcacagacagcacagacagcacagcacagacagcacagcacagcacagacagcagagcacaccacagcacagcaccgacagcacagcacagacagcactgaacgcacatgcacatgcacactcatgcaccccacaaagcagagaatcacacaaatatggctcacctcacataggatacagacaaaccaaagacctgattagtatggtcaggtctacctggagcatacaagaacatggatggaatggaggcgtgtatcctggaaaagcgtcgacgc

SEQ ID NO: 562251 - DNA, 115 bp, Homo sapiens
gtcactggctggtcaggaatcttagaaacaagagacttatactgtctgtctgaggcaaaagataacagcagcatctctgacagcctctgccttaaaggaaatctttattaatcac

SEQ ID NO: 562252 - DNA, 954 bp, Homo sapiens
gcgggcgggatggggcggacggggactggcaggatttctatgagttccaggagccggcccggagcctcctgaccaggagaactgtaacgcgagccccgagcctgggggagggggggccgtgggcggttggtgtggcgccgacgttttcccggcctctggcctgcagtctgtggaggaggaagctggagcctgtgcttccgcccctcggaatccgggcgccgagcccccgaggacggcgtgcggccaatacacgggagcgcagctctctgcaggggggaccgagaattgtggaaattgccctgaccagattattatgcgaatggtgttgcctgtagactgaaaggttccatcggcaatacttaggaccttttgagttgtgtttactttgtgaacctcttcaggaaaaagcggggttagtgacagttgtgctctgagataccgtcagatgattgaagagtttgagagaaacaggggtggatatgcatcaatcaatggtctctccgtgtgttaatgattgaacccctttaggggagaccgaggtttttgacgacacttgcagaaattggtgcgggatcaccggacccagaagatggattgagaacctaaaaaggaagatgggtttgcaattggttcccaagggaaatttcaaactctcaaagaggttaggtaacgggagttgtgaacgaggggtggacagggcccaagtggcggataaatgaaatctgaagaaattgggctgccataaggggagcctagagagtggggcacagtggttctaccaaacagatgggttgcaagaggggaacacttttttgtgtttttggtggcaccacagaagagagagacgaaaaaaaaaaagtagggtcaaagggaagggtagtcgggattaaagtttagaaagacgggggtttaaattcgggggagagtatattgtcaccggagagagcactgtga

SEQ ID NO: 562253 - DNA, 681 bp, Homo sapiens
gggggcttgtaaggtgtctggataataaatgatttaaaaaaaaaaaaaaaaaaaaaaaaaaaaaaaaaagaaaaaaaaaaaaaaaaaaaaaaaaaaaaaaaaaaaaaaaaaaaaaaaaaaaaaaaaaaaaaaaaacttgtggcccccttggcccaagccacctttaaactcaaccaagttaatccatgcgccccaatttcaacctaattggcccaattccccctatggggagccgtataaaaatcaactgcccgcggtttaacaacgcggaaactggaaaaaccctggctttcccaaactaaatcgctttgaacaaaatccccttttcccaattggcctaaataccaaaaagcccccaaccatccgcctttccaaacatttgcccaccctaattgccaaaggaaatttgaaaccgtaaatatttggtaaaaatccccgtaaaattttggtaaaaccacctaatttttaacccattagcccaaaatcggaaaaaccccttataattaaaaaaatttccccgaaaaaggcttaagtgttgccccagtttgaaccacgatccccctttaaaaacacgggacctcaaccgtaaaaggccaaaaaaccgtttatcaggccaagggcccattacggaacccatcccccaaaccaaattttttgggcccaggcccccgcccttcgcct

SEQ ID NO: 562254 - DNA, 201 bp, Homo sapiens
ctaaagatgaacgatggtgaagaaatcttaaggtgtacatatcactgaatcggaatgggctgctctttgaaataatacgtatgtctagcaatcttatcaacttaacattacttaaaacaatgtctctattcagtctgttacaaacacacttttttcttatcccacataagtactgcctaggaaaattcactcattcacatg

SEQ ID NO: 562255 - DNA, 914 bp, Homo sapiens
  misc_feature (330)..(330): n is a, c, g, or t
agcggtctgtcgcatggtggcccacgtggtgcacgtaaaacagggtgaggagagcggggtcgggtccaccagtggaggaggctgtgcgctgcacagcctgtgaggcagctttgacgtgtctgagacttggcgtgcgatcatcttgactcctatacccctggcagatagccatgtcccaatttgtctcgtggggtctccgatgagtgtgtagcctactgcatctgggtcgagctctcgttggggacagctgggtggtggttacacggtggacctctgcctggctcccccttggtgcatctctctgctcgtctcgatcgaccctagtctggnggttcacctcgatccaacttgaagagagcaccttagagtgaggccaaggacgtcagacaggcaagggacgcctgggtctaggctaacgtggggtgtgtgcccagctctcctccctgaccctaaaaactcctgtactgcccagaccaacagacgagagctggtccctgatgaccccggagacgaacgcagctgacgaaatgctgcaggctttccgcacttctgagaccggtgatcttcgctcctgccagggggacgagccacgccagcaggccatgtgcaggccctacttccgctcagacccctaggggcgttccttctggccgccgtctgaggattcctcgtagggctgtcccgcatgaggggcgttccccaagtctctgtggtagaatgcctggaatgtggcaagagtgacgaaagtcgagacgggaaacacggacaaggttgctaggcccgggctcctgagggcaacaacttcacagactctgggtgttcccccatcatcgcctgaacaagtgtgaggctcctgttaccgactaacaaaatggccttgggattcattgggggaggggaagtttccccaccat

SEQ ID NO: 562256 - DNA, 157 bp, Homo sapiens
ggagacggggttcagggttgaaatccccacattccaggcaggggctctttctgggttccttccctagaagggctggtccccggcccttccagtactatctcaccagggagaccctcccactcccccacccggctccacagggtaccggagctcgaat

SEQ ID NO: 562257 - DNA, 1192 bp, Homo sapiens
  misc_feature (620)..(620): n is a, c, g, or t
  misc_feature (699)..(699): n is a, c, g, or t
gctgatatataatcttctaaagcgatggaacataccccccagaataacgattacagttgttggggttggcgctgctagtgggcatggcctgtgcctctcacgatactcattaaatgagaaggactagtgcggatgatactctgactcttgcggtgagtggtcgaatcgacagcatcggcagatctgcacaggggagcagactgaatggtatctctcaagcatgagcaggctctctatgtgcattagaaacaccagaagattgatcttctggtcatcaagaagctataccagtgtaacctagcttgaaagctctcgagactgggatcaattatccaacaggacttgaggagacaaccgatctatgctagatgacggtgaggtagagaagtcgctgttacatatgaaactatatcgagatgcccacgccaggtaataatcagatagcagagcgacttcgtttgtaaaagaatatgccattgctaatttgcacctaatattgtgacttggttgaggacaccataagcgatgccacaccgaacacctggccaattaggctgtggccctttggaatttggctatggtacgaaaaggtacacgaggctagtgaatattatttcctntagcaatgccgtcatcgccttgggaactttttgcgcaaatgcactaaaaggtggagttgtttgcccccaaaaaaaaaanccctgtgtggggtatatctatggcataagattgcgtggatgcctcacaatcgttgtgacaccttcaaagtccccctgaaatttcctgctatattcctatgtaatagcggagcgtgaaacaatagggaccctgcggcgacgcatttccaacccccaaagattttaaaaggccattgtgccaattagggtgtacgggcgttcccctattcgggcggggaaaagcaattggtgcacaggaattttaccccaaatggtagttagggcccctttggagtagaattgccggcagaaggtgggggaaaaactcggaaatagttggcgtctcgcatatcgggcgcggtttccgtaccttcctttgagaaaaggaaaccgttcgatgtgcatagccccaccaaggaagttttcttcaacggggggaaccttggaacctaaaacaaatggaatttaaacggggaacacccagggtgggaaaaacacgcaaggaggttttccag

SEQ ID NO: 562258 - DNA, 215 bp, Homo sapiens
gtctctagcaggatccccttcatttaggcaatttcactatgtgccattaaagtattcgttggatttatccagactatgttaaaaaccatcatcacagcttgctataaatcaatagctgggtttaattgactttggtcgtggcttcccagggatttcccatgtcattaagtccatatctgaaagttaaaagttctgtctacctatcataagctgca

SEQ ID NO: 562259 - DNA, 261 bp, Homo sapiens
gcagcccaggtttctgtcttgaatccagctaacatcaagattgcagtcaatggctgggcgctgtggttcatgcctgtgatcccagtactttggaaggccgaggtgagaggatcacctgaggtcaggagttcgagaccagcctgaccaacatggcaaaactccatctctactaaaaatacaaaaaaaaaaattttagccaggcattgtttgcacttgccactaggcttgccactagggaggctgaggcacaagattcatttg

SEQ ID NO: 562260 - DNA, 93 bp, Homo sapiens
ttgtctgtggagacggaattacacccttttcccactgctaaaaggtcaaggccttctttggctgatccattctgcctttgtggctgctgcccc

SEQ ID NO: 562261 - DNA, 564 bp, Homo sapiens
gagctgggcagcacgatcgctgccagtgtggtagctgcgcctgcatgaaggggagagcgatctgaaccggctgcgcagccggatccgtcaggatctcagccacttcgagggcaacgcccaggcgatccgcatggtgtacagcctgctgaagctcaacctgacctacgcgcaggtcggctgcattttgaaatacacccgcccggcctactgggcgagcgacatccccgccagccacagctatctgatgaaaaagcccggctactatctggcggaagaggctttcgtcgatcggctgcggcgcgagctgcacatgggcgagttcgatcgtttcccgctgacctacatcatggaggccgccgacgatatctcgtactgcgtggccgatctggaagacgcggtggagaagagcattttcaccgtcgagcagctgtatcagcacctgattcaggagtggggcgaagtggcgccgggcgatctgttcgacaagaccgtcgccagcgcgtttcgcaagatcgatcggggcggcgcgcggcgcagcgcggaagatcagttcttcatgtatct

SEQ ID NO: 562262 - DNA, 159 bp, Homo sapiens
ggggggtgaggcagaatcggaattggtttgggacatggtaagttggtgatgcctctaaccattaagtggagatacaaaataagcagttggttatatgagtctggaattgaaatgacgaggcctgtagctgaagaatattataatgcatatagtgtagta

SEQ ID NO: 562263 - DNA, 229 bp, Homo sapiens
ctctgttgcccaggctggagtgcagtggcgtgatctcggccaccgcaagctctgctcccgggtccacaccattctcctgcctcagctactcaggaggctgaggtgggaagatcacatgagcctgggaggtcgaggctgtagtgagctgttatcatgccactgtactctatctagcctgggcaacagaggctagagcaactctgtctcaaaaataaaataaaataaaata

SEQ ID NO: 562264 - DNA, 150 bp, Homo sapiens
gcagggtgaccgcggtccctgtgtcagctgccgacgcactgaggagatgaccgaagtcgaagaaggagttggagtagtggcgaagataatgacgcagccgcagaggagcgaggacatgcgacagtgaggaggacggagaggatgtgttcg

SEQ ID NO: 562265 - DNA, 1204 bp, Homo sapiens
tctgagcaccgttcttccaccactgattaacagtggggtggcaggtattagggataatattcatttagtccttctgagctttctgggcagcactacggtgacctcgccagctccacgcagccttactcgctaccactgccttcgactgacacccaccgccaactgctctgctcctcatactcacgaaccagcaaagcgacccaacaggctgcgatagctcctgacacagcctctcaaccacaccatggcgccttgccacggaaccaatactcaacctaactggccacgccatcacccagaacctctcaacgcacacttctacgcgcgccactccttccagacctcactctccacccagacaccggcgcactcaactcgttctctcctatcagtcctctagtccaacacccttgctactgacacactgctgcacgtccgctgtctgcgccatactcccacactaccagcggcgcccactaacgccagtgccgcctctactctctggccccctggcaactgcggtatcccacggcacctacactccgacccctgacgcccagcctgcaaaagcccacacgcccatagccctctcgcgacctctgcgcctgcgcgcctccacctaccttccacagccccagggatcaaacccaacgccccagaaccgccgtatgccccaaccgccacccgaacacgcgacaccggccaccacacataatcccccaaggccacgacccccacctcgcctaccgcaacacaacatgcaacccctcccacgacaccaacgcgcggcaaccgccccagcccgcgacctccaccatcccgactcgcaaacgacgacgacacccacacaacacacggccgaaaacccccacaatgaccggacgcaaaaccagagacacccaaacgaccagaacccactccccaacccaacccatccccacagcacctggctatcaaccgcaaacaccccgcctcccaaacccgcgccccactctacacccaaacggggccacaacacacacagcaccacgccaccacccacccaccgacacagacggcacacaccccccaggacacagcctcgagacacctacaaaccatcagtgcgcatggctcgcacgcatctaaaccctcaacgacacaacaagcaggcaagccgccgaggccccactaaccccgggcacccccacccgcaaacccccca

SEQ ID NO: 562266 - DNA, 398 bp, Homo sapiens
  misc_feature (1)..(1): n is a, c, g, or t
naacctgcgggataacaaaaagtggctcagtctcagcagaatgagacccaggcaggctggccccagagtccatgttctagacattgtgttcttcttgcctgctggtcaaagaagaaaaaaatcttttatgtaaccttgtatataaatgtatcttcaattttactcagtcactgccctacctattatatttatcttcctccaactcataaggcaaaaataatcctattttcatatatctagctcaactgcaacttttatgccctataaattaacattttccaccagccaatatatttataacaaaaatttttaagacataggggtgttcaccatgttgcccaaactggttctcgaactcctgctctcaggtaatctgcccacctcggcctctcaaagtg

SEQ ID NO: 562267 - DNA, 224 bp, Homo sapiens
  misc_feature (36)..(36): n is a, c, g, or t
ggagcttatgtcatcccccttcgtccacaacacggntaggcaggtgtgctcagggggtctgaggctttcacggatgttaaatgtatgtccagaaaagagtcctctcctcagagttcactaccctcggtttcacagctgtgccaaagtttaaaatcaggacggatttccttcccccgctgtgtagaaacgcctggtgttctttaaatgtgagatgtcgtttctac

SEQ ID NO: 562268 - DNA, 470 bp, Homo sapiens
  misc_feature (48)..(48): n is a, c, g, or t
  misc_feature (52)..(52): n is a, c, g, or t
ccggaatctgccgcatctcttgtctatcgcctccatcctacgatcacntacngcgggtcacgtcctccttacctcaatcattggccccatggtctgaactacggtacacgatacggcggattatcttcaactcctacatattcccccttattcctagaaccaggcgactgcgactccttgacgttgacaatcgagtagtactcccgattgaagcccccttcgtataatattacatcacagacgtcttgcactcatgagctgtccccacattaggcttaaaaacagatgcattcccggacgtctaaaccaaaccactttcaccctacacgaccgggggtatactacggtcatgctctgaaatctgtggagcaaaccacagtttcatgccctcgtcctagaattaattcccctaaaatctttgaaatagggcccgtatttaccctatagcacccctctacccctctagagcc

SEQ ID NO: 562269 - DNA, 481 bp, Homo sapiens
tgggttgggggggaaaggggggaaagggagggggttgggaacttcctttaaagggggggggggggggcagaaacgtcgcccccaggggaggtgtatcaagtagaacccaagcgcgaacgcggggtagcagccggccgcacttccacaaacacgcgggcgcacaaacagacgagcgctgggggcacacacatcggtgcgctcgtcacagtcacgcgacacacaaggggcctcaacatagtgggtggtcccagaagcaaaacatggtctgcgggcgagagcgggcggcaccgtacagataagacacatgagctggggatacccgcgcgtaacacaaaacacactgagggagccgcgacggcccccgccgcagcaccatccgcctggttttgcaaaccccccagacctaagtcgcggcacccccccgctccgcaccgccgcagcggcctcccgcacgtgccccgccacccagcggcaaaccgcc

SEQ ID NO: 562270 - DNA, 139 bp, Homo sapiens
gagtatgcacggccctcagtgctgataagtctactcaatgggtcactcatatcctattcatctgtatcttaaatggcccaggcatcttgcctctggaaactattgagcttgcatgtacttgaaggatggatgagtcaga

SEQ ID NO: 562271 - DNA, 1459 bp, Homo sapiens
ttttttattttatcaagattaacctggtttaaatgcagtctgctataaaaatgaaaacttctgcatggtatattgggtctttccaaccgtttacgtgccatagttaagtgctgtgagtgttcatctgtggtacacattcatttacaactcgtgtgggccagataacagcttttgtgcaacagtgggtttaatacataaaattgtggtgaattcagtggacactttaatcttacagccacaccacacacgacatattctacacggccaaatcttaaataacactaatattctaataatatacacctaacagctgggggttatatgtgggatccctatgtggacacagaattggtgggctttatattctattctccacaagcgtgtattaggccaaacctcagcaacaaaaatatacacaacatttttctattaccacacccctctcttctacccccctcttcttagaagaaacacaacaacacaacaacaacaacaaccacacacacacaaaaacaacaacacaaacacaaaaaaacaacacacaacaacaaaaacaaagagagagaggcgcgcgcacaaaccaatacaagatataatccagcgagagagaggaaccaccaaaaacaaaaacgaggagacacacaaaaaaaatagagagagaaaaaaaaaagagggagtaacaaaaatagaggagagagaacgaagtgataaaaaagaaaatcacgaacagcgagagacccaaacaaaaccaaaacaggagaggaaaaacaacacgagcaaacaacaaaacgacaaaacaagaacagaaacaaaaacctagaaacgaaagaaaaaacaaacacaaaacaaacaaaaagggcggaaggaagaaaaaaaccagctaaagagaaaacacaaccacacaactaaaaaggaagaaacacaaaggacacacaacaacaccacaccacaaccacacaaacccacaccacacagaaagacaacaagagagggagacaaagccaagaaaaacagaaagaacgcataacgaagacgaagaaaaaaaaaacaagtacaacacaacaaacgaagacaagagaagaaacaagagaaacaacaacaaaacaaaaggcaacacaaacaaaacaaacaaaaaaaacagcaagaagaaaagaaacgagacaacgggaaaagaaaaggaagcgaggagaggaagaaaaaggaagagcaaagaagacaagaagagaaagaggaaagaaaaaaagagacagaagaaagaaagaagaaggcagagaacgagacgagagagggaaaagagagagagaagaagcgaagagacggacgaacacacgagcagagagagagaggaaggaaaggaaggcaacaggagaagagcaagagaaagaaaagaagaacagaagaaaagaagaagacaaacaagcaacaacacagacgacgcagacacgagaggagcgagaag

SEQ ID NO: 562272 - DNA, 437 bp, Homo sapiens
gatatagtagtagtagtagtagtagtagatatatatatagagagagagagatagagagagcacagatatagatattatctgcgtctcttagatataccaattgctacctatcgctttctaccatcctcttcttccctcttggtttcacttgactttttgttattcctggtctctttttatctttctgatctctctgtctcctgggttccattttttaaatgtttaccactatgttgacctgttccttcccttcttctccactgacttgcggatgatgccttccattactgtcgatggtatttacagtccattcgtcacgcatgtctggctaagtagtctcgcgtatgctgttgcgctattgactgtatacgtacatggctgtgtctgctatgttgctctgtctggtccgagcttcttctgctacgtcatgtccatct

SEQ ID NO: 562273 - DNA, 377 bp, Homo sapiens
cagaaaaatccagatacctcaacaacaaaaatacagctcaacatggaactgcattaaaatcccagactctctcattttcgatgaccattccttatacccctcaaaaggtgtcccacagaagctctttcacaaactgcattcattcagaatgtcttctcccccactctcccccaaacagccaagtcatgccatggcacagtgcgatgcatttatcaaccgttcaagcacaatgtcatttcttggatacccattcaatcatcaccacattcatcaatcattacatcattaacatcacacacatatgtcatcatccacacaagtcatccaacatagcagtcatcacaccgtcaacacaagattttcagcaccagcatcat

SEQ ID NO: 562274 - DNA, 665 bp, Homo sapiens
  misc_feature (11)..(11): n is a, c, g, or t
  misc_feature (103)..(103): n is a, c, g, or t
  misc_feature (142)..(142): n is a, c, g, or t
  misc_feature (144)..(145): n is a, c, g, or t
  misc_feature (157)..(157): n is a, c, g, or t
  misc_feature (170)..(170): n is a, c, g, or t
  misc_feature (213)..(213): n is a, c, g, or t
  misc_feature (220)..(222): n is a, c, g, or t
  misc_feature (239)..(240): n is a, c, g, or t
  misc_feature (268)..(268): n is a, c, g, or t
  misc_feature (270)..(270): n is a, c, g, or t
  misc_feature (287)..(287): n is a, c, g, or t
  misc_feature (295)..(295): n is a, c, g, or t
  misc_feature (306)..(307): n is a, c, g, or t
  misc_feature (320)..(320): n is a, c, g, or t
  misc_feature (331)..(332): n is a, c, g, or t
  misc_feature (334)..(334): n is a, c, g, or t
  misc_feature (340)..(340): n is a, c, g, or t
  misc_feature (347)..(347): n is a, c, g, or t
  misc_feature (350)..(350): n is a, c, g, or t
  misc_feature (356)..(356): n is a, c, g, or t
  misc_feature (367)..(367): n is a, c, g, or t
  misc_feature (371)..(371): n is a, c, g, or t
  misc_feature (403)..(403): n is a, c, g, or t
  misc_feature (408)..(408): n is a, c, g, or t
  misc_feature (575)..(575): n is a, c, g, or t
  misc_feature (587)..(587): n is a, c, g, or t
  misc_feature (661)..(661): n is a, c, g, or t
attttctaacnttaatttatttaaagatatagaggttatggatatagataagtatgcccgactatgatccttaattcagcaatctaatattcacaatgtgttngttgccatttagctatttatcccaacatgcccttaaaangnncaccaaaaaacngcatgtgcctagncagggtggaaaaagaaacaccaaggccttgctaaaaaggagangcctaannnagataaaattcccacgnntgttctgttcaactgtcgcctgtgagtncnggaataatgttcccgtngggaagcnttatgcccagnngtttcttggtgtnaacgtgggaanncncttgangttttcngtngctgtnaggggggagcncganaactgtttatggaatccagtcgatgttcaggnaccgngcgatgaacgcaaacatgtctgagacttcctctatcactttggctgtgggcttccccgccccgtggcccgccttggtgtccacgtggataagcagggggttgctttgcttcctgctgcggcccacgatgtactgaagggtggcaatgaacttcagggagtgaagggngaccacgcggtnataatggtcagcagtgaggagcagcatggacgggtactggatgtcatctgcttctggtaacttcacattatgcnatgg

SEQ ID NO: 562275 - DNA, 291 bp, Homo sapiens
  misc_feature (35)..(35): n is a, c, g, or t
  misc_feature (50)..(50): n is a, c, g, or t
  misc_feature (121)..(121): n is a, c, g, or t
  misc_feature (131)..(131): n is a, c, g, or t
  misc_feature (151)..(151): n is a, c, g, or t
  misc_feature (163)..(163): n is a, c, g, or t
  misc_feature (197)..(197): n is a, c, g, or t
  misc_feature (268)..(268): n is a, c, g, or t
tcatgtctaagaacggggaccagcatccatcagcnatcctctttgtgaanatctccctccaggactaggctggaggaagccaagtggggtcccccctgaagtggctgggccctctgtccanatgtgggganagggctggtgtgctgctccnagcctcttgctnagagctaggcccccaaattgccttcagccctaanatagtgtctgctgctgcctccctggggcccaggagctagcccagtccctggagctgtccttcattccgttnggaataacactgcagccctctcc

SEQ ID NO: 562276 - DNA, 718 bp, Homo sapiens
  misc_feature (697)..(697): n is a, c, g, or t
tggctgtaacagtgttttttgatgatgattccaggcccctgctgaacccctggtggggaggggcacaaagcgaaatggggcgtaatggaatgtcttgaaggtctgccccgtgatgtcggtcggagtttccagactaggcgagggcagggttgaggccttcgggcacacagccggcgcccagttcacccggcccagatggagggcggccgggccctgcgcaggcactttgccaaggttggcctcacactcacgcacactcgcaccgagacctcaaggccgttcttccacaacctccacccaggtgcaaattgacttaggtgcaaatttaaatttcagaagggacgggggaaacagagctcggtggaggcttttgaattcttctcagaaaaaaaggaaagacaggaaagcctcagaaacaaagagacagaaggattgaaaaaaaaaaaaagggaggtggtgggaacggcgttcattcccgctggaggagcctcagcttcgtgggatgatgtggtggctggtggatcaaccgatccgccgcaggggttggcctgtgaaatggattccccggtgcggggtgggtgctgcgggcgctgtgtcccgatggtgtcctagatgtagggctgataggtctgggtccccctcgcttacctttaaaaggcagatcctgactcaggtaggcgtggttgtagtgggcttntcttcccatgggtccttggac

SEQ ID NO: 562277 - DNA, 527 bp, Homo sapiens
aaatggtcccttcccttgtagtttctggcaagaggctttaggaagataaaagtttaggagacccccccggaattctgaattaagcccagagttgaagtttaaacccgtttcacaggctttcaagaatgtcgcaattactaagaagcagataatggtgttttttagaaccccaattgaagtaaattccccccaaacctttaagggataaaataaaaattaaccaaaaaacttggaaagcagtttttgcttcccatttgattttttcaaatttaatatttaaattagagatccaaaaagggataaaaatgtattttggcaaatttgttccttaaaaaaaaaaagccccgttttctttggaagtttgtttaaatgccaaaaggggaaatgaattcaaaaaaatttaagccgcaaaaatgtatttgctataaaatgagaagtttccctgaaaaaggttttttattgctcattttttaaaaaaaggactcttgaaatctgttaaaaaaaaattggacatttggagatgttta

SEQ ID NO: 562278 - DNA, 163 bp, Homo sapiens
tgaatggctggaaaattatccatagagatgtcgttccgcttccccccatgtactgtaggaggcttcctgcctttcagtgccatctctcgtggagcgtgtactacatctgtgccacagtatggggtcgggagcagtacacttggtacggcatcctcttcttttc

SEQ ID NO: 562279 - DNA, 180 bp, Homo sapiens
  misc_feature (78)..(78): n is a, c, g, or t
  misc_feature (119)..(119): n is a, c, g, or t
tgccagtgtctgtctgcagattgggctacccaaactgtttgatcagtaccccccattctatatcaacggggtacaaancgagttctggccttgtctgtggagacggattacacctttcncactgctgaaaaggtcaaggccttcttggctgatccattctgcctttgtggctgctgcccc

SEQ ID NO: 562280 - DNA, 247 bp, Homo sapiens
catggaggatactagtcatgccaggacacgtacggggctgactaccagaaagcgctgctgtaccgtgatgtggttgtgagatgactgaagcccgacacggccgtgagcgtccagaaatggtgctcaccatgcttccagctaccaggtctggacaaccagcttgcgaataccagtccccgtggccatccctgatgagggtgacgttagcattacccccaacctcattttagttgccgaagctagatca

SEQ ID NO: 562281 - DNA, 109 bp, Homo sapiens
ttatttcataagatgtttagagacaggcaatggctggtataggagcatcagctcaacaatgtggcaactggcatctccgcagttctcttggcccttctgtcgtcttctc

SEQ ID NO: 562282 - DNA, 697 bp, Homo sapiens
caccactccctaatctcaagtacccaggacacaaacactgcggaaggccgcagagtcctcgtgcctaggaaaaccagagacctttgttcacttgtttatctgctgaccctccctccactattgtcctatgaccctgccaaatccccctctgtgagaaacacccaagaatgactcaactaaaaaaaaaaaaaacaacaagaaaagacggcgggtgttgcacctgggaacgtgatgtgcccctgtgaagcccagggaatgtgccgcacattggccggcccaccacccaaaaccgggaaaagggccaggaagggattctctcccttagaaacctttcaaaggcagccaaagccctgtgccaacaccgtggatttcagaactcgtggccctccagaaacgtggtgcagaaggatgacatccgggggtattcagccaccccgaagcttaggaaagtgggtgcagcacaacggggaataagagaggcagccagtcagcctccggggaattcccagggcagcttgcaaggagccacagtggggcccggggctctgaaaaggtctgaggcccaagcaaggcgcaaggggcctaaaactatttctcacccagggcagcgcaaggaaggttcaatcccagaaacgtagatcccctttccatcattctcacaacctccacaagggttccacaagacaagatgtatgaa

SEQ ID NO: 562283 - DNA, 391 bp, Homo sapiens
gtaccattgactactcttaagatctcacgagcgctgctcagttcaccccacggcgagcgggaatcgtgcgtgacacttaggagaaggtgtgctacgttgccctggacttcctgcgcaagagacttgcacggctgcttcccaagctctccctgtgagaagagctacgagcttgctgtacggccaggtcatcaccattggccatgagcggttccgctggcctgaagagactcttccagacttcctgggctgggcatggagtcctgtggcatacacgaaactaccttcaaatccatcatgaaggtgttgacgtggacactccgaaaagaactgtacgccaacacaagtgctgtctggcggcaccaccatataccccgggctgtcaatgggtccc

SEQ ID NO: 562284 - DNA, 215 bp, Homo sapiens
gggttgccctgcaagctgtttccgcgcgtactgtcccgttctgttccccgcggggtcgtcggcccgaccacagaccgcgccaattaccacccagccagatagaacctccaagggccccggggccgtgggggccttccgcctccgtggggcggcaaaggacttcgagcagcctctctgccattttcccgggtcactcctgggaagcaaggcggctc

SEQ ID NO: 562285 - DNA, 201 bp, Homo sapiens
aaggtcccgcagatgaggctgccagcccttctctgcttcccctccagcacagggaccaagtggggagcctgcagaacctgtcaggcacagtggctcctcaagcctgcctgtcctgcagagtcccatggcatggagcttacacctgactgactggagcccctcccgactccacttcagagctaggaccaccaatactgaaga

SEQ ID NO: 562286 - DNA, 578 bp, Homo sapiens
ttgtccccaggtacatcatcctggtagttgtttctcctttcctctgtggattctctctttcctcataccggtccctgtgttcttcagcctctcagtgctcctcccgtcctcagtgcttgttgtcctctgcccatcccccagttcatacgattcggagtgtatctttgcgcgaggtccacggtgtgggcggactgcagcaacggctcatgggctgtcgagatcagcctggccgacatggtgtaaaccccatctctacctataagattacgaaataaattagtcagggcatgagtggtcgcgctcgcctatagtttcctagctactgaggaggctgaggcaggagaatcgcttgaacccagaaggcggagtgttgtcagtgagctgagatcgcaccactgcacatctcagcctggtgacagagcgtgactccatctcaaacaaccaataaaagttgatgctgacatgacacgccacattgtttatcatttattttcccggtctgtctcccaccacataaactcccgttcttgatttgtctccccagtgggacatatttcatacccgggtagaaagtttca

SEQ ID NO: 562287 - DNA, 369 bp, Homo sapiens
tggccctatacttcactatacattcccatcctgtaccttgactaggaatatagttaagtgctgctcccgatacaattcagttagctcttgtgtttgtatatggtccaacccctgctttactgctcatgctgcttaaagcaggagggactagagaaacaagccattttaggaggcctgtgtgcagttgaaaaccgacttttacacgccttataaaagcagtcaggagatagatccgtaggtttgatccttcacatctaataccaggcgctaatgggaacaaggtttaaagggtcctggtatgctaataattgaacacttagtgacatttaaacttctgcctttttttcctgactttaaatctagattcgc

SEQ ID NO: 562288 - DNA, 912 bp, Homo sapiens
  misc_feature (618)..(618): n is a, c, g, or t
  misc_feature (620)..(620): n is a, c, g, or t
gatggagagggcccaaagcaactgccatttatggacatttcagtggctgcggaacagataaaggcttacttactccaatcataaaagatgctgctgctaaaggtatccaggaaattgctgactctgtaagggctctatcaaagaaagcaagagatggaaaatgtgttgcctgaagaataccaaggaggatgttttagtatttccaactgtggggatgttagacatcgaggaatttactgcagtgattaaccctctctcaggcctgcattttgctggttgggaggtgccagacctgtgctgaagctctactgaggatgaggagggaaatgccaaaactgcagcagaggccaggttgataacagtcacaaatgtcaagtgacagtcgaggtggttgatgacgagatggacaaccaggttgcttaaaagttgtaagagcaaaactagagaatcgtatcgcgagttgggctagtcctcaaagataagaagtgggtgtacagctatagtgattcagtagttgtaaccaggaaacatatgttatgggaaaacaagtatggtatataagtatgaacggggatgaaatggttgattgatttaaggtgaaagcattttgacccaggngntgtcttcattcttgcaatgtggggtttcataatttcatggaattaagtgatgataagtcgaataaataaggggaaagaagaatattggggtccctccgatcactgttactgttggggggtataaggggaaattaatagattggacacagagatattgtggacttcgagctttggagttttggactgttttaactgtcttaaactttgaaggcagtttttgaggagagaggtaaaaggcgaaaaggggcattaacggtaattgaaaaatagagggggaacaacagcgggagaa

SEQ ID NO: 562289 - DNA, 280 bp, Homo sapiens
agtagctaaagtcaaaaatatgtctatatgagtatagctaccctactctttattcactattatctgcatggaatatctatgtccatcttttggctgtcagtctgtgtgtgtcttaaatctaaggtgtacacgtgataaaattggagcttatttttttatttattcattcagccactcagtgtgtctttgatttgggagtaaaatccatttacttttaacgtaattactaataggacaggacttatattgctattttagttgaatattttctctccgtgtt

SEQ ID NO: 562290 - DNA, 854 bp, Homo sapiens
  misc_feature (13)..(13): n is a, c, g, or t
  misc_feature (106)..(106): n is a, c, g, or t
  misc_feature (123)..(123): n is a, c, g, or t
  misc_feature (128)..(128): n is a, c, g, or t
  misc_feature (146)..(147): n is a, c, g, or t
  misc_feature (153)..(154): n is a, c, g, or t
  misc_feature (160)..(160): n is a, c, g, or t
  misc_feature (170)..(170): n is a, c, g, or t
  misc_feature (182)..(183): n is a, c, g, or t
  misc_feature (190)..(190): n is a, c, g, or t
  misc_feature (209)..(209): n is a, c, g, or t
  misc_feature (220)..(221): n is a, c, g, or t
  misc_feature (223)..(223): n is a, c, g, or t
  misc_feature (226)..(226): n is a, c, g, or t
  misc_feature (231)..(231): n is a, c, g, or t
  misc_feature (240)..(240): n is a, c, g, or t
  misc_feature (293)..(293): n is a, c, g, or t
  misc_feature (300)..(300): n is a, c, g, or t
  misc_feature (306)..(306): n is a, c, g, or t
  misc_feature (309)..(310): n is a, c, g, or t
  misc_feature (312)..(312): n is a, c, g, or t
  misc_feature (315)..(315): n is a, c, g, or t
  misc_feature (325)..(325): n is a, c, g, or t
  misc_feature (331)..(331): n is a, c, g, or t
  misc_feature (361)..(361): n is a, c, g, or t
  misc_feature (364)..(364): n is a, c, g, or t
  misc_feature (366)..(366): n is a, c, g, or t
  misc_feature (371)..(382): n is a, c, g, or t
  misc_feature (384)..(384): n is a, c, g, or t
  misc_feature (386)..(386): n is a, c, g, or t
  misc_feature (388)..(388): n is a, c, g, or t
  misc_feature (406)..(406): n is a, c, g, or t
  misc_feature (410)..(410): n is a, c, g, or t
  misc_feature (416)..(416): n is a, c, g, or t
  misc_feature (418)..(418): n is a, c, g, or t
  misc_feature (735)..(735): n is a, c, g, or t
  misc_feature (784)..(784): n is a, c, g, or t
  misc_feature (837)..(837): n is a, c, g, or t
gcattgttttttncgggacacctgagtctgtatcggtcggggacaggttccaattggtagaggcctacagatcgatctcagagtcgggttagtcgtcgcattgccnggattcttcttttttgnaacanccgccctttgccctgagnncccttnntctttnttgctttttntttacccctttnnatggttnttttttctctgggcatccntctttttctanngnaanttggncatgggcgnctacaccagggggaggccagtcgtggttccctgctttccacccgggctccacnggcccgnagcccnccnntnctncttcttcccnttgttnggtggggccacatgattgggcgccagggtnttngntgttnnnnnnnnnnnngntncnaacacagccatgtttcantaangcgttnancttcttccctggtgtcccaacctaccagtgccacgttacagcccagagtgagttctacaagcgttgctggcctaatggatgggctgggggaagggggtgggacaggggctggaggaggggctctggggtccatcacggcacaggaacaacacgcatggtgttggtgaagccggagccagggcgccatccggtcagcacaatgaccacatctcccttcttgaagaagcctcgggccttgccaacattcatggcaaagttcacccggaggtccacgtcctcagcccaggcctcctggactgggtccttgcacagcacanggaagatgccacggtacaggtgggcctgacgagctgtctgggggattcngggtcacagccatgatgggggcacgtgggcggtatctggccactggtgagcanactgccatattggtgag

SEQ ID NO: 562291 - DNA, 1156 bp, Homo sapiens
cagcttggaacgagatgctatactaataagcaagtgtaaaaaaaaaaaaaaaaggaggaaagaaaatcttaaggtggattggatggctggttttcttttaaaaaaaaaaaattaaaatccattttcttgggggttaagaggctagagaggaagggcgcccaaggccttctatgggtgttcttctaattctttatggggtataaaggtattgaggtattggtgcatttacccggggcattcgtggtgtaaccgttggggtaatttaaaatgggggtaagtacggggtataccctaagttaacttcattgggattggtggtaaagggagatatttggaggttaacatcttcatattaagtggtgttcatataatctgtggggttacaaaggcttccaaaaatatgtgggggaccaatattgtgtggtaatgtggccaggtggttgacacttaagccatttgtggggttacacaacccaaggcctttgggattacacttagaagggtgggaaaaccaaagagggtggtcaagtataccctcggggtcacgaggaaatcgtggggccgagataagaaacacctctcgtttaagaaactcctaggggggggtgggaccacccttaaatgtttatatttaagacacagggtggcgaggggattgaccttattttgtcaacagaggtgtcccaacgcaatttggggttatcaagaaaatatgtctggggaacagaaccggggtatctgggtacacaaaccattacagggggggaattaggccactagataggatattgtggagaggatcagtgtggagacactttttaaacgggggggaaaagtttagagaaacatagattttgggtggacaacaaagatagtgcccattgaaactttttcaaagaaagttgattagaagccacacagtttctaccacaaatgaaccccctcaagggggcataacttcaaccgggagaaaaactagcgggggagatagaacacaccttatatcatggaacacgcagtagaagcggcagacaaaaactgcggagcctcggggcccccacaaaacggacagggcgtctaaaaaagccccgggcggcccggacgacacgaacccacaccatgagcacaggcatcccgcacgaagggagtgagacca

SEQ ID NO: 562292 - DNA, 331 bp, Homo sapiens
gactactagagctacgctaagcaactgtaatgccctaaatgttcgcagccaggaaggcactgcagagctccagaggtggggcttggtggcctcaggctgggctgacctattggacgccagtcacttccttgggctcagagagcagagagtgtgtgtgtgtgtgtgtacataaggagagccttggttcctagggcccaggcatctgaattgtacttcggggctggccgtggggttgtggcgggctgtctgcaggacaccgtgcacctgtactcattaagctacacacatagcttcatccggatttataaacacacagaggcaggacaagcag

SEQ ID NO: 562293 - DNA, 728 bp, Homo sapiens
aatcctaatccccttattcctttattacgtgtatctcagtcagatgattctatttgatgtccatagtctcatgacttagtgagatagggctccaagctttcgtctgcctaatgtatttcactaatacccatttacttaccatctggtaccagtgagctggtagaacctatcttcttctgatcagtgtcctcagctagcttctacttcaggaactttataatgcgctggcttcccgtcaatcaataatagtaatatgtgtgtgtgtatatatctatatatatatatatgtgatatcatatgtgtgtgatactatgtaagtatatatacatatacatatatacgatatgtgtgtgtagtatatatatatatgtatatatatagagattcgtctagtgtcaagcgagcgtcatggtagctgacacgtttgatgctgctctgaggcaactgtgatatagttatctgcactacaataaggttgcaactataattgctccttaggtaaacgtagaggtagaactacgctgaagtcacacagaaaacaccaaaaaaacaaaagcgatcagcagatatgcacgggccggcacccaagcactcacgcaaaaccagccttcacaaaacaccacataatgatgaccagaacggagacagaaacaaaagaagatgccacaaccacggagcaacaacgagcaaaacagacggagtaccacccgagaaaaacaaacatagcc

SEQ ID NO: 562294 - DNA, 915 bp, Homo sapiens
gccgttcgaaactgctccgtaggggcgcgggctccgtgaggctccacctgctaagacccgtccccctgcggtcgctcccactggtcacagtttcgcgtctgagagtgatctgacagcttcgtattgcattgcagattgtggatgcagccgcattccccaatgcaaccccctgcgcgcttggtagggggtagaaaggtgacatgagagtgccgctgtgggtcggggcccccgtcactccattggggacggctagatctataccctatcaggagtcttgggtcgtgtatgtcccggagccggaagactccgtgagctaattgcccgatttccaagggtttaatgactatcgtccctgatcaaagtactgtcggtgttcaccgtgtagtaattcagtaatcggcaaggtgatcgcgccgcaattggaaggtgtggcctagcatctctccttggagcgaatgggaggaacactaagccttgaaaaaacaggccagatggcccaccaatgaacgggaaccgctcaaacaaagatgcctggtgcgttggaaccctgaaacgggtatggatggttgaagggaaggccaaggatcccttccggcttcgaggtggaaaagccacaaaatgcgcccaggagcgggtcccaagaatcgagacgttgaaacggtacgttctaaaggcccaagagaggccactccctgggctccaaggccgggaaaaacgctggccgcgtaacaattcctttccctggccagagacccgaattcctggaatggccttgaaaatccgagtgcggtatttataccttgaacctttgtgggctttggacttctgggcaactgactggctggttgccaacacatttgatacctcttggtaaccctcttgtgacacctacagcttgtaatggccgcccgtgat

SEQ ID NO: 562295 - DNA, 252 bp, Homo sapiens
  misc_feature (23)..(23): n is a, c, g, or t
tccctttttttttcccttggccnaaaaattaaaaaaagccttaccccccccccccccctggtttagaggccccctcatttttcctccttggggcagttaaggatccccgcccttcaaaaggacaacatcagctcagcaggaaccccggcccccccaggaccccgggtttacaatttccccggggttttttggggggggcttcccttggaaaggggcccctttttttaaaaaaaaagggttttcccgttttta

SEQ ID NO: 562296 - DNA, 1242 bp, Homo sapiens
  misc_feature (524)..(524): n is a, c, g, or t
gcggagagagctgaggaggctgcgtctggctcccggcctctcacagccatgcagtacattgagctccatagaaacagggccggggcaagtgagagccggacgggcactgggcggactctgtgcctctgctgaggaaaggatatacctaagacagtgagtgcaataggagatccttaatgaatgctcgagcaggtcagacacatgtcaatcactactgcattgtttctgtgcaatgttggtcgcggaggagcagtaagaagaagcacccagatgcttcaggatcaaccttctcagaatgttgtcgtgaagaacgctgcatcatgagaagcgttggcaaggaccagtgctctgtcgtaccacgagaaacacggaaaaaactatctgaccagactcatgggcgaggacagtcgtgacccaatggcgctcggtttagtgcacaaggaacgacaattgatcaaacacgtattagtcgcgcattcgcacgaaaaagcgtgggaaggcagcaacatgagaaggacaaggtntccaaaggcaagtctcccttaagtggcaatccgcaagaggaaagggacgcatcgcgtatcgggggggctttcattttcccgtcatctccttagcgtcatggaaggttagtccggcccaataaataacttcaacaagtggacgaatacattccatggcggagccttgatcgccatacttgcgatgaaattgtgtttgccgaacaagaaatgacctgaggaacgaagaagtggtggggaaagtaggccatctattgtcgtgaggcaacgttacatagacctacgccggacatggccccctgtccatgtgcagcatcacatggaaaaaagggccatggtttgcacacagcctatcgcagaagggcgacccaaagataggatagcggaaaaaaaaacggggtacctcattgaggcgtcgacgtttagtgccgaacgacctataaagggcgtgcccacggcaccttgggaagtggtcgaaagaccataaaaacccccacggggggggaagtttcccgactccggaaaaggggggccggggcacacggacccaaagggcgaaaagcaaaaaaccaagggacatctggcaaaggcaagggggactggcaaaaacggtaagggtgacctgcccgagccaaatgggccagcgcacagggcaatgttgagcgggagaaggaccacggggccagggaacggaaataagcaacaaccgggaacgacaggc

SEQ ID NO: 562297 - DNA, 165 bp, Homo sapiens
cgacattgggttacaatgcctcctgctctgaatattctgtagctgtagaggcatttgaatccctttgtcctccagcatcccttcactatcctcatcctctctaaccctcctttttctattttttaatgctacaggccctttagtccgggtaccggagctctcaat

SEQ ID NO: 562298 - DNA, 162 bp, Homo sapiens
  misc_feature (3)..(3): n is a, c, g, or t
agnacatactggctcccccttttttcaagtgccttaatagcaggacaaactgtagagtcaggagggcaggctagatgctcagccacaagacagcctttactgaaaaagctattggactcttgctctttctagctctgaactaataaatgtcttatcacgctg

SEQ ID NO: 562299 - DNA, 118 bp, Homo sapiens
tgtcagatccatccgggcgctcttccgacagggacttcggcagcttcgagcacattttgtcaaaagcgtcgagtatttctttctcagatcttgttgttgtcaatcgagcttgtgtcaa

SEQ ID NO: 562300 - DNA, 876 bp, Homo sapiens
gaccgccagcgtaggtgctaccaccgttgccgtctccgccgcattttgatggcaggaagagtacggttctgggacggctgtcacgacagtggtggtgactgaaatacatcctttatcaaaggagaacaccggctagttttgcgaactatcttctccagcggatagtggccagatgtgcttttgtaacgagatgccagcactgttgccatatctcccaggatttggctctttagttaagagtgttgtcgatatcccctaagagtcttcttcgatgctggatcatcaggttcgtatgagtctcatgtgggtgctgctcctccaggatatatgctctcgaacagtgtgccctgtatgataatctcatggggcacccggtttggtaccctcgaagatcacgaggttcctacgcgttgcctggctactccttaggtggcgcttgtcaccctcgactgggacctgttttcactgaagaaaaggcctggttcataaaattagcctgagtgttctagcagaagctttacttcaagtgagtcgacgtgaagttgtgaatgagctcaaatatgtgatgtgaagtttccagtggctcatgatgcacctggtggaacaaagcctattagcagtcgcagagagttgactggtggaaaagtgcccggagtacactgtgccattgacagacctgtccaggaatttgttgcggcaagtcttcgggagcactgtgtgccggaagtagtatggcaacctatgtgttctgggtgttctcaaccagtcagataggctgcctggttgggttgacaaagtccacttgggggagatggcttgagaatatatgggcagagaatggtccctccacccgggatgggccgtatgcccattggg

SEQ ID NO: 562301 - DNA, 727 bp, Homo sapiens
ccgcaggaggatgctggtggtggagtgtgtgcgaacggccgctccctgtgtgtggggagccgaggcgtgtgcagtgccctccgtggagcgcctgggtgtggggggcctgcacggtagtgctgccctgccccgcgggccccgccagaactcgctgcctggtgcctccctgctgctgctgatgccctgaagaggcgctggctcttgtgcctgagatctggctgccgtgactctggtcagctgccccgcgtccagactctcgtgcaccacagcctgtgccctgacatccttcaagcgccagcaagaggagagcttccagtgatgcagagctgccttgtgcatgctgagtgccctgggagacccgtcgtcatgtgaggtcctggagaagattacgtgaggtgccatggctgctaatgaagcagaaactagaacagtgcttcagggtgccagctcaatgccagtgaggcctggctcgagccagtgctgccaaagaggattgagaccagtgatggccaggcttcgggagagcaggaggaagctggcccctcgtcttcccaagcagtgaccctcaaatggggtagcccccttgcccagatctgctctccttgtccagctggccactgccaggcctcgaccggtcaaggccaggccctggactggcgtgtccagtctaaggatggcccaagcggcgcctgccagaactgggctaagtattacagagaactgtgga

SEQ ID NO: 562302 - DNA, 739 bp, Homo sapiens
cgaattcggccattatggccgtgaatgccccagctaaatactaccgtatggcccaccataattaccgccatactccttacactattcctcatgacccaactaacaatattacacacagactagcacctacctagctcaccagagcccatagacatacctgattataacacaccctgagaaccaatatgaacgtcggatcgctacattcattgcccgcgcaatcctaggcctaccagtcacagtactgatcatactatgtgcccctctattgatcgccacctccaaatatctcatgaacatccgactaatcaccacccaacattgactaatcagactaatctcaaatcagacgatagccatacacatcactaaaggacgaacctgaactcttatactagcatacttaatcatttagatcgacacagctagcctcgtcggactcctgcctcactcattgacaccaaccacccaactatctataaacctagccatggacatccccttatgagcgagcgcagtgattataggctatcgctctaagagtaataatgccctagcccactgcttaccacaaggcacacctacaccccttatcgccatactagttattatcgaaaccatcagactactcattcaacgcatagccctgggcgtacgcctaaccgctaacatactgcaggccacctactcatgcacctaattgtaagcgccaacctagcaatatccattccttcgctct

SEQ ID NO: 562303 - DNA, 747 bp, Homo sapiens
gagatttattgaaaatgaaagtacatttcacaatgtgggagtgggcccaagtgtaggggcttaagggccccgctacagaagttttgggagtttaaataccctctagaagattccattggttacttgggcgtatgccctatataagtgaagaggatgaagtaaagttataaactcatttattcggcatatgtcctatggagaggatatttcctgtcatagctgaagtgtcaatcgaccttcagttccctgcctccagaccctattttcctgtctcagtaaagaaatatgttcaagcactttgcagaacaaaaaataggcatcacaccatagattgaacataataatggagaaacagactgaacgataagcaacttgtcccgtataagccagtcaaaaatagacaaagtatcaatacgatctaagcatatcttaaaacaaaaagacagatacaacattacgttaaccatgtagactgctattttatctgttacagattctctctcttctattattttttctggggcaacacaagtttggctacgagtggccccaaaggtgtggacttccaggtggcccacacctccggactaagcgtgaaaacatcacggactccaagagcgcctcaagtgcacatcctctcgcgccctacacgccccccctcgacgacagcgacggaaccaactccagacagcccagcaacacaacgcgcctgggacaagactctcggggaccttacaaggctcacct

SEQ ID NO: 562304 - DNA, 127 bp, Homo sapiens
agcagagaggaagggcctcctgaacaacctgcctctttggcaaagcaggggcttcagaccctccgactgtgcctcccgcctccacccgtcacactccaggtgaaaatccccaggggtaccgaagctc

SEQ ID NO: 562305 - DNA, 589 bp, Homo sapiens
  misc_feature (467)..(468): n is a, c, g, or t
gccgcagcagcacccgccgccgcctcgtcctcggcgtcctgctcgcgcaggctcggcagggcgctcaactttctcttctacctcgccctggtggcggcggccgctttctcgggctggtgcgtccaccacgtcctggaggaggtccagcaggtccggcgcagccaccaggacttctcccggcagagggaggagctgggccaggcttgcagggcgtcgagcagaaggtgcagtctttgcaagccacatttggaacttttgagtccatcttgagaagctcccaacataaacaagacctcacagagaaagctgtgaagcaaggcggagagtggaggtccagccgggatccaccgacagtgctggcaggaaacctccaagaatggagaattcctcaaaacgacctctcgcgatggggatccatggtggtggaaggaacgccccgggagcggggactttcacggtcccctggnnagaacaacggtggacgcgagcggctgacgggagcttcaccgaaatcccatcaacggacaaacatcgccatcttcacagaagtccagaagaggagccagaaggagatcaatgacatgaaggc

SEQ ID NO: 562306 - DNA, 440 bp, Homo sapiens
actttcagagttctcggagtttccgggaaaaagagggcccccacaccccggttggggggaaacagggcacacaattgggggcaaacccactacatcctgagaacccgggggccccaaacaggggcaaactcctgcggtaaaagggggacaatgggggccctcccccccttaagaagggggcaccgttttcccctctgccacctcacaggcacacagcgcgcccctgttggcaccagcagcacagatgtgtgtggagagggggagtctcctcctcagagagattctctttgtccgcgggggccctctctctctctctgcacctttttttggcgttgctctctctctgttcgctcacccgcgggtcccctttttgtttttttgggggagtccccccccccctttttaatatttttttttccccattggggggggaagaggga

SEQ ID NO: 562307 - DNA, 234 bp, Homo sapiens
ccccccccccccggggtttttttccccccccgcccccggcccccttttttacccccgggcccttttgtggttgggggcccccctttttttttttggggggcggggggggaccccccccccccccccctttgggtttttgggttttttcggggcccccccccccccccccccccctttgggggggtttttcttttttccttttttccccccgggggggttggggggggtttttta

SEQ ID NO: 562308 - DNA, 453 bp, Homo sapiens
  misc_feature (36)..(36): n is a, c, g, or t
  misc_feature (108)..(108): n is a, c, g, or t
  misc_feature (139)..(139): n is a, c, g, or t
  misc_feature (147)..(147): n is a, c, g, or t
  misc_feature (151)..(151): n is a, c, g, or t
  misc_feature (157)..(158): n is a, c, g, or t
  misc_feature (162)..(163): n is a, c, g, or t
  misc_feature (175)..(175): n is a, c, g, or t
  misc_feature (179)..(179): n is a, c, g, or t
  misc_feature (189)..(189): n is a, c, g, or t
  misc_feature (222)..(222): n is a, c, g, or t
  misc_feature (224)..(224): n is a, c, g, or t
  misc_feature (230)..(231): n is a, c, g, or t
  misc_feature (285)..(285): n is a, c, g, or t
  misc_feature (289)..(289): n is a, c, g, or t
  misc_feature (307)..(309): n is a, c, g, or t
  misc_feature (321)..(321): n is a, c, g, or t
  misc_feature (418)..(418): n is a, c, g, or t
tgtttatatatatatatgcacagagaaaccttagcnaacaaatccctgagtccatgggaaccaggacactaacaaagggaaaggagagtccatgcctaaagagtaggnaatatggcaaaatctttacctttcctcctgnatccctgnaacngagggnngggnncagatcactacnaatnaaaaaaacgngggtttggggggggcaggaaagtggggtgagantngtaggnnggggaactcagatgccaccagtctgggaaagtaaaacatttgatccagcatganagcnaacatgaccgcagaggannntttccagactgntgggcatgctgctggcctttggtatatgccaagcctttgcttggtagccccacgcctgggccagcacaacaaatagcacctgtggggcctataagcngggaggggatgggggagatagggactggggaaatg

SEQ ID NO: 562309 - DNA, 342 bp, Homo sapiens
attagaggatccgcccatggtagatttccacaaaagaacaagacaatgatatgctctcatatccaaaaaactaatgggagctggggactttagatgtaacataccataggtttttttattttaaaacatgacaggctgggctcagtggctcacgcctgtaatcccaacacaatgggagtgcaaggagggcggatcacctgaggtcaggagacaagcctggccaacgtggtgaaaccccgtctctactgcaaatacaaaaaaaaaaatttagccgggcgtggtagtgggcgcttgtaatcccagctacttgggaggctgaggcaggagaatatgaaccgtggg

SEQ ID NO: 562310 - DNA, 196 bp, Homo sapiens
ctcgatagtacagccattctcatccaaaccccctgtaagcttcaccggcgcagtcattctcataatcgcccagggtgcttacttcctcattgactattctgccctagcaaactcaaagctacgaacgcactcacagtcgcagcatattcctctctcacggacttcaaactcgactcccagtaatagttcatgctgt

SEQ ID NO: 562311 - DNA, 235 bp, Homo sapiens
ccgctatatcccctataagtcccactcgtgagagacactctacgtattgactcgcatcgaagcagtatcaatcacctgtagctcaccatagtctaatagagaaagacgcgataacgcaatctaattcaagcactgcttattacaatttcagtgtgtcatctatttgtaccctcctacaagcctcagagtacttcgagtctcccttcaccatttccgaaaacggcttcttcatcgg

SEQ ID NO: 562312 - DNA, 169 bp, Homo sapiens
  misc_feature (7)..(7): n is a, c, g, or t
  misc_feature (18)..(18): n is a, c, g, or t
cttcatnttttacctttngcataggaaaagatacaaaaatattctttcaggtagctgttttagcgtaagagctatagggcggactgaggaagggaggaccactttacccttccttaagggcctcacaatttcctccagctccattttgatctcttgttttcttctcatt

SEQ ID NO: 562313 - DNA, 567 bp, Homo sapiens
  misc_feature (269)..(269): n is a, c, g, or t
  misc_feature (293)..(293): n is a, c, g, or t
  misc_feature (454)..(454): n is a, c, g, or t
  misc_feature (483)..(483): n is a, c, g, or t
  misc_feature (506)..(506): n is a, c, g, or t
  misc_feature (531)..(531): n is a, c, g, or t
  misc_feature (541)..(541): n is a, c, g, or t
ctcagaccggccgacacttaggaaaaatagaaagaacctatgttcaaatattgtgggctggttcccctgatagattggaaaagaatgagaccctgcaacttggaatggggaggtatgggaggacactggtgaagctggggtcactgactttgtaaactccaatgaactttttttgccagaagaaacaacttcctccccacccagtagtggcagcattccctccctaacccatgctgccatcagcctttccacctttgtctgaggggggntaaactctgtgctgcctgaggaantagtgatggcctcccctgaggaagttgccaagcaagataatgagaaataataatcagtacagtttggctctcagaaagccacatccctaggaaaaggggaaagagtactacatcagggggaacatcccatggggaaaaaaaggaatctggaacaatagccntgagccccagattcttccctcttaacatnagcctacccaatgagaagggacnaggaaacgattctggggaatatggncaaaacaggntggtttaaaacctccccccaaaaatt

SEQ ID NO: 562314 - DNA, 151 bp, Homo sapiens
agcccgaggaaggggcccaacagcaggagcccaagtccaacagaattgggaagagggaagggggggataagaagttccagaaggcacccgtgaccgcaatatcgaaccctaacctccaggaagggccattgttaaactggtagccccgcca

SEQ ID NO: 562315 - DNA, 162 bp, Homo sapiens
tgtatatcagtacagaaagacctttgagcgagttcctcatagttggcagaggatcaggcaaagtcgcaagatgtgtttcaaaccctctcatttctgcacactatgaggaagcaattagatgacttccaagcccaacattccgaaaatttcaaaggtgaataa

SEQ ID NO: 562316 - DNA, 197 bp, Homo sapiens
cgctctgctcgggctcggcgcgggcgtggctgctcggcctggtgcagcagcaggttgcggttcggcaggccggtcagctcgtcgtagaacgccagctggcggatgcgggcgcgggcctcttcgcgttccagcgccagcgcgcacaggtacacgcagacgtccaccaggcggtggtggaagtcgtccggcaggcggcg

SEQ ID NO: 562317 - DNA, 221 bp, Homo sapiens
taagtactgcagaggtgtcgagctctcatgggacgcgtgcagctcatcgtaccagcggctgggtagatacttgtgggggacagaacacgaattcgatttctgggggtctccttgcaacaggaaaacaaccttattcttccaaatgagaaagacagacccactcatcacaggcagcactgaacacccgaggcctccccacagagagagcgtcgggtaccgag

SEQ ID NO: 562318 - DNA, 210 bp, Homo sapiens
accaagtcttgaaactaggagactatgggcttgcgcactgtgagtagaaggcccttttatacacagtctgtggcacaccacttatgtagatccagagacaatgctcagtattacatacatacacagacgatggaagtagccacttcttccctgggcggtgtgggtttccccagctcttccacacgtgtgttaggaatgcccgtgaacttg

SEQ ID NO: 562319 - DNA, 296 bp, Homo sapiens
aatgtttgatattgtcaggaggatttctcacgggttgcatagggcccgtgatcgtgtagttatgtaaaaagccatagttgagttcaccagttcataagaattgaatatcccaataggataatctttcacaaacttggagagagcaggtcagcatttggaggcattagcagagtgccccatgagcagtagaggtcataattaggtccgtggactaaagcgccgaccgcagggctcacaagatgtgcgcaaatcaaagcgtgtgcccttccccttccccttctccttcccttcccccc

SEQ ID NO: 562320 - DNA, 324 bp, Homo sapiens
cacgaggtcctcggtgatctgttcggcggtgcgccggaccaggcgcagcggcgcgaggatctggccggagacgatccaagacgcgatcccggccagcagcagcccgattccgctgacgacggccatcgtgcggaccgtctcctcgacgtcggcgcgctgggggtcgacgcgctccccggtgatgagatagccgtccaccagcgcgtcgtcgcggttgatgagggtgcgcgaccagcgcagcaggcccgccggggtgacggtctcgccggtgtcggcgaccgtggggtcgaggatctccgcgagcacctcctcggtgatcgccgc

SEQ ID NO: 562321 - DNA, 237 bp, Homo sapiens
acacaaatccgaaccacatcgccaactcgaaataacttctgtctgtggtataaggtaggagacaacattattattttccatactgatgtctagttgttcaacaccatttgttaaaaagactttcttttcccattgaattgctttggcacctttgtctgtatattaattaaccatacaaggatggatctattttggttactgtacttcttttttataatgctatcccacctctagtgt

SEQ ID NO: 562322 - DNA, 976 bp, Homo sapiens
gaggaatctcttgcactaccgtgatcctggattcctggctctaccctgtccgtccctttgcttggacgcagcatctgtcctcttccctgaacgttctcttcttgccctggactaggcgaggctgccttggtgtgtattcagagggcagtgatgacttggttgtccaggcaggtccctcctgcatagcagaatggtcgaggggtgcgactagaaccaacatgcttctcgtgtttgaaggtagagcgtcagctgtcgacattatgcaagctgtgggcctcgcggagagtcatccatccttacacgccctggtgctttccctgccatactgatggctcaagcacaaggcatggataaagcctccccagaaacatctctggcccagaaagcctctactcatccctcgcctcttctcatgaggcacagcccaaagccaagtcgctcaatgtgtgacgtccatgtggcgtcccaagaccacagagctgaagacgggtttattttcagtcctcgcgtctctctgggtcagaaccagagggcatgcgtgaatgcacctcgctgcttacttggtgagggtgccccgccatgagtcgagtgcctctcagactggcagtgcaatgcgttgtagaagtaggaggaaacagttctcactggggaagaactccagggcggggaatcccaaagtggctcatctcgaaagggagggcctgttgcccctgggagtcagggttgaactgacaaagttttggtggagacctgggcgattttgagatacctataatagccgtgctgaaacacgagctgtgtgatgcagtgaaagcataatcaggattacctacaagcgtagaggcggaccataggtgttccaagtctggaaagaaaaccaaaaaagggaattttgggaaacttggggccaatttctggttcctgtaaggttagtcttaaaagcgaaattgggttgggcgtaattaaaatgggaagt

SEQ ID NO: 562323 - DNA, 355 bp, Homo sapiens
attttagggaaaatttaaggagcccatttttaaaaccggaagaattttggttttggggaaagattgcccaaaattttttttaaaattagttaggcccctttgttttattccccaattgataaaggcctgttttattttttttttggttaaagggaccatttttttttttggggtttttttatcaaatttttttttttggaggtttgtttaattaaaggagtccttttcttttagggccatgtaagtttttatttttctgtaaggaaggaagggccccctcctaaaatttgtttttttacccataatgtctgttggggaatgggttgtggttaaaatttaaagttggggtggggga

SEQ ID NO: 562324 - DNA, 191 bp, Homo sapiens
aggcgagtaatcctaccgagtcctcggctgatagctggttgtccaagatcagaatcttaggtcaactattgagtatgcccacagaaccctctacatctccttgtaaattttactgttagtccatagaggaacagctcttagcacactaggaaaaaaccttgtagagagagttaaatatttaacacccattg

SEQ ID NO: 562325 - DNA, 336 bp, Homo sapiens
cccccatcattgcagcctagtgccaaactttgtcttcatgaatgagagctagtttcctctcaaatcatgatgctttaactgtttagtttccaaagccaacatccaagataggaaatcacagcatcaataccaaagcacaccccaaattataacaaaatgaagacatactgcccaccaaacttcttttctttatccctattgctagtgctagggaacaggtactaataagacagcaggtgtattcactaatttttcttttttcctgaagctggcccacagataggacatctgatttaacccgatccattgacaccgttcagggcagctgaatccgca

SEQ ID NO: 562326 - DNA, 135 bp, Homo sapiens
gttgtcagtgagcgttgtcagtgcagatctagagcattggttctaaaagtgttgcctggaatcttgttagaaatgcatatttttggaccctgacctcaaactcctggactcaagcaatcctcccactgacaacgg

SEQ ID NO: 562327 - DNA, 149 bp, Homo sapiens
gaagtagattcttctccagtccagccttcagatgagaccccagccatgccaacatcttgattgcagccctgtgagagtccttgaaatagaaccatttctgatctcctgacccacagaaactgtgaaataaatatgtgttaaggtaaaaa

SEQ ID NO: 562328 - DNA, 157 bp, Homo sapiens
cacaaactccacctactgccccccccccctcttttttttaagaatggcctgatcatggctatttcagccacattgttggcaatttaatttatttacttccttttttttttttaagaaaggaaaaaagaaaaaaaaatcaaacttgaaaaaaaaaaaa

SEQ ID NO: 562329 - DNA, 162 bp, Homo sapiens
ttttgacggcagatggctaaactcacagacatacagtgcagaagttgcaaacaatgagggcagctctctgtgtactcccaggcatctccctactgttaaatgaagacaaaactaatcaataatgtttaggacacaatagcatttcaccactatcgtatagaa

SEQ ID NO: 562330 - DNA, 121 bp, Homo sapiens
cgtggttccttgcagaaggtgttggtgactttcattcactcactcactatatctacaagtagtttcctatgggtgcttctctcttactagtgagtctagcaagggaacccgacgcggggta

SEQ ID NO: 562331 - DNA, 205 bp, Homo sapiens
ttgcagtgagagagattgttccactgtactccacactccagccttggtgacagagcaagactttgtctcaaaaaaaaaaagaaaagaaaagaaaaaaagaaaatcctgtcagtcaggtgcagggttcacaccttttaatcccaataaacttgggagaggctgaggcagagaggataatttggagcccagggagtttggagaccat

SEQ ID NO: 562332 - DNA, 620 bp, Homo sapiens
  misc_feature (71)..(71): n is a, c, g, or t
ttcttccaggtgcatggagcatgctgtgggttgaacactgatccatcaggattgatgtaaggtgcataatnagagcagggtctcatgtaacctttaactgttcagccaggaccataatatcacgagcttctgctgcagaatccagacaagaaataacatcttatatgctcttttcattcagagagttatggagttttgtaagagctactgtggtttcttctgatgattgacttaaaattttctctcttatttcacttgtaatgtctgcaggatcgtctactgccatcgttaaatccgaagctaagcagttgagaataaggttagtaagatcagttcacactgacttcagcaagtgtttggtaagagcagcttgtgtgtcatctgcagtaaacttcatcccgttttccaatagcctaatgttattgtacaggtttgaaacttcttctagcaagtcgttgactgtgcgttttctggccgtctcagaagcagaagttgttgaagacatgaatactgaacgtaccacctcgagataagttttagtaagaggttttattaagtactcagcaagttccgtaatcaactcctcaggggcatcttgtatgtgttatcttagaaaatct

SEQ ID NO: 562333 - DNA, 368 bp, Homo sapiens
cttacggccgatatatacatctgcgaagagtagagtcagagtcatgtctttcatattcccatagtacatcatgtctacaacacttcagcaatagcaaagcaatatcaaacagaaatataagtggtaataacaacaagaacaacttagggtttaaacaattgggaacagctaggcagtggagcaacggggggttgtttttggtataagcatcatactaccttgttacattaatcttatgtccatgatattgctttgataaaaataatacattagagaaacaaaatattaggatcattttcacctgtccaagctctacatacagatcggaagtattgactatgagcttactgatctgattcttcatgata

SEQ ID NO: 562334 - DNA, 164 bp, Homo sapiens
gcacttgcatgctgctgtcgatctagtaggatccccattggagcactgtggcggtggctgaatgtgccccgctccacggttctggccgctcagccgaatgtgtgatgccctccttcaggagcgagccaatacgccatgatactccgctacgagcccatgtccac

SEQ ID NO: 562335 - DNA, 661 bp, Homo sapiens
gtcagccaacaaggtagctataacctctgagtagctgagacagaggtactcaatagagccattcctatgagaaacgtaagtatctgctgtttaagacgcgctaaggttatagctaatgtattatgccataatagataagttatatacaacctttatcaaataataagagtaaccatcatcagtaatgagacaaatcaaaaaccatggcccacccaacagaacataatgaggagagtacagaatggcttctgggatatttctgacaaagatgtatatgcttcattcatacatgaggaaacatcacacatactcaggatgggagagccattctaaaaaataactaggcagaagtcttcaaaaatattaaagtcacggaaaccaagaaaaaatatgaacctgtttcagattaaaggaaactaaacagacctaacatttttaatacaatgtttgattttgaacttgaactttttgttatataagacactattgagacaagtgctaatgcttgaatagggctgaaggattagattataataatacattaatgcaaatttcctgattttaaacatagtagtttgattgcacaaggagaatgtctttatgtgtgggaacataaatagtccacattctgtcttcaagcttctgagaaaactctgtttag

SEQ ID NO: 562336 - DNA, 549 bp, Homo sapiens
cagggaggcggatgcctattggcgtccctcgagcaggcggaagcccaattgggtgggcccaggggtggtctcataccaggtggaggagccataatgccgggaggtggggtggctctgccgaggggtgggggcggagtgccccgtcctggtgggtactgtgtgggggctccagcaatactggcagtcgcagcaccagcagcagttgctacatgtgcctcttcccggtggagtcattacctgcggggatggtcccccaattcctcggacagggcctgccaatccagcaggggcctgggggaattgggcacaccagcgggtactcctctaccagttgccctaccaagcccagggcctccagcagctccagcaagtgttacccgagcattgccagtatcttgggggggtggccctccacagtcatggataccaagttctccccaggcagcaaaaccagagccaaaagcggcttttctacaggctctggtggcttcgcattctttgactggatctatcttgaactcatcacaatcacagaggatcaaattcata

SEQ ID NO: 562337 - DNA, 992 bp, Homo sapiens
  misc_feature (890)..(890): n is a, c, g, or t
tgaatggaatgtaacccgtgtgattggtaatgccagtgacccatgctgtttgtggttcgtgtactgcatccgtaccaccaaggtcgtctgacactggagaagccctggggcctggcctcgttccaggaatgtctacacatagtgggcgtgtagtcgtaacgtggtcctggtggagccgagctgggatgactgtatgctttctcaaacccggctatggctggagcaccatttggtctccagattcatcgttacataacgggaagatagaaagtctgtcgaaggaatgcagccattggagggctatgaggtgatagtctcattccctggtggtatcacatgtggggctattaattgtcgaacgaatgtggtctgccgatgggatgtacggacggtgaggtaatccgtcgcttaggtgacagcaatagagtgatacccaggacaacgtggacatgcatattggtatcaaattgcttccaaagtgatccatccttggaaaccaattccaggtccagaatatcccacccggtgaatgaccctttcgttgtttggcaatgccggtcgggttccacattggttgcacacgttgtcgtctcgaagcgtgaaggggaaaaggattgatccgccgatcctctggttcaaaagttggaatatggcccttgaatgtctgtaagtccgggagaatgcaggccatgttagatattggtgcctgtagcaaacgcccatgtttgtttgagagcggtgtcataactatccacccttgcggatcagctggcagtgccgggagaatagagacagcacgtggcggtgggtgtcatcacacagcaggtggacatgaaagggctgggggagttggaaaaggtttccacttttgtcccgaagtgcacaaaggnatatggatatattcctatagtctgccccccccggtcacgggggacacgggcacacacgaggtctggcgcaagtacggaagaacaggttgaagcctcgtacca

SEQ ID NO: 562338 - DNA, 248 bp, Homo sapiens
tctagatgtcacaggctccatgctaactgatattatggaggtcagcacaggtgctcactgtgtcgatggaacttgtacagggaggcatgcaccgatggtggtgaatacacgtcgaccaggctccagctaaacgatatttggaggtcagcatggtgctcatgtgtcgacggaacttgtccagggcggcatgcatcgcagtggtgaatacacgtcgagctggaggcatgcatgcattggttgggaactgt

SEQ ID NO: 562339 - DNA, 806 bp, Homo sapiens
gacggagtgtagcgttgtgctgtcggcaggaattatctttcagggagctggaggctgcgttgttagtccgttggacgagtattgcccagttggaggctgaaaagtacaggctacagtgcagctattggttcatattcttgtcatctcgaggagaactctcaggaatgacgcttgagtaggccagatgtcgcatgttaagttgtccaataattgtgatcttcttaaataggtgggagttagatgggggatggtggcacaactatttggtcaacttacgattggtcacgtatgtgactgttacgtgttggagattggggagggtgggatgaacggtaagatgctttagatgtcactgatttgctagataaagctctagtgccaagacgaacttaaagtcgtgaggaactgggactagcatgtccagagagatatggcaatctttccaaggtctggcacatgtatacttcgcaaaatgatattaagttctcctgtccccaccaagttttgatattgggagaaaggctaggggggataggttgagatattgagccgatctgggtggtggttacccaagctggacagttgagcttgggcggcagaggggaaacacggtggttcagtaaacttgcgataactggaaattctggtgtatccgattccaaaagtaataggacgctattggggggtgacacggcactggtgattggaacctgggggggttgggtcctgggcctacttggggtgaaaattaaactaacaatttattgggaaaattggcggaagtcgttgggcttgggagtgtgtgg

SEQ ID NO: 562340 - DNA, 286 bp, Homo sapiens
tgagatagagtctcgctctgtcgcccaggctggagtgcagtggtgagatatcggatcactgcagcctccgcctcccaggagaattgcttgaacccgagaggcggaggttgcggtgaggcgagatcgcgccgccacactccagcctgggcgacagagcaagactccgtctcacaacagcggaccacaaacaacaaaacaccttgcctatggagggtgaaaaagccagcctttggggaaccattttaaatttttaaagacccccccccatttggaaaaatgggggggg

SEQ ID NO: 562341 - DNA, 1128 bp, Homo sapiens
  misc_feature (383)..(383): n is a, c, g, or t
  misc_feature (869)..(869): n is a, c, g, or t
taacccctctttagcttttaatgccctcaaaaaccaatttaaaccccccccccttttaacaggggggcagtgacaaaaggcaaagaacgcacggaacccagcctgtggaggaccaccagcgttcctgtgccccccgccatttttctcgcccgtgattgggatttgtggttttccatctctgtgtctcccttgttggcttggggttggagttgtgacggctgtgagacgccctcctgtgggggcgcactgtgggcccactgtgagagccccccctttgggagagaaaagtctcagagagggggaagtgtggacaagaggcccagtgtgttcgcggacccgtggtctatcttcgtggggaaccgagtgtgcgtttgtgtgtctcnccacgagaagagtctcccgtgaagtggccggaaagtgggaggagcgtttgtggggccaaagagggttctctcctctccagagggtgtgtctcagcagagaagagtggtgtgctctcagagaagagtcgcccacacagagggagaggcgggcgctcccctgtggggcgtcgtgcctccctgtgagcagcgcttgtgtcgcccccgggatagcgtgtcaaaaaaggcgggctatcacccgagggtcgtgttttttttaaccaccgagagagggggtgtttcccaattgcgaacccacgaggacatttgctgcaccttgtggggcccccccgcgagagaagacccccaaagagagggatctcagtgaagagtaaagacggcgcatatagcacgatgactaccaacacaccgcgagggagtggcacccacaaaggggagcaatgacgcagacagaggaggcaaccacagcgacgaaccacatctgtgggnaagacgggtttataacaaccactcttgcagggcccccccccacactgttgttgtatcccccccccacaataatatattagagaacaccccactcttgttgcgacaacagcctaatgcctaccgagaaagatttaaaacataggcttataataagaaaggcggccctgatgtaaagacgatctatttctggtgaggaagacaccccagagggacaatataaacagagggcggacctatcgacgcaaattttataaccccc

SEQ ID NO: 562342 - DNA, 772 bp, Homo sapiens
aagcagcagtggacaggacattcaaagcgtgtggatggtgccgtcactgatcatatccaggctgctgaagccatgaagggaacagaatggttagacccagaggaccccacagccattgctgagaatgagctcctgggagctgcagccgccatagaggctgcatccaacaagcttgatcagctgaagcccctggccaaacccaaggaggaagatgagtccttgtactctgaggagcagatactcgatactgccaactccattgcagcagccaccactgcactgctaaaggctgcgtcagatgtccacagagaactagtggcccaagggaaggtgtgtgccattccagacaatgcactgtacgatgggcactggtcccagggcctcatttctgctgtccggatagtggctgcggccaccaacaatctgtgtgaggcagacaatacagctgtgcaaggccatgccagccaggagaagctcatctcatgatcccagcaggtagctgcctccacagaccagatccttgtgggctgcaaggtcaaagctgaccaagactcggaggctatgtaacgacttcaggctgctggcaacgcagtgaagcgagcctcatatatatggtggcagcacacaatgctgcagactttgtagagcaggagaatgatatcactgttggtgatagagagatggggtggcggcattagccacaacattcgagacacgaagaattgctttgttagaatcagagctggatgcgcgcagatactggcccattcgg

SEQ ID NO: 562343 - DNA, 553 bp, Homo sapiens
atcgggacatggggtgtcacgggggtaggcccatcagacttgcggtgaggaccagaagatccattcattgagcagagttcgggcaattaccaggggtacggctaacatcttggacgtctgatcgaatcgcattctgcacgggtaagccattggtcttgtccatcacatcaccctcctctttcaaatctcctagcttatctccatcaaacgtacccttgtccttcttgtcaccttggtcgtttgcatcactgtcggcatccctggggccaaatcctccttttcttagaggggaatcgcccggggatgagctcaacatatattcgaccatgctaacgcctagtccccgagtctccgatcgtgcggacagtacagaatggacctcactgttcacatggaaactctgaccaggtctgctctgcaccatgatgggctgggaaactgaatgatcggatgtgccccaggcactgtctcgccattgatcacccaggaatattcctttggggccatcttgggtggattcatctgtttcccagccaagattgactcatcgggg

SEQ ID NO: 562344 - DNA, 748 bp, Homo sapiens
aggtttaacttgggaattggatgcccaggtccgaaaccatttaagggcctggcccacacatacttcagaatagaattctcttcggtttgtccaatagtgtgaaacaccaccagccgtgtggatctcagaattctaaatggtgtcttaccagactgctgattgctttgctctgcttttcagagcgcgttttcttaatttttagcttctgacctgggctaccccccgaattcatccaagtcttgagaggactggctgcatgtttgaggtctctcaacaatctgcccaaagctcccatggttcctctaagcctcagcagccgattttgtgactgtgcatagacctggattttcagcctccctcccgtaccctaaatttgccaatgtcccccgggtaggagcagctgccagacatctagctcctctccttgaggttttctcctcttgattctcagcctccccagttctcatttcttccatagatagccaatgccttcaaatagatttctatattttatttagctttctagttcgttcttattgagagtgctgatctgtacagagctacattcgtcccccctggaagtcctctcccattatattttgagaatatataattttaaaatttactttccaagccaaagtaccaaagacttcagcagatcataaataccatggacatgtattaccccttggtaagaatgcagaattaataaaattaatccataattaattaaaatgtttgatattta

SEQ ID NO: 562345 - DNA, 535 bp, Homo sapiens
tggagcttcaaatttttttatccgggaaatggccatggcccaaaaccccccaagggcccagttggggggtttgaccgggggacctgaacatgggaagattagggcaaggggaaaaattttcctgggggtggggaaaaaacccaattaatgctaacggcttccaagtcaaagacctttaatttaaatttctcccccaacttcttccaaactttaaaatcccagttttttgaattatccctaagggcgggcgttgacatttcttagagtccaaggtccttttatgttaagacttgggcaaaacctttttgcggtaaaggagggtttcattccacctgcataggttaagcgaaggcccaccgcccgccagatacaaagcccaaacggggaacccgttaaagaaggtgcccccgtggtcggccgcaacggttacaaaaaagggcggttgagtccaaacggcccgagacgtttgtccggggattaacccccccgggccgtaacaaagacgtcccgggcagacccattggagaacagcttg

SEQ ID NO: 562346 - DNA, 150 bp, Homo sapiens
cgtggaggcgcatggcattccgacataagctcaagtggagcatgattgaataaagccctcagacttgacagagccactgctatctgggttgccaagcacagagcgagagcccagccagttctacctcgatagagccgccggatgctcacg

SEQ ID NO: 562347 - DNA, 599 bp, Homo sapiens
cgtggcttggagaacaggcaggaggtagtgttccatggacgactgacaaggtaacaataattccaaaagttcttaggtgcttgagaacggacctggataccttgaagggcttctctggggaccgggtcctgtttttgcctcaccggctgggcccgtcttcactggccaatcccggagagttgtcttctgcccgtactcttggccaccgcttagccagagctggtcttctctcttggcccggctcagttaagaaaagtctccattcctcctctcggagaaccataagggtcataatgactcccattccgggtcactttaccagcaaagagccatgctctgtcaaagagatagtggctctcagcttgctgagcaagtcccttcctaaaaagatcaagggacagtcaggcatgtaccaaaactgatgaatgactttatgtcctcctacagtacaagtctgagacaagcagaaagcttgcttggctgaaacccccgtggctccgatgacgtcaatattctttttggataagggggcaacaagggcggttactagtgaatgttcagcaccgctatctgcaagaaagtcaatatctccacccctg

SEQ ID NO: 562348 - DNA, 264 bp, Homo sapiens
aacgctgtatggtgtctcttcacacggactcgagtgaactttgatgccgtggctcggatcgggggacctcccttaggagatcaatcccccgtctcctgctcttcgctccatgagaaagatccacctacgaccttaggtcctcagaccaaccagcccaagaaacatctcaccaattttaaatccagtaagccgcttctttttactctcttctccaacctccctcactatccctcaatctctttctcctttcaaccttggcgcccg

SEQ ID NO: 562349 - DNA, 814 bp, Homo sapiens
  misc_feature (24)..(24): n is a, c, g, or t
  misc_feature (129)..(131): n is a, c, g, or t
  misc_feature (141)..(141): n is a, c, g, or t
  misc_feature (164)..(164): n is a, c, g, or t
  misc_feature (342)..(342): n is a, c, g, or t
  misc_feature (361)..(361): n is a, c, g, or t
  misc_feature (367)..(367): n is a, c, g, or t
  misc_feature (395)..(395): n is a, c, g, or t
  misc_feature (407)..(407): n is a, c, g, or t
  misc_feature (658)..(658): n is a, c, g, or t
  misc_feature (813)..(813): n is a, c, g, or t
cgggggagagattgaagaggagtngagaatgttttattcatttacaatgtccctttcctggaagggtggacagctagatttaggacaagctaaagatcagtcccctatttaaaaaaaaaaaaaaaaagnnntcggcgagtngtcccgggtgggaggtgggagcngaataaaaaaaaatctgcaatgattcctaattgtttttcaatacagaagcttgggaaggggtttctgccagtttcatgagggaggcacaacttccaggtagtgttggggaagggtatgaggtcctatgcaggctggcctcttatcccacagatgccaagatgatgtctactggcagcncctccaaacttctggctgncaccgnggcattgtcactgggtccaaaagcagcngccgggagcgcnccaggatgtcatgaccaccccggaacacaccagccaggagccacgtgtgggtgttcttgttatccggcactttgtctgacctctcacaagggtgcattcccaagaacttcacaatattacccacagcctcttcaagtgtcttgatggtagacaaggtgaacgtttcctccttctcaaattcatcccctacctcatcccaggctgcttcgaagttcagtttcatgaccttttgaatgtgatcagctacagtnacttccagatctttcagcacatactcatcctcatagccttcgtcatcagtctccccagtggtgggatcacagtccttgacagtgaacttcatcatgcagctgaatgtgcaggccacagctgtggggtcttctttgggcagtgcaccagtgtgtana

SEQ ID NO: 562350 - DNA, 171 bp, Homo sapiens
tggaaacggagcaaggtcccagctactacgggaggctagcggtgggaggatctgcttgagcacaaggagttctgggctgtagtgcgctatgccgggatcgggtgtacgcactaagattcggcatcaatatggtgacctcccgggagcgggggacccaccaggtttgcctac

SEQ ID NO: 562351 - DNA, 368 bp, Homo sapiens
cagtgcttgggattacatggcatgagccagccgcacctggtccaggtacacttctttatactgacctgtcctacgttccccttggacattcagcgtctggagccctgacacttggatactttggggaagagattcagctgccaatgtgctgaggggaggtatttcttcatcctggtacctgataaggactttgccgagcttccgatccagcacttgtgggacatggagtatgcgtattccaactttataaggaagaggggcttccaggctgaaggtcagcaagatgtgagagcagctggtacagtgtcaggcaggggatcacgtggacttgttgaaacgctcccatgcaattggtaaacatggcgaaa

SEQ ID NO: 562352 - DNA, 317 bp, Homo sapiens
  misc_feature (17)..(17): n is a, c, g, or t
  misc_feature (20)..(20): n is a, c, g, or t
  misc_feature (62)..(65): n is a, c, g, or t
  misc_feature (77)..(77): n is a, c, g, or t
  misc_feature (81)..(81): n is a, c, g, or t
  misc_feature (86)..(86): n is a, c, g, or t
  misc_feature (137)..(137): n is a, c, g, or t
  misc_feature (143)..(143): n is a, c, g, or t
  misc_feature (155)..(155): n is a, c, g, or t
  misc_feature (179)..(179): n is a, c, g, or t
  misc_feature (229)..(229): n is a, c, g, or t
  misc_feature (287)..(287): n is a, c, g, or t
  misc_feature (305)..(305): n is a, c, g, or t
  misc_feature (310)..(310): n is a, c, g, or t
  misc_feature (313)..(313): n is a, c, g, or t
cagcaagtaagtaagtngancatcactatgccacacttgagttctgctagggttggaggggnnnnaaggcaggagtnccantctgnagcatacactaagacaaaaataacatgatagtaaaatgatacttcctcatnctactntaaatgtttttncaaaagactatcatattagatggngtacaataggtgaagagaatgtgttaattgtacacacttttatatacctntttaattatatgtatttttaacaaaagataacatcaacacctctgattaaatgaaagnctgaaaacattttaaaanctctnctnttta

SEQ ID NO: 562353 - DNA, 541 bp, Homo sapiens
  misc_feature (241)..(241): n is a, c, g, or t
  misc_feature (401)..(401): n is a, c, g, or t
  misc_feature (443)..(443): n is a, c, g, or t
  misc_feature (449)..(449): n is a, c, g, or t
  misc_feature (504)..(504): n is a, c, g, or t
gtatgtggctcttagttgattgtctcctggatctgggaaggaaggaaagaaaacaaagaggaaatggggttctttatagaatgtggatttttcctacaagagacttttcagggcaatttcaaggtatggcaaggaaatatatttttgggtaaaacattttgattttcttcttgttatgccagagtctgattggaaagtaagtcttgatatacagggttaaataaaacccatctgatgagantttatggtttgtagggcataactccctaagccccttagataggaatttcagcaagataaaaaattagagcttagccaggcacagtggctcatgcctataatcccagccctttgggaggctgaggcaggtggatcatgaggtcaggagtttgagacccatnctggctaacatgatgaaaccctgctctactaaaaatttgaantagccnggcatggaagtgcctgcctgtagtccccagctactgggtgaaggcttgaggcaangaagaatcactttggaacctgggaagtccggaagggt

SEQ ID NO: 562354 - DNA, 249 bp, Homo sapiens
tgaggtgacagaggatcccctccataagtgtgccacaccagccgggtattttttggtgtttttagtagagatggggtttcaccatgtagccaggatggtctgatctcctgacctcatgatccgcccatctgggcctcccaaagtgctgagattacaggtgtgagccaccacgcctggtcgtctggctcattttcttacttttggtagtgatggggtctccctatgttgcccaggctggtcttgaactcc

SEQ ID NO: 562355 - DNA, 1178 bp, Homo sapiens
agcggctctgttcttcctgtctgtttggaacagatggcgttcacgcaaggaaggtaccggctctactagacatctcttccacgtatccaccgtcggacgcacgcagggaagaggcaaaaggcaagagggcaggactctggttagagattcatgcccgtgaatgcacacgtgcagatatgagttggccgttgctggtatgtcaatacgactacactcacacgaggcattatacaagaaacgaacgtgagccaacggacatcttgacaagtatgttcaatggacgttgctataaggcgatctgtgatagatacgaagactgcgggctttgaaagattacgacaaatgcttgacttttaccttttttcccctccaggcatcaacagatggcgactcgactgcctggaccttttcgactgaaagcatcccaacatatgcagactgtgaaacactgattgtcgggatggctcttcgaccaatagttataacacagtgtgactcaatgcgttcaaccgttggggcattgggtggatcgaaggtggcccatggactaacactgagttggggctacaattgcagtaaaagccctggagagacaactacacgtagagaacgtgctttcaaagtgaataacggtttaactccagacatgttgaccagttttgacacagggacacttcacttgttgggatatcatacgaagtttttcaatgtatatcacgcacattgaaatatgataaatttggtccccaaaagggaaattctgtcttcgttcaacattatgatggggccagtaccgagaaggtggcaccttccccttaatggggcttggcattgcgaagaagtttctgggttaacatcgtaaacacaagggtagtttatcaccgcccatgtaaacgtcacttggcagcaacacaggtgcatacatttattccagcccctttttggcaccatacacatggttgttgcaaccgacagtttgccgaagttggtaaaattaaaacaaaatttgcccattcttgaattcacatggtccctaagtgatggagaaccaattgagaaaacgcacgttccaggatgcatggcaaggaattaaccattccaacttggatcaggccgtttgcccacaagcggcacaattaattcggggcgcgaagaattctaacagggtgcgggtaacg

SEQ ID NO: 562356 - DNA, 1000 bp, Homo sapiens
  misc_feature (435)..(435): n is a, c, g, or t
  misc_feature (499)..(499): n is a, c, g, or t
  misc_feature (513)..(513): n is a, c, g, or t
  misc_feature (666)..(666): n is a, c, g, or t
  misc_feature (784)..(784): n is a, c, g, or t
tagtaaaaacagggtctcaccatgttggccaggtctggtctcgaactccttgaacctcaggtgtgatctgctcatctcagcctcccaaagtttctgggattacaggcatgagccactgcgcccagccatagatagcttatatgtgaattcagttgactgtatgtgtatgtgtgtcatattgtgtgaacgtgtttggttgtatgtgactcttgtgtatattatctccttagtgccaattctctcttatatggcgtggtaactttgtgtaaccaacccttataagtctcatagtgagttcctcccgagtttatatctctgccgtcaaaattacctctataattcgtggggataccttggacattgtgcgaaattaacattttaagaactcacgctgggcgattgtggtgcccgtgaaactctttataatatctcagntctcgtgggaagaaacattatctcttttacacacattatgtgggacactcttctcagtgtgaangcgggtcactcganatatactacgtggggctcccaattatagtttatacaagctcttataaagttttctcacccagggtgggtctttccataagaatttcaccctgtggggtatctcccacgatttgggtcgccgtgcgttttcttataaaattttttactcccctnttaaatattttctcaactctgtgggtttgggggtcgcgtgatttgtgtagagctctaacatttgtttttaaacacaccgccttttctcaaacggcgtttgggttatatactcgtctgntacacatttaggaaagatgttggcctctgtggacattttgtcgggaaccatatgttggacccccgtgtgagtgtctcctttgaagtgtgttgtcttgcgggggtaaaaacccccacaggtgggtgtatcttggtggacagggccccctttttaaacgaaacgtttttaaaaagcatttagccgacgttcgattgtaattccttaaagtcacacgcg

SEQ ID NO: 562357 - DNA, 334 bp, Homo sapiens
ggtcgactgtttatgatctcaaaagcctcttaccttaatgtaaaattttggccaggcatggtggctcacgcctgtaatctcaacactttgggaggccaaggcgaggcaggttaatcacctgaggtccggagttcaagaccagcctggccaacgtggtgaaacccatctctactaaaaatacaaaaattagctgggcgtggtggcatgcgcctgtaagcccagctactcgggagtctggggcatgagaattgcttgaacccgagaggcggaggttgcattgagccgagattgcactgctgcactcttgtctgggcaatagagtgagactctatct

SEQ ID NO: 562358 - DNA, 156 bp, Homo sapiens
gatggtaggtagagccattagactaaacaagattaccaaggaagtgaataaaaataagcaatctgagaaatgggccctgggcattccaaatttaagagattcagaagaggaagagcaatcagcagaggggaatgagaaagaacagccagtgtaggt

SEQ ID NO: 562359 - DNA, 623 bp, Homo sapiens
  misc_feature (178)..(178): n is a, c, g, or t
cacgggggaaggttcgacaggacagttctctccctgagcgcatactagtgctaactgtactgtctctatggacttgcctattcgggtcctttcttataaagtggaacgacgcaacatgcagcccattgttttctggctgctttcactgagcataatattttcaagattcacccatgtngtaacacatatcagtgcttcattcctttttatggctgaataatactccattgcatggacagaccatattggtcttatctgttcatcactgacagacatttgggtttgttccattttttggctgtcatgaataatgctgtcagcatgtatgtatgtacgcggtttccttagtttttatctaatgtcattttcctgttccaggatccccttcaagataccacattatgtttagctgtcatgtttctaggctcccttggctgtgacatttctcaggttttcattgtttttactgaccttgacagttttgagttctggtcaagtatttcatgaaaactccctcaattatggtttatctgatgttttcctcatgattaagctgggttatgtatttctgggaggaagaccagagaggtaaagtggcaccgtcatcacatcatgtcaggagt

SEQ ID NO: 562360 - DNA, 186 bp, Homo sapiens
ccccaacccccttggggtggggcagaaggtgaagcatcccaattgattatagattcaggccctgcagggccctataaaacctgtggccatccttgagcaccctgccaccaggtgacctcggccaaattcattgccccccttgggcacccactccccctagaataaatttaacagtgtcccgtggta

SEQ ID NO: 562361 - DNA, 1002 bp, Homo sapiens
gaacacaccaaatggaggatgacgccggtgcgaactaggagagcccgggggccctgtgtgggcctggtgatggggaatcgcggtggcttccgagagaagtgtcgacagtggcattcggggccggggtcgctggccgtggacggtgccatggccgaggccgggagctctgggagcgcatgccgaggatatgagtggagtgcccgtcaccaaagttgtgccggttggtcaaggacatgaagatcaagtcccgtggaggagatctatcatctttctccctgcctattaaggaatcagagatcattgattgcttcctgtggtgccctcgtctcaaggatgaggttttgaatgattatgccatgtgcagaaggcagagcctgtgccgagcaggagcaccaaggttcaaggcatgttgtttgcatatcggggactacaatgtgcgcacagtcgagtctgtggtgttacagtgctccagagggaggttggcagccggcatcctgtggagccatcatcctggtcaagctctccatcgtccccgtgcgcagaggctactgggggaacaagatcggacaagcaccaactgtcccttgcaaggtgacaggccgctgcggctctgtgctggtcaggctcatcctgaaccaggggcactgggatcgtcttccgtcacctgtgcctaagaaggtgctcatgatggctggtatcgatgaatgctacacctcagaccgtggtgcgtgccaccctggaaaattcgcaaggcaccgtttgatggccattctaagactaagttacttgacccgactttgaagagatgtatcaccagttcctatcagagtcatggacactgtagaccgacaaagttcggcaggaatcaagccaacggtgtacacatagtttaccgaaaaaagatagggcaaaaaaacatggcttcttggcacataagccatattttcccaattaggatggccaaagaatacgaagaacagagaaagtacgagaaataaagac

SEQ ID NO: 562362 - DNA, 1602 bp, Homo sapiens
  misc_feature (602)..(602): n is a, c, g, or t
  misc_feature (616)..(616): n is a, c, g, or t
  misc_feature (1131)..(1131): n is a, c, g, or t
agaacgcggtgagcacgtccaggtaaggcctcgaggtacggctacgagagtacaatggttatgctgggtcgcgtgctctgcccaccctcacaagatgcacatcacgtgccgtcgcctctcatcgacaatgcgacactcatttgtcgccgtaagtcagtgatgcgagtcggcgcaagcgtcccgtttgctggttagctttgttatctcgagttgtaaagcaaggatgtaaggaagttctgtcagggggagcattgttctaacttgttggagtgtcagggctgttattgaggtagagtctccacccatggcggtggttgaaacgtaaccatatcagtgtgagtacgtaggactggtcggcgtaacggacctcgcgcgaggagacaggtcgagccccaacaatagcaatggatacctcgggagcaattatcctgtggtacacatggacacaaaacgggcaagagactgtctgtctagcctcgcaaagctgtctaatgcaggaggcacaatgtggttgctcgcagtggaaaatgcgggcagacgcacgaatgaccacaacgttccaatatcaaagcaatccggtgaaggaggtggaagttgaatgnattcgtgctggccncattgttgagttcgctcgggcccgtgttgcgttgcttttgttacgagacccaaagggtgtcgcgacctggagccttgccctaggtggaatccaaacgttgtcccgcggagttagccctcgcgagccgggtgggatccctggcgggctcccgctgcaaggggccaacatgccctagggccctttaggatctcgtaaacaaaaggcaaggctcactataattacacggtaatgcatattccttaatgcgttagcaacgagagcacccattcaggtacaccaggggtgttgtttgtcgccccaaaaattatagaaggtcgaagtgcaaactggcccgttatattagaaatttggtgacaacggggcttggacaccaagagcacgaacacggaggttgtgcgcaccgggaccagcgaaaagcttacaaaaagattcaaattatctctcctccccagagaaagtgggccgaggccacgggaaaaacttatggccaggttgttttcatcccgtccgttggntccataatgatgatacccaacatacgattagtgaggctgcgcatgattgtgaacgtggtgtcaggcgcaagaataactcaagacggtttagagaggcactacgagtgcgtggacactatttaattaacaagagcccgacatttttctactgtgggtggaaaagcaaaggtgtccataccccaggggggggaaaactcatgtggaagatagcaagaagaccctttactacaaaagcgagagttgaggcccagaagcaaaaagttttgccccgacaggaggtcatataccagcgacgagaaaaatataacgggggcttgctagaggtgatacatatgttacaatgtggtacaaaggcggtatataacagagtggacgacacaggagatgatatgattaccagggcgtagtcgaaaaaaaatggtggtatcagagcgagaaatagttgtagtagcagacaatatttttacggtg

SEQ ID NO: 562363 - DNA, 154 bp, Homo sapiens
ctacttagaggatccctatatctgtctcagaagtagaaggagaaaaatcaatgcagcgctattggcccaacatcctaggcaaaacacaatggtcagcacagacttcgactgggccttgtgagaatgcagcagctgaaggggcttttgtgggtga

SEQ ID NO: 562364 - DNA, 267 bp, Homo sapiens
  misc_feature (127)..(127): n is a, c, g, or t
ataggctttctttaattattctacaattatatatctaaatatcaggtctgataatctgcgtagataagcccttatatgcctgggtcctccaggcgcatcccaatctcataatatacttctaaatggnctctgttgcactagatcagataccattctctacttaaaactctgctcatgacaacctttcgctggggagaaaaaactctggtagtcataattccttttataatgatttctttgttttcctgatttttatttcttcaaagt

SEQ ID NO: 562365 - DNA, 155 bp, Homo sapiens
ccaaatttgctcatctgggcgctgcatgctgtagtttgtttgcaggccgactgcagccagcttgatcttgggcgatcacctcgcaatccttcctcctcttctcacagttgatgcgtctgccctgtggaagttggacacccaatggccgtcaggaa

SEQ ID NO: 562366 - DNA, 158 bp, Homo sapiens
ggtagtccacaataagatgtatgctgctgtcagctattctcatgagaaacgtttaactttatttactccatatagaactgttgagactaaatcagttattttcttgtacatttgtggccatgcctgtggtataccagaataggtgtccaagcttaaga

SEQ ID NO: 562367 - DNA, 672 bp, Homo sapiens
  misc_feature (10)..(10): n is a, c, g, or t
  misc_feature (51)..(51): n is a, c, g, or t
  misc_feature (463)..(463): n is a, c, g, or t
  misc_feature (468)..(468): n is a, c, g, or t
  misc_feature (479)..(479): n is a, c, g, or t
  misc_feature (505)..(505): n is a, c, g, or t
  misc_feature (513)..(513): n is a, c, g, or t
  misc_feature (515)..(515): n is a, c, g, or t
  misc_feature (563)..(563): n is a, c, g, or t
  misc_feature (600)..(600): n is a, c, g, or t
  misc_feature (631)..(631): n is a, c, g, or t
  misc_feature (635)..(635): n is a, c, g, or t
acgccttctngattcaagaagacgaggctcacctgttactcggcctcccanaaagatggataggagaaatgactacggatatagggtgcctctatttcagggccctctgcctcccccggggagcctggggcttcccttccctccagatatacagactgagaccacagaagaggacagtgtcctgctgatgcataccctgttggcggcaaccaaggactccctggccatggacccaccagttgtcaaccggcctaagaaaagcaagaccaagaaggcccctataaagactattactaaggctgcacctgctgcccctccagtcccagctgccaatgagattgccaccaacaagcccaaaataacttggcaggctttaaacctgccagtcattacccagatcaagccaggctttacctaccactgggggaaccaatacttcaaggcttttttagtcactggttancctangaaaggccacnagatgaaaaagaggtactggccaagnaagccaangnttcaattccccactgggccatgagggggggacttttacaaggtgaagnccccctgcggggctaaaggtaccagtcatttttacanaaaatttacgcttccaattggccatgaggtnagcnaggttcccaagccttggtaaccttttttaaggcctaa

SEQ ID NO: 562368 - DNA, 665 bp, Homo sapiens
gaattagagaataaaccaggcctgtttcttttcccctgaaatccctgcctctggcttcctaaacccatcatctaaggtgacagagcagtgctggaatagcatctcctttcactttcccaaaactgccacagatagctgccactggcatgctctttgattcctggaagcaaacgtgggactgtcggaggaaagggattgttctggtcttactcataactgggtggtttgagggtgactgaagtcgtgcttttcctgtgtgtgctgccagcacagggctgtaaatgcagatattgcgcctgtgtgcgtgtgtataagtcaagctccaagaggctcctgaatgtgactggcgtgctgagaatgtgtttacactgtttaatgtctgccacgtgaggattacactgaagatgcacaatccctaaaataaacatcaccactttcccaaagaagcatccctcaaatccatgtattattcagacatgttaatagaaacaagacagaggatctcagattgactaggactctccaaggcaattcctagagattcacccaataatccccataagtactccatagtagcaacaaatcatttcataaacccccatatgtaaaatggacctaatcaccacacccttcattcaaccatccaaccaccttaggtactttta

SEQ ID NO: 562369 - DNA, 277 bp, Homo sapiens
  misc_feature (10)..(10): n is a, c, g, or t
  misc_feature (51)..(51): n is a, c, g, or t
  misc_feature (158)..(158): n is a, c, g, or t
  misc_feature (165)..(166): n is a, c, g, or t
  misc_feature (199)..(199): n is a, c, g, or t
  misc_feature (226)..(226): n is a, c, g, or t
  misc_feature (242)..(242): n is a, c, g, or t
acgccttctngattcaagaagacgaggctcacctgttactcggcctcccanaaagatggataggagaaatgactacggatatagggtgcctctatttcagtccaagcatctgaatggggatgagagaagtggcagtaattacaggcggatcccatagngccggcnncagccaccgcgagatgtggccattttacaaganagggctaataagttggtgagatacctnttggttaaggaccagncaaagatccccatcaaacgctcagacatgctgagg

SEQ ID NO: 562370 - DNA, 305 bp, Homo sapiens
cccggcataatactctgtctccagtctctggcggtgacgcagggacacacaagctacggtagtatcttggccatcccaggacacttgtggccttaggacgatgaaggccatgattcagtgtttcacgctactataacatgcgactttttgtcttcctgcttacaagtgggacgatgattgacagttgactctactatgcagggctgttgtgtaccaaacatgagccctatagtgtggctgtccctggagcagtggtcaaagaagatggagctctgttcccctgcgaagctctgagggtaccgagc

SEQ ID NO: 562371 - DNA, 478 bp, Homo sapiens
  misc_feature (121)..(121): n is a, c, g, or t
  misc_feature (130)..(132): n is a, c, g, or t
  misc_feature (411)..(411): n is a, c, g, or t
gagctccaaggttttattgtttttgttttatctgcattatttcttttcttaactctctgcagtgtttgcatctgtattcaactactaacctttgtaagccttttacgcatgcacacatttnatttaaatnnnatttaaatgcaatgccagactctaagtcttttggagaaacttaatggtgatacacgtttggaaggcatcacattattgccatctaaccctaagctggtaatgcaaactcactctataaagtcttatctaattttatgtttgtgatttcccattactttttttttttaagtgtcaggcattttaacgggtattttaggcaaaatgtcagttttgcctatgtattaactaagcaaaattttttaaatttaatctcagtccctttcttcaattatccttaantgaaatagtaactttctttttttttctgatgtatgcataacatttggagttataattaactttctcg

SEQ ID NO: 562372 - DNA, 602 bp, Homo sapiens
  misc_feature (121)..(121): n is a, c, g, or t
  misc_feature (130)..(132): n is a, c, g, or t
gagctccaaggttttattgtttttgttttatctgcattatttcttttcttaactctctgcagtgtttgcatctgtattcaactactaacctttgtaagccttttacgcatgcacacatttnatttaaatnnnatttaaatgcaatgccagactctaagtcttttggagaaacttaatggtgatacacgtttggaaggcatcacattattgccatctaaccctaagctggtaatgcaaactcactctataaaattagataagactttatagagtgagttgcattaccagcattagggttagatggcaataatgttaatgcttaaacgtgttcatcaccattgacagttctccagccgaaagacacctaaaataagtgcaggctcaaatcacaacgcgtgtataaagaacatggagaccggagtctccaacaatccaaatcagggcgacacgtagcgaggaggaccatcgcacgcacaaacagatgaacggactaacaaacaaaaagcgccagcacccaaaacagacaaaaaaaagccagaacatgacaaaaaaaactcccaaacacaacgagatgacatgacgaacagcgagggagacgaaaa

SEQ ID NO: 562373 - DNA, 688 bp, Homo sapiens
agcgggtagttcttaacggttctcagcccgttggtggcaaggcagctggactggaatcccagcaggctgacatgctgaggaggagtgtgcagcccagtgaggtgttggtgcagtggcagtgtgtgacctcgcctgcttccacagctgatgctggctacttgatcgcaggcaacctccttgccatgggaagtgagtctgggagtggtggacaggaggggcaggtccatggctgggcagtgatgtgatgtggcatgacgccgcgaagtgcacctcgcccttgtccaactcggacggagtgtggtccatcaaccccacttccctgacatgctaggctgtggttcccgtctcaacaacagtgcaacatgggatatcttaactgggccatcgctaccgtccgtccagcgcccagggaagcccggccatgacatatattgtgcgacagcttgctactgcggaaacatgggcctgagggtcccaggaggaggcttggtacccacgttgataggccagcatgcaccccagactagatatacatcctaaccagaggaagaagaaagacggcacggtggcaagggcgaacgtaattggggggaaggacacatccgggacgggcccagggacccagcgcaagagttgccaccaaaggttgccgaaaagcatagagccaagggtgttgggtggagaatga

SEQ ID NO: 562374 - DNA, 787 bp, Homo sapiens
  misc_feature (7)..(7): n is a, c, g, or t
  misc_feature (20)..(20): n is a, c, g, or t
  misc_feature (56)..(56): n is a, c, g, or t
  misc_feature (60)..(60): n is a, c, g, or t
  misc_feature (79)..(79): n is a, c, g, or t
  misc_feature (107)..(107): n is a, c, g, or t
  misc_feature (111)..(111): n is a, c, g, or t
  misc_feature (123)..(123): n is a, c, g, or t
  misc_feature (140)..(140): n is a, c, g, or t
  misc_feature (144)..(144): n is a, c, g, or t
  misc_feature (181)..(181): n is a, c, g, or t
  misc_feature (187)..(187): n is a, c, g, or t
  misc_feature (219)..(219): n is a, c, g, or t
  misc_feature (221)..(221): n is a, c, g, or t
  misc_feature (226)..(226): n is a, c, g, or t
  misc_feature (237)..(237): n is a, c, g, or t
  misc_feature (244)..(244): n is a, c, g, or t
  misc_feature (247)..(247): n is a, c, g, or t
  misc_feature (304)..(304): n is a, c, g, or t
  misc_feature (310)..(310): n is a, c, g, or t
  misc_feature (327)..(327): n is a, c, g, or t
  misc_feature (335)..(335): n is a, c, g, or t
  misc_feature (343)..(343): n is a, c, g, or t
  misc_feature (352)..(352): n is a, c, g, or t
  misc_feature (375)..(375): n is a, c, g, or t
  misc_feature (393)..(393): n is a, c, g, or t
  misc_feature (406)..(406): n is a, c, g, or t
  misc_feature (412)..(412): n is a, c, g, or t
  misc_feature (420)..(421): n is a, c, g, or t
  misc_feature (427)..(427): n is a, c, g, or t
  misc_feature (434)..(434): n is a, c, g, or t
  misc_feature (439)..(439): n is a, c, g, or t
  misc_feature (458)..(458): n is a, c, g, or t
  misc_feature (462)..(462): n is a, c, g, or t
  misc_feature (485)..(485): n is a, c, g, or t
  misc_feature (487)..(487): n is a, c, g, or t
  misc_feature (513)..(513): n is a, c, g, or t
  misc_feature (674)..(674): n is a, c, g, or t
  misc_feature (694)..(694): n is a, c, g, or t
  misc_feature (703)..(703): n is a, c, g, or t
  misc_feature (710)..(710): n is a, c, g, or t
  misc_feature (717)..(717): n is a, c, g, or t
  misc_feature (761)..(761): n is a, c, g, or t
tgggggncaaagcactttantgtagggggagtggggggggagaagactttaaattnttcncttaaataaaaaggggggnggggcatgggagggggaaccccatcccnccancctttcccctcntccatcggtccctcggntttncctcggtggcggctacacaggcatgggcatctcattntactcntccacaccctcccgctcatcaaacaccggctntncctcnttagcatccanacatttnatntctcggtcggtgaagatacgggtgagcaccaccatgcggagcggcactttgaggatnaggatnaaggggaaggccagggnggcagctntggacatnacggcccanagcagggccaggcagagcagctncagggccgttaacaggtncatacggagggtncggacnttttttanntaattnacatctnggttnttttttggcggcattaccnccanattcaccccctcataaaactttntncctttaagggaggttactcccatttncaggaaaattccaaaaatcacggccagggggatcttccggagcagatcccgataactatggagaggcccacaagcagggcaaccagcagccccgtcacccgctgctccttgacttcctgaatcttgggcttgtccccaggtgccacagccttgctcatganagtgagcgcgttggcgtgantgaaaaaanggacagnggcagcngccaaccagggcaggccaaagagggcacagatgccgcccattgncacgatgacagcaggtccaggtggaa

SEQ ID NO: 562375 - DNA, 929 bp, Homo sapiens
  misc_feature (929)..(929): n is a, c, g, or t
atccatcattcaatgtcatcctcgctgatgtattcaggagactgtttgcccagttggcaggagaggatgcggagatctctgcctttgagctgcagaccatcctgagaagggtctacggcggagataggatggtcgataagaaccaggagcaagaggatagtggagacacataactctggattgaagatgcgaagatacgcaagaaaatttatcgagaaatcggagtgaaaggtcatgggttacatgagattcctactgaaatgcggaaggatgagaagaagcaggaatcaagaatgcccagtgttaatccaaacaaagtcatagtgtgctcgagtatgcagatgagcagctcagtaatcgagtcaagataagtaatgtaacggtgttaggttcggtggaaaagtactattaaagatatttgagaggaggtggatcccggagaatatgtggaaccaataagatgatcgagcttatctcttggggtcggtaaatcagtacattatgaagtgtataactaatatgctgaagagtgctgtgagtgggaaagtcaggagggataagcttcaatagaaatacagatttgtatatggaccagcaaaatatgggaagatatagaaaaacggatgatatggtgaaattagtgatactggcacatttgagatagtgatgcttcgcatcaatctaaagctgggcttgatatattaatgaatgagtgctaacgtgacgggtcagagtgggtgcgcggtaccagtttctgttacgctacagtgcgggcctcagataacctggacaatgggtgatcaagagggaaaaagccgctcgacagctgcgcatacggcatacgctgtgtcaacaacgagcgggcgagtgttaaggttggacagtgtacaggacgagcaaggaactcgcgtgtgaatgattgaggaggn

SEQ ID NO: 562376 - DNA, 625 bp, Homo sapiens
ctccgagattgaaattgtgtagcaggacattcataaacataactagtgcgaatcacaagaatagactgacctgcttttatgactcattggcaaatggcagctgccttggagcaagtgtcaggatgggtgccaacagcaaggtgcttttctagagctgcttatttctaagcaatgcactcttccagtttttctccttttttacttttttgattgtctttctggtttaagacaaattttaaaatctgcttgttcccaggggggccccacctcatccaatgtatagtttccagcaagtggccaatatgatgatcaggatgaagagagagtttacaggaagccagaattcaatatttcctgtaattgataatctcttgttgcttgatcggaatgtggatttattaacacctcttgccactcagctgacatatggaggactcattgatgaaatttatggcattcagaacagtaagtacatgacatctgtttacactaataggtaatatgagaagaatatcctttgtggaggctactgtttgtatattgcacgcttaagcataattaaagtcagagatccgattctaatgattcagagtgtaaataaatacagaactttttgtaagcaatt

SEQ ID NO: 562377 - DNA, 153 bp, Homo sapiens
taatgagctgcccgtgttaatggtggtatcctcctcagcgatctccgagtatcgtaagcatcttttgctcgtcctccagtcccatgtctggctacggttctagattcaacacgagcagcaacagcggcacctaacccagttcaggatcaagaa

SEQ ID NO: 562378 - DNA, 869 bp, Homo sapiens
tacgtccctcggtccccgcggttttacaccctatgggctctccccgctcagtctgcccgtctttgggagacgcccgcatctcttgtccaccctatacgagtttccgtcctgtcccgcaatatcccggctttgccccttcccccggggcttttttcccacggggtttcccccccaaaaccgcgggtgtcggtaaaacacgcctcaaacccccatgggtaaagaaaccacctaattaaccacgcgtgtccgttggaaaaacccataattctgggccaactccccccacatgcgcgccccacttgaattataacaaaaccggggggtccgccaccaagaagccccctgcgaaacattggcaaacagcaggccctccttggaaaatggaaagggcccctcacaaaaaagacccgggtctctggagaataaaaccggacaactgatgcggagaacacagggataccccccgggataaacccccccccggcggggaaagttgagagccccccccggatctacagcggggcaactcatctgaaggccccccgagccccagaagcctttgtccacaccacagtgaagatcacgcgggacacatttctacagcaagcctcgttcctctccactagttttcgtgcgccttcgtttgtttgggaagagatcttctgacactggagtagactccaccatatgcggctcaaatccgccgagagcgcagtccccgccttttgcggttttaacaacacaggggcgttaaaacaaattagtgtgcggcgggttgacccacaaagggagagtcccctgggccccccctccacccccaaagaagaacaataggcaaaatttttaaggaaccccccctcccacaaaaa

SEQ ID NO: 562379 - DNA, 102 bp, Homo sapiens
ccaaaaatgccccatgtagaattttccctttgtactggcaggctcgttttccccccttttagaatatttaagaatctaaaaataaagggcccctctgcctta

SEQ ID NO: 562380 - DNA, 371 bp, Homo sapiens
  misc_feature (8)..(8): n is a, c, g, or t
  misc_feature (64)..(64): n is a, c, g, or t
  misc_feature (101)..(101): n is a, c, g, or t
  misc_feature (118)..(118): n is a, c, g, or t
  misc_feature (124)..(125): n is a, c, g, or t
  misc_feature (127)..(127): n is a, c, g, or t
  misc_feature (130)..(130): n is a, c, g, or t
  misc_feature (132)..(132): n is a, c, g, or t
  misc_feature (134)..(134): n is a, c, g, or t
  misc_feature (137)..(137): n is a, c, g, or t
  misc_feature (139)..(140): n is a, c, g, or t
  misc_feature (158)..(158): n is a, c, g, or t
  misc_feature (160)..(160): n is a, c, g, or t
  misc_feature (165)..(168): n is a, c, g, or t
  misc_feature (174)..(174): n is a, c, g, or t
  misc_feature (191)..(191): n is a, c, g, or t
  misc_feature (247)..(247): n is a, c, g, or t
  misc_feature (250)..(250): n is a, c, g, or t
  misc_feature (253)..(254): n is a, c, g, or t
  misc_feature (371)..(371): n is a, c, g, or t
ggcacagngcttccctgctgactcctgagaggaagacagagtcacaagctggcccagatgaggncccgggcagcaatgcttctgtgtgggtatggccagtngggacgtggcgccacanactgannanacnananatngnnacgggatgacccgcatancnggacnnnnaaaagnctcacaacatatgaagnatggggcccactggacactccataatactacttaaagccaccacggaaggcctgcntanggnngactagtctacattcccatcacgaacgttgatctgtcaccaaccgcctggcggcctcgtttccccacggaccaccgagacacggtcacacgagacaacggcacatacacacacctgn

SEQ ID NO: 562381 - DNA, 431 bp, Homo sapiens
gagccggtacctgttgagcctgctgagcaaggaaagccagtccaagtcccaaaactgaagagcttggagtccgatgtttgaggggaggaagagtccagcacaagagaaagatgtaggctgggaggctaggccagtctagtcttttcacgtttttctgcctcttgccatgctggcagctgattagatggtgcccacccagattaagggtggctctgcctttcccagcccactgactcaaatgttaatctcctttggcaacaccctcacagacatgtgcaggatgagtgttttgcattcttcaatccaattaagttgatactcagtattaaccatcacaattacccaggctggaattcagtggccattcacagggctgatgtcactacagccttgacctcctggcctcaatcagtccacctgcctcagcagcc

SEQ ID NO: 562382 - DNA, 415 bp, Homo sapiens
  misc_feature (397)..(398): n is a, c, g, or t
ttaaatagatgccatccatttctataacaagtctctggcagagcaccgaaccccagatgtgctcaagaaatgccagcaggcagagaaaatcctgaaggagcaagagcggctggcctacataaaccccgacctggctttggaggagaagaacaaaggcaacgagtgttttcagaaaggggactatccccaggccatgaagcattatacagaagccatcaaaaggaacccgaaagatgccaaattatacagcaatcgagctgcctgctacaccaaactcctggagttccagctggcactcaaggactgtgaggaatgtatccagctggagccgaccttcatcaagggttatacacggaaagccgctgcgctggaagcgatgaaggactacaccaaagcnntggatgtgtaccagaag

SEQ ID NO: 562383 - DNA, 276 bp, Homo sapiens
ctaatgtgattattaacgccccatatttagactattatgagcgtttaaattattatttcaagaattatgtttcgtaggcagagaaaatcctgaaggagcaagagcggctggcctacataaaccccgacctggctttggaggagaagaacaaaggcaacgagtgttttcagaaaggtactggctgcagctgggggattgggggagcagtgctgggtgtgcctcccgtgcctggctgtggggtaaatggccggctacacattgagggagccgacatgg

SEQ ID NO: 562384 - DNA, 607 bp, Homo sapiens
ctagaggatccccatctcgatgggttagggtcctgggtatggctcagccggatccagcagggggagggtctaggtatgggccctcaatcagaacccaggagggaaaatataacctatttaaaacaaaataatctcggtaccaaaaacagcataaagggtcaaaaaacaccacacgggaaaaagattggcaaggattatcacagccaaatagtaaattcctaatttccaaaaaatagctcctacaaatcgaagagaaaaatcctagggtctcaagggaaaaatgagcaagggattggacggggggtagactacagaaaaggactttaaaatagctcctaaagatagggaaccataattcaggatagcggaagtatcattggacaaaataactcagatgggtaccaaacttaaggggggaaagcattaccatgcatggcggtaaatgggtacatctcctacggagaccaatcgggcagtagttaccaaattggtgatggcatatatctcttcctctagaaatacctctttggggaataaatcctacttatattttcaaccaggtgtgaaatactcctatccaggtgatggactaccacttaatccctaa

SEQ ID NO: 562385 - DNA, 122 bp, Homo sapiens
ctaacttaggctcttattacataggaactgcatgagtagttcatgcgactcatccgaggtcactatgaggcaacgcaaggtgggttcctgccagggggagggatgtctacacagcacaatga

SEQ ID NO: 562386 - DNA, 332 bp, Homo sapiens
atggcgtgtacatacgaagggctatgtggactgaatgacgagtatgcaatgagcgctactaggtctgtatgtcgtaggcagatggagctagtaatccttatgcctcatagggatagtacacggaaggggtcagctatgtgtaaagtcagggggtagagcatgagtgtgaggagtataataccatagccgactagtaaaaagagtactgcggcaagtactattgacccagcgaagggggctacgacatgggctaaagaggaagacataagtgaagtccgaaaagaggtatctttactataaaagctattgagtgagctagtcatattaagttg

SEQ ID NO: 562387 - DNA, 1154 bp, Homo sapiens
gtagatgcgttgcccggaggtctcttctctcctgtcatatgtctcactcatgtgtttcctcgatccttcctttgactgtgccgctctatcgcgagcgtgtcccagggggcgtgcacctaaggttcccaccgcacgctggtattggaccgcctcatcggccttctccgctgcatacctgtggtgactaggggtaccccatcatagcctctcctggttacgccccagtgacgggggagccccatttgagggccctcgttactttttgtccagagcgctcccccgtattgcgtcccgctatattttctccctgtctcctcagcctctccctctgtgttgccccgcttgctctctgtgtttccttcggggtatatacttatgtagggggggccctttcaattggatgggctctgctccagcttgctcgggtctcctagcgcgccgcttttctcctcgcgcggtggacatttgcgtgcgcacgcgtgccgtccgggggctctcgggtctgtggtctgtggcctcggcgcacgcggagggaaggtgttcctacggcgtagggatacgggggtgtgtgtgtattgagcgtgtgtgggagggtcgtttttggttggtccctttcggatagtctttttgcgtgggcctctcttgcggggcgtgttgggagcgcgccctggcccgcccacaccccacataattgagggatatgtgagcccctctctctccacactcccgcacacttggcgagaagcgcacggtttgtatgctgtttggcgccgaacttttccactctgtgttttggtgcccaaaactcccacaggatgttgttgaaagagaacaatgagagtgcgccaagcgccacagggcccacaggccacatgtggcgcgtgcccaagcctcacaatgtgcaccttggccgcaggggtggggttgggggtggcgcaacgcaagcaatcccacgccttgagaatgcttcacctcttcctttctctgtgaaccacgagctttgaaaaattgtgtcgctgtttactacacggcttctgttcctccacatggccctttgctaacgtgcctccccgagaaatttgtctttttgtataaatgaccaagttttgtaaaatgtatttcctgaaataaatgtttccaatgcaggaacccca

SEQ ID NO: 562388 - DNA, 373 bp, Homo sapiens
gctggaaaaagaaggaagggcgggtcccagaagtcaggaaggagcacgtgaggagggtgtgtgggaagaatggaggtactgaggcagggttcagtggctcacacctgtaatcccagcactttggaggctgaggcaggagaatcacttaaacctgggaggcagaggctgcaacgagccgaaattgcaccactgcactccagccgtgactccgtctcaaaaaaaaaaaaaaaaaaaaggggttttcagtctccgaatatgggaagggtatcactctttttttttctttttcttttttctcttttttttttctttttttattcttttcttttctttcttttcttttcttttcctcttttcttttcttttcttttct

SEQ ID NO: 562389 - DNA, 876 bp, Homo sapiens
  misc_feature (874)..(874): n is a, c, g, or t
  misc_feature (876)..(876): n is a, c, g, or t
ggaaacctggcgcaatagatatagtaccgcaagggaacgatgaaaaattataaccaagcataatatagcaaggactaacccctataccttctgcataatgaattaactagaaataattgggcaaggagagccaaagttaagacccctgaaaccagaggagctaacttaagaacagttaaaagagcacacccggtctatgtagcaaaatagtgggaagatttataggtagaggcgaaaactaccgagctggtgatagctggtgtgtccaagatagaatcttagttcactttaaattgtgcccaaagaacctctaaatcccttgtgtaaatttaatgttagtccaaaagaggacacagctcttgggacacctaggaaaaaacctgtgtaagagagaagtaccaaactttaacacccatagtaggcctaaaagcagccaccatttacgaaagcgtcacgctcaaaaccagtacctaaaaaatcccaaaatataactgaatcctcacaccaatttggaccaatctatcaccctatagaagactaatgtagtataagtacatgaaaacattctcctcgataagcttggtcaaattacaacatgactgacaattaaagcaaatatctaaatcacaaaagtctaattaccctcatgaccaaacaggatgtcatagaagtacaaagtaagactcggaatctacccctgttacaaaatactctagtacagttaaggacgttgcagggaatgtagggggacaacggagaacaacagctaaaggacgtaggcagacggcacataaagaagccgaggggacagaagacagggtataagagaacaaccataacgagtgggaccgcgcaactcccctcacaactaaanan

SEQ ID NO: 562390 - DNA, 684 bp, Homo sapiens
  misc_feature (40)..(40): n is a, c, g, or t
  misc_feature (51)..(51): n is a, c, g, or t
  misc_feature (55)..(55): n is a, c, g, or t
  misc_feature (71)..(71): n is a, c, g, or t
  misc_feature (82)..(82): n is a, c, g, or t
  misc_feature (91)..(91): n is a, c, g, or t
  misc_feature (95)..(95): n is a, c, g, or t
  misc_feature (100)..(100): n is a, c, g, or t
  misc_feature (107)..(107): n is a, c, g, or t
  misc_feature (124)..(124): n is a, c, g, or t
  misc_feature (142)..(142): n is a, c, g, or t
  misc_feature (148)..(148): n is a, c, g, or t
  misc_feature (158)..(158): n is a, c, g, or t
  misc_feature (185)..(185): n is a, c, g, or t
  misc_feature (191)..(191): n is a, c, g, or t
  misc_feature (201)..(201): n is a, c, g, or t
  misc_feature (205)..(205): n is a, c, g, or t
  misc_feature (207)..(207): n is a, c, g, or t
  misc_feature (220)..(220): n is a, c, g, or t
  misc_feature (234)..(234): n is a, c, g, or t
  misc_feature (256)..(256): n is a, c, g, or t
  misc_feature (301)..(301): n is a, c, g, or t
  misc_feature (305)..(305): n is a, c, g, or t
  misc_feature (310)..(310): n is a, c, g, or t
  misc_feature (333)..(333): n is a, c, g, or t
  misc_feature (339)..(339): n is a, c, g, or t
  misc_feature (343)..(343): n is a, c, g, or t
  misc_feature (356)..(356): n is a, c, g, or t
  misc_feature (359)..(359): n is a, c, g, or t
  misc_feature (376)..(376): n is a, c, g, or t
  misc_feature (380)..(380): n is a, c, g, or t
  misc_feature (385)..(385): n is a, c, g, or t
  misc_feature (485)..(485): n is a, c, g, or t
  misc_feature (592)..(592): n is a, c, g, or t
  misc_feature (598)..(598): n is a, c, g, or t
  misc_feature (609)..(609): n is a, c, g, or t
  misc_feature (664)..(664): n is a, c, g, or t
tgggtttccggcgcgatttttgatccggcgtgatttttgnagcagcttccntttnatcacagcagccactntttcctggttnttcgttgtnggcncccantagatgntctccccgcgtcggaanttttttttcagccgtgtncaaatnttggccaggntgatcagcaccagcaggaaggtcaggnccatgntagcccaggnggcntnttcagttcgtggngtggggccccgggntgcccgtggaggcgctgctgcnaaggtgccggggaagcctgatttgaacagacaaagccccctgggntgcnttgcncgttgggacctgagctttttttntggagntggnattgtttcaaggngcncccggaagcagggaganagtnggcanagatggggcattactctccctaccagggattcccgccatggactgcttggccttcaagctccctggggaagcagagggaaacctcagggctgagcgagtnggctggggaccaagggcagcccgcagcctccgcctcttggcaccactagaagagggctgcctgggcccttgagatgtcacctctgtgccaggggggcgccagctccncagagnaaaggccaganccagggcctgcacacaccctcttcggcacaccttccgtctaccgggagttggctnggaggagcaggccctaaagg

SEQ ID NO: 562391 - DNA, 120 bp, Homo sapiens
cacgtcggtaccactgacagtgctagtgagcaggttaggaagcccattatctgtgttttctcagtcaacattttgtcaggtggaatgtgctaggctcaggactctcagagcttcccttcg

SEQ ID NO: 562392 - DNA, 103 bp, Homo sapiens
aagggaattcgtgctggtgctaagggaattcgtgctggtgctaagggaattcgtgggtgctgtgctgtgtgctaagtggaattcgtgcgtggtgctaagtgga

SEQ ID NO: 562393 - DNA, 1036 bp, Homo sapiens
  misc_feature (388)..(388): n is a, c, g, or t
  misc_feature (394)..(394): n is a, c, g, or t
  misc_feature (413)..(413): n is a, c, g, or t
  misc_feature (420)..(420): n is a, c, g, or t
  misc_feature (441)..(441): n is a, c, g, or t
  misc_feature (446)..(446): n is a, c, g, or t
  misc_feature (456)..(456): n is a, c, g, or t
  misc_feature (772)..(772): n is a, c, g, or t
  misc_feature (775)..(775): n is a, c, g, or t
  misc_feature (1017)..(1017): n is a, c, g, or t
ggaactagtctcgagtttttttttttcgtgcactctgctaatcatgtgggtgagccagtggaacagcgggagacctgtgctagttttacagattgcctcctaatgacgcggctcaaaaggaaaccaagtggtcaggagttgtttctgacccactgatctctactaccacaaggaaaatagtttaggagaaaccagcttttactgtgccagtcctggtgggacgagatcgcgcgggtacaaatgcacttatgaatatcgtctctagaggtccacgttaagagtacaagcttatacagtgcaagggctctgaaggcactggaattggccaaacattcagaccctgtcttccaagagaaaccaagatcctggctacatcccagcctgtggntacagngcagacaggccatgtgagncacacgntgccagcacagagcgtccttnccccntgtagactantgccgtagggagtacctgctgccccaagctgactgtggccccctccgtaatccatccatctccagggagcaagacagagacccaggaatggaaagcggagttcctaacaggatgaaagttcccccatcagttcccccagtacctccaagcaagtagctttccacatttgtcacagaaatcagaggagagatggtgttgggagccctttggagaacgccagtctcccaggccccctgcatctatcgagtttgcaatgtcacaacctctttgatcttgtgctcagcatgattctttaatagaagttttattttttcgngcnctctgctaatcatgtgggtgagccagtggaacagcgggagacctgtgctagttttacagattgcctcctaatgacgcggctcaaaaggaaaccaagtggtcaggagttgtttttgaccccctgatttctactaccccaaggaaaatagtttaggagaaaccagcttttactgtttttgaaaaattacagcttccccctgtcaagttaacaaggaatgcctgtgccaataaaaggtttttccnacttgaagtctaaaaaaaa

SEQ ID NO: 562394 - DNA, 734 bp, Homo sapiens
  misc_feature (470)..(470): n is a, c, g, or t
  misc_feature (473)..(473): n is a, c, g, or t
  misc_feature (715)..(715): n is a, c, g, or t
ttaaaggggtccagcggggttataaggtacaaatggcgcattcaacactcttgtttccaaggaggccgaggtttggtaatatacacaccatgaggtgcaggtcaaacggtccatttatcctcaaatggcattataatggttctttccccaaaagaaaaataaataagaggtgcctccccccccattgaatagggcaccctcgttgatcaaccatctcaaggtacacaccatagactctgccatgcaaagagaagtccttaccaggatgaaagttcccccatcagttcccccagtacctccaagcaagtagctttccacatttgtcacagaaatcagaggagagatggtgttgggagccctttggagaacgccagtctcccaggccccctgcatctatcgagtttgcaatgtcacaacctctttgatcttgtgctcagcatgattctttaatagaagttttattttttcgngcnctctgctaatcatgtgggtgagccagtggaacagcgggagacctgtgctagttttacagattgcctcctaatgacgcggctcaaaaggaaaccaagtggtcaggagttgtttttgaccccctgatttctactaccccaaggaaaatagtttaggagaaaccagcttttactgtttttgaaaaattacagcttccccctgtcaagttaacaaggaatgcctgtgccaataaaaggtttttccnacttgaagtctaaaaaaaa

SEQ ID NO: 562395 - DNA, 802 bp, Homo sapiens
gggagaggagtgtgtgtgtgtgtgtgtgtgtgtgtgtgttgctctgtgtgtgcgtttatcttatcttgctcttttggtggtggctggtgcgaagggcgtggagtgctgctagcggcgcccaggcgcttgagactcggctgcgtacacgtacgtctacgatggatcctactgtggcgccgtaggaatggtgcccgtcgtgcatgcaaatgtggaagcacacgaccacgcaggaagggggttagcctgacgtgacacaacctccgatgctcccagaaatcatgtctcatgtgtgggtactgcgtcttccgaagagtgctccctcaggaaaaaggtgcaagtcgttctcctaatgtcggacgtcttccccacacccgcctggcggcagtccttctgggtgaacgtggctgcgcaggaggcccacaccccgtgggaggtccctgggtcggcgtccggacgccgttcctgctagccaacgttggctacgtgccctagcattgtcagtacgacctggtccagacggcccttccaaggcctcaggggggacgcacgccatgggtgagaggtgggacgccaccatcgttggcagacagtagtcagcgcaccctttgaggacgcatatatcataggggaccccctgaagctggtgggcagctttcagagcagatatacttcgaggaggagaaaaaaagcttgtgatggaaacaggtgccgcacttgccaagtgccttcccaggtggaagcccgtaagaactcaggttaaaacaggcttgcggaggctgaagcacgagtaggggaaccacct

SEQ ID NO: 562396 - DNA, 429 bp, Homo sapiens
aagggggacgtgtacctctccctcattcccggtaccaccgcgagggggagtggggggctacaaggggacggagagaagagtccagacgtcccacatcctgagggcgagtttcagcctcgtagagggcagcgaaagtaagtgcatggatcaggaaaatcttgcaatcggaaaacagcagcgtccccgtaatttcaatataggtacatttacctgaactcatcaccttcccacccccatcccatcgactctgtgctgtatcctgaaccggctgacagaacaatgatgtagacttgacttgttttcgccaacctggaatgaagcaaagctcttgtgcacccaagatctgctctctgttgtaaatcctgttcagacctggtctaattggtttgaataaataaagaaccggaatctttctcatccaaaaaaaaa

SEQ ID NO: 562397 - DNA, 266 bp, Homo sapiens
  misc_feature (247)..(247): n is a, c, g, or t
cccccccccccaaaaaggggggggggcccgagagaaagggggagccctttttttttttataagttcccccccaaaggcgcgggccaaaaaggaacccagggggtcggggttttttttccccccccctcttctctccccccaaagggaaaatagtttaggagaaaccagcttttactgtttttgaaaaattacagcttccccctgtcaagttaacaaggaatgcctgtgccaataaaaggtttttccnacttgaagtctaaaaaaaa

SEQ ID NO: 562398 - DNA, 316 bp, Homo sapiens
gagacggagttttgctcttgtcgcccaggagtgcagtggcgcaatctcagctcactgcaacctccacctcctgggttcaagcagtattcctgcctcagcctcccaaatagctgggattacagtcatgcaccactatgcttggctaatttttgtatttttagtagaggcggggtttcgccatgttggccaggatggtcttgaactcctggcctcaaatgatcagcatcctcggcctcccaaagtgctgggattacaggcatgaaaaaaaaaaaagctggcacgggcgcggtgagctcacgactgtaaaccatagcac

SEQ ID NO: 562399 - DNA, 337 bp, Homo sapiens
agcaaacccaggcacaagttggaggaggttgtggacatcatagctgtgtgaacgtgggacaaggtcctgtgagagggaccagaagctgtcagagctggatgaccgagctgatgccttcaggcagggagcatcacaatttgagagcagtctgccaagctaaagaggagtatttgttggaaaactgcaagatgatgatcatgctgggagccatctttgccatcatcgtggtagttattgtaagcagtatcgctgaagttgctggtgggtaagagtggaaggtcctggagtctttcctcctcctcctcctgggagtgggctgctctactaggatgagccc

SEQ ID NO: 562400 - DNA, 418 bp, Homo sapiens
  misc_feature (417)..(418): n is a, c, g, or t
gggggattgcttgagtccaggattgtgagaccagcctgggcaacatagcaggatcccatctcaatttaaaaaaaggagtaattcagaatatgaaaaaaaagtatgggaaaaggtcaataaagaaatagaagtatggccaggcatgttgcctgacacctgtgatcccagcactttgggaggctgaggtgggtggattacctgaggccaggagttcgagaccagcctggccaacatggtgaaaccctgtctctactaaaaatacaaaaaattagccaggcatggtgtgggtgcctgtaatcccagctactcgggaggctgagacgggagaggcacttgaacctgggaggcggaggttgcagtgagctgagactgcgccactgcactacagcctgggccacatagtgagactccatctcnn

SEQ ID NO: 562401 - DNA, 190 bp, Homo sapiens
acgactcctgaggatgcaccactgaccaccggaagcttaagtttgcttaaaccaaacccagcaacgcaaattcttagcatactcctcaactacccacatgggggggatcattacagctttaccgtccaaccctaacataaccattcttaattaaactatttatattatcctaactactaccgcattccta

SEQ ID NO: 562402 - DNA, 258 bp, Homo sapiens
aagggggacgtgtacctctccctcattcggtacatttacctgaactcatcaccttcccacccccatcccatcgactctgtgctgtatcctgaaccggctgacagaacaatgatgtagacttgacttgttttcgccaacctggaatgaagcaaagctcttgtgcacccaagatctgctctctgttgtaaatcctgttcagacctggtctaattggtttgaataaataaagaaccggaatctttctcatccaaaaaaaaa

SEQ ID NO: 562403 - DNA, 183 bp, Homo sapiens
cccctcctcggtcacttcactccacggacggccttttaggggtggataggaattccttccggcagcggtggtggccccttcccccagccccacccgggcctaattattagcatcatccctctactattttttaaccaaatcaacaacaacctatttagctgttcccagctggctcagaggggt

SEQ ID NO: 562404 - DNA, 993 bp, Homo sapiens
tgatgcgtgcgttgactttcggggtaatgattcagtgtctggcttgcgtacgatagtgggacgatcgggcggacgcgggggatcatcgcctgtaagcgtcagggccggtgggggagggcgaggtgggtggataacaagaaggtaaggagatggagaccatgctggctaacagggtgaaatcctgtctctactaaaaatacaaaaaaaaaaaaaaaagcaacagaaagaagtaagccggggcgctggatgagggggcgcagcccaattagcgcggccaggctacgccggagggatgggcggctgagacccctgggggggacacccagggaggtagaagccgatgaatgggacccgagattcgggacccctgggagcatgcagccgggggacaccggagagaagactccagccctcaaagggcggaacaatacacgggggggagaacaagcgagcgggtgaagattgccgagaccatgtgggtgtcccaatatggtcccaagaacatgaagggccctgacacgaggacacgtggggggggcagggcgcccataggaagaaggggccaccacaagattggcggcacacccactatattccacaaggggcccgatcatccccgaggggcacaaacccccaccgagatttgagacaacacaagaggaatggcccccgaaagaggaacaacggatgaacaagcgcaaccaggggggagcaacccactcatgtgtgcggggaacgccgcaagggggggtggcacaccaaaggcgcggggaggacacgtgggacaacgcgcgcgcggtgggattacccgcccggcgattgtttgtgccacaaccacacaggtgggtcccccagggcggaatagagattaggcccgcacaggtgaatatgccctatgggtggcccagcgacatggtgttgaccgacgacctaaggagagtgtggtcaacagcatgatgtccccgtgaataaagagacccttgagcgggcaac

SEQ ID NO: 562405 - DNA, 986 bp, Homo sapiens
taagtttggagggggaatgcgggaaatggtaaggggtatggaaacttgtcatataagtaaggctagggtgaggggtaggaagttttccataggaggtgtttgattgggccgaaccggaatcgggggtatgctgtcgaatcataaaaacagcgcggttacaagcggcgtctgggcgacacacatctgtgctgtcagagtccaggggagagtgcgtcatatgtggtctcctaggaagatggtcacgggtgaggctgtcattcatactacgcgtcggtgtctccggctatgaagaatagggcgaaggggcctgcgggtatccgatgtggaagcctgaaactagtcggatccccttccgcagggccaaagggcgtcccggtgggcctcggctaggtgtggggatacccctcatattcatgccccaaagggtccatgagggcacggagcactcagagggagtctggcgtccgccgataaggggggaaagcgtcacaaggcgccaaactcactaaccctgccgcgcatggcacaactgaagggcagggaggactgccacatgcacattgccgggggtagagcacccacatgccgcgacacagggaccaaacacacccgcgaccggaccacacgtacacaaaagcggtttgaagaaacggccacggccaaaaggcgccaaaaaagcacccggagcccaaagttggcgggtaccaggcggtagcaaactagaaacggactctaacaacaacacagcgaagtggtaaaacaacgcagtggggcaaaaaacagcgagcaacacacagcacgcggtaccgaagaactgcaagtacaacacgcagcggtcttacccccaccaccccactccccccccttacagagaagcaaacacagaacaacacagcgccacaaccaacaacaaaacagcgcgtgagaaacacaaacacgtataaaacaggacgacactacaaaagggctcaacagacccaataccc

SEQ ID NO: 562406 - DNA, 1098 bp, Homo sapiens
  misc_feature (552)..(552): n is a, c, g, or t
  misc_feature (563)..(563): n is a, c, g, or t
  misc_feature (591)..(591): n is a, c, g, or t
  misc_feature (1027)..(1027): n is a, c, g, or t
gcgtggggcaccgatgggagtgcacagtatctcgacgtaactgaggacacgttagtctgctgtgtgggatctctcgggactagagactgaaatgattgtaatcatagctcgggcgtatgctgcggttggaagattcggcgtactctgccagttagatgtcgcgacggttagatcgacccatagagataaagatcaattagtctatactccacgcagtaaccacagcacactgctctcatgtgtggtcgagagagcggtacgtagagcgcatccgggcgcaactccgcacgtgctctgctacagttcgagcacatcagtgtttgtgcgtgggtttacacgagcagcggcgccgaaaatgctgaccggaaggcatgtgtcagtcgcattgtatacagatgtgtgtgttgccactatacggacgctgatccctgggtcggtagctcaaagtatgcagcacgacgccggcggcagaggatcggtcgtgggagtctccagagacacgtcgaagtagaagaaagggagtggtggcgcgttggtggcttcgccattagngactccttggncgtactccggcggtcgcttttgtccatnggggccgggggcatctaaggtactacctgcggttatgccatgcttgcgcggccgtgcccgagacaacggcgaacatggcggtcacgcggttccgcctgttggttggttggctccgtttcgcgagaacccccttcctgcaagggaaatggaccgtaggtgctgctcatagacgttcctcctattcgcagcacgatttctcggtcgggaatttggcgggtctttgaagtcgaaacttctccagccagcgcggggagagggacccccctggattaacaactaaagcttaccggtattcgaaacagcggtggacttgctagagcgggcagcaatcaagttggttttggcgttccacaacaacccgagcgccggattagtttgcctttggagttggctagtaacacactgtggttgaatacagaataccacgtgcgctgancccaccctttgcgtgtgaaccccacaactactttggcgtaaaaacggaattcggagtccccataaaggaaa

SEQ ID NO: 562407 - DNA, 1545 bp, Homo sapiens
  misc_feature (1545)..(1545): n is a, c, g, or t
gaaaacaccaaatggcggatgacgccggtgcagcgggggggcccgggggccctggtaggccctgggatgggtaatcgcggtaggcttccgcggatgtatcggcagtaggcatccggggcctgggtgtacgctatcctgtaggacgagtgcctggaggccgaagctcacggagcttcgcggagggcgaaggcctgaggagtattggagctgggattgcccgtcagccaagtttgtggtccgcgatagtgtcaagagacatatggaagattcaaatgtactcctaggagtatgagtctaattcttctaagctaccctagctcccatttagatgggaacgtcgatattcgaacatatgtgattgggctgatccgaagggttgggcccttccttctacgatattgacgaagatcggttatttgggtcgtatatttgtaagcgcaagggtatgcggggataatgcgatagaagcccggatgcccaggccaaggcggccagccgaggggtttcaacagtgggcatttttttgtgtttgggctgttgtttctgcggcggcgatctgatagccatatttggggcgccaaccggttacggtaggtctatagtgggtttgtatttcacgtgtgtagggccatccctaggtggcgcagtggtatggggcccgagccgcggttccagttcgctggttggggtggcccctagtttctatttcccgctatgggtcgcaaaatggcttacgtatcccaatatcggttctcccccgtcatgctgcgaataggtttgtgaatgctagggggtttgatgtgcgaggaggcatcatcgtgttcagagggcgcccctgatcatcgattgaccccctaagaggctggggagaggaccacagatgccggccagtttgagccaaacaatgagggcgagttgaagccgcttccactggagcacccaagtccttgcccaaaggaaattcaaccattgggctgggaactggaccatgccttggctcacccggaaaaatctcaaggttaaggtcgaggcggttctgaggagtaggtgctatttagacagctaggaggggccgaggcgagatcgggccgaacaggtctcgccttgtggcaatccgggttaggttccagtgcgccgaagagtgagggcaggatctcttgtagcttttcggctagagagtcgcccggtctctgaatgaggagtaggagtcgtcggtatggtctagatctgaagtcgcataatagatgggtaaatgccatagagagcccccatgaacgctgaccaagcgaatggaagcacctagtgatgtatccagccccaaaaggtgacaccccctatatacaggtgaatgttatcactatgggacccagcccttccggttcagaaggagaccccagtagccaagggaaggttcttcccggtctggcagcgcggggaacttcaggggggcttcccaggcgcttgagtggggctaccgcggcttacgggcttctttgtatttcgctggaatactgcttatgtggtgtggctttctacggctgtggn

SEQ ID NO: 562408 - DNA, 496 bp, Homo sapiens
  misc_feature (28)..(28): n is a, c, g, or t
  misc_feature (65)..(65): n is a, c, g, or t
gaggatcccaggcgaccaggtctgagcncaagagataaatcatcatgttctctttccccaggttnttagtgtttaactggggagacaggcaagtaaacaaataattatcatccaggaagataaactctatactagagttgggcacaatatactacagggaagaatttctgaaagaggtggtattttttagctcagtcttgaagaccaaatgaaaactaattgggtgaagaaggtctggaatgagacaggattcccagagagtaaaatagcatgtagaaaggagtgatgagtatcagggagttagattgttttgttttacaactttcattttttccttttatgtcattgattgcaatctaaaaagatatatactgtttagtctgtttgtttacttcagtgttttaggagttggcaaaatacagctttcaggctgaatctggcttggttttgtatggctttagggttaaagacgggttttacattttttttttttttg

SEQ ID NO: 562409 - DNA, 301 bp, Homo sapiens
caagctcagctaagctttggggtaccaacgtcatcttcaggtgacctgaatctttcccttaaccgtacagtttctcgatggaattgtgtgatcagaaggtggaattctagtgataggcgacctcagacccagcattaatattctgtgtgacacttctattgcacatacaatgattattaagcattgtcaattactatttttactaaacccattgtaaataaatatataaaatcattaaaatacttgatgccttttttttttcatgatacacatttaaataaaataaaccttaacctgaaaa

SEQ ID NO: 562410 - DNA, 689 bp, Homo sapiens
  misc_feature (51)..(51): n is a, c, g, or t
  misc_feature (93)..(94): n is a, c, g, or t
  misc_feature (147)..(148): n is a, c, g, or t
  misc_feature (181)..(181): n is a, c, g, or t
  misc_feature (196)..(196): n is a, c, g, or t
  misc_feature (208)..(209): n is a, c, g, or t
  misc_feature (223)..(223): n is a, c, g, or t
  misc_feature (262)..(264): n is a, c, g, or t
  misc_feature (315)..(315): n is a, c, g, or t
  misc_feature (329)..(329): n is a, c, g, or t
  misc_feature (360)..(360): n is a, c, g, or t
  misc_feature (378)..(378): n is a, c, g, or t
  misc_feature (390)..(390): n is a, c, g, or t
  misc_feature (417)..(417): n is a, c, g, or t
  misc_feature (444)..(444): n is a, c, g, or t
  misc_feature (471)..(471): n is a, c, g, or t
  misc_feature (480)..(480): n is a, c, g, or t
  misc_feature (513)..(513): n is a, c, g, or t
  misc_feature (538)..(538): n is a, c, g, or t
  misc_feature (550)..(550): n is a, c, g, or t
  misc_feature (584)..(585): n is a, c, g, or t
  misc_feature (665)..(665): n is a, c, g, or t
cctggaccccccaatagtgaagggcagtatggtagtgggctaccccctggnggtaggttatgggaggtcctgcccctggagggccttatggannaccagctggtggagggccctatggacaccccaatcctgggatattcccctctnnaactccagaaggaccatatggcggtgcagctcncggggagcccctatngtcagccacctnnaagttcctacggtncccaacagcctgggctttatggacagggtggcgcccctnnnaatgtggatcctgaagcctactcctgattccaatcgatggactcagatcanaatggctatatctncataaagaaactaaaacaagccctggtcaantgcaattggtcttcattnaatgatgaaacntgcctcatgataataaacatgtttganaaaaccaaatcaggccacatcaatgtntacggcttctcagccctgtggaaattnatccagcantggaagaacctcttccagcagtatgaccgggancgctcgggctccattagctacacanagctgcagcaanctctgtcccaaatgggctacaacctgagcccccnnttcacccagcttctggtctcccgctactgcccacgctctgccaatcctgccatgcagcttgaccgcttcatccaggtgtncacccagctgcaggtgctgacaga

SEQ ID NO: 562411 - DNA, 227 bp, Homo sapiens
  misc_feature (141)..(141): n is a, c, g, or t
gctgctgaatagtttatatagagtctggtgaacttgaactagagaaagctgctaaaagtgatttggagagcatggcagggccttggaagaagggctaatagaagcaggtcccttgcccagaccctcagtgagccctttggntggatagcggacacctgaggcaggagtgtggcagggcccaagtccaggcaggcagcagcagggctgcaattgagagctgaggctgg

SEQ ID NO: 562412 - DNA, 128 bp, Homo sapiens
ccagtctcggcttccaaagtgctgggattacaagttgagcaacacacccagcaaaataaccacagtggagagatctggaaaatcaccttaaacaagtgatccaactttgcattatgagccaccttggt

SEQ ID NO: 562413 - DNA, 407 bp, Homo sapiens
  misc_feature (13)..(13): n is a, c, g, or t
  misc_feature (23)..(23): n is a, c, g, or t
  misc_feature (25)..(25): n is a, c, g, or t
  misc_feature (69)..(69): n is a, c, g, or t
  misc_feature (80)..(80): n is a, c, g, or t
  misc_feature (89)..(89): n is a, c, g, or t
  misc_feature (297)..(297): n is a, c, g, or t
  misc_feature (340)..(340): n is a, c, g, or t
  misc_feature (358)..(358): n is a, c, g, or t
gaggggtgtgggncctgcgggantnttttccttctggccttctgggagctggtggggagatcactgtcntgtgtgcaggnctcagagcntgctttctgatgacgaggtgcccctcgggaatagggggacagttcttaaaacaccaggcagaggctcagcagaggatctgtccctggaggaagaggctcgattctccagccagcagcccccagcccagctgagccacaggcacagaggggcccgctgttgtggccagagagaggccctccagctccccggcatcaggagatggcgtcntcggcccttcctttcggcctggtcccaggtgcccgtgaacttngaggacgtggctgtatanctttcttggggaggagccaagatgcattggacccagctcagcggggacg

SEQ ID NO: 562414 - DNA, 307 bp, Homo sapiens
cccccgattttgagaacctccatatggtatcaaaagggagtttaaagcgcttgaatttctatcaggggaggagatggggcgggaccgagacccggctcccggctgtgtgtggagctgatggcttctgcatccctcctccccacgcctagattctgtgaggagttggaactcctctctgcttaagcataaccctgtcgtttaaaggtgagatcaacctacccaaagactactgcagcactgacttggatctggacactgagtttgagatcctcttgccacgccgacggggcctgggcacggaagatca

SEQ ID NO: 562415 - DNA, 322 bp, Homo sapiens
tacattaaagtgcggtctgggggggtcctgtcctggaagtcacagacaacgcagtttttaaacgcccaggagctgctcagcccctccccatcaagaggaggcccagtggccaggggctatggcagtcacaggcacagactctgaggcttggaagtcactgaggatatggaaactaccagttaggcagatgaagaggatgctcctaagtaaagatttttatttaatatgttagttgatggtcagcaagcacacaaacgaagactcacgactccaattatgcaaattcatgactattgtttctaatctgatctgaaaagagaca

SEQ ID NO: 562416 - DNA, 187 bp, Homo sapiens
ttcattagaggatcccccagcactgatctttcagccccagtattgcgaggccacatacagaagggggagagcgcagaggacaatggagcactgatggcgggtcgtggactcgtgaggatggtggccaatggtgttggctcgctctgaatgaccctgcactgacagctgtactgggagtggtccctga

SEQ ID NO: 562417 - DNA, 902 bp, Homo sapiens
tgttggtgataatattgccggcgggcgttctgaatagtttcttcgtagtaattcgtgtattacgtattgcgcccttttatagagacctttggaggaaaccgtttcgccattaacgagtgttggaagacaacaattgttggggaaaactcttggtggaaacttccgattgtaggacgttatctcttgtccgcaaagaaaacacttttctgggcagacaagacataacccattggggactcatggactatactcctgcgtccccgactttgtcattattttttccccacacttggggtcacgacagtttattggccctttaggtcctccacgggtcaaaataagtggttgcagtccaggtatgtcattttgtgacgccgcaaattcttgtgttgttggcccccttggagcccccatgtgcaaatagtcgactgttgtcgtgccgctctcatcgtgtatgatcactatccgggagatgttatcaaatgtgcacggaataattgtcggataatgttctcccacatgatagaatatattccctcggtctgcggagtgtgttaacaacataccatttgacctattgggcgggagggattgaaaaacactccgtagattagcaaaggagaaaaagttaatccaaagggatatgagtggttctcgacaatgtaccaagccgtgccgagcgcctaatattatcctcacgccaaaaagatttccgtgcccgaaccgcgccggtgcccaacccccggaggggcccttcacatcagattagtggagtgcccacagactggcatatttatagggagagatgactctcttttctcccaacggtcggaagaaaaacgggcaccacccccttacaccatgagacaccgttaccggaaaaggggaaccccagaggggga

SEQ ID NO: 562418 - DNA, 402 bp, Homo sapiens
  misc_feature (394)..(394): n is a, c, g, or t
  misc_feature (396)..(396): n is a, c, g, or t
atgcctaaaaaatagataatagaatattaacgattttatgcccagtaaacttttaagtttaatggacagatttccttgaaagctcactcaacaaaaaataggcaaccctggcccaggcgtggtagcctcacatctgtaatccccagcacttttgggaggccgaagcaggtggatcacctgagatcagcagttcaagaccagcctggccaacatggtgaaaccccagctctactaaaaaaaatacaaaaattagctgggcgtggtggtatgcacttgtagtcccagctactcaggaagctgaggcaggaagaccacttgaatctgggaggtgtgagtttgcagtgagatcaccccactgcactccagcctgggtgacagagtgagactctgtctnancaaaaa

SEQ ID NO: 562419 - DNA, 150 bp, Homo sapiens
gactctccaggatctttgtcatccccttcgtgaggaggtgatgtgggtgatgctggagctcagatctgaagggaagaaggagcagcacatatagaagtgagggagggggcttagggcaaagggaaacaggaaggggagaaggccctgaag

SEQ ID NO: 562420 - DNA, 2128 bp, Homo sapiens
  misc_feature (96)..(96): n is a, c, g, or t
ggggagaggcgctggtgagccagccccggccgcacgccaatcacgagcacgtgatgaggagcggcctgtgggcagcccccgccccaacgttcagcntcagacgcgccatgtgggccctgcgggccgccgtacgcccggggctgcggctctcccgcgtgggccgcggccgctcggctccgcgggcagccgcgccgtcctgccccgcgcgcgcgctagccgctgtcggccgcaggagccccgggaatctggaggggccgtggggcggagggcggggcctgcgggcggacggcggccgaagccgcacgggagacgacgaggaggagccggaagatgcggacgagaacgccgaggaggagctgctgcggggagagcctctgctgccggcggggacccagcgcgtgtgtctggttcaccctgacgtcaagtggggcccggggaagtcgcagatgactcgagccgagtggcaggtggcggaggccacagcgctggtgcacacgctggacggctggtccgtggtgcagacaatggtcgtgtccaccaaaacgccggacaggaagctcatctttggcaaagggaactttgagcacctgacagaaaagatccgagggtctccagacgtcacgtgcgtcttcctgaacgtggagaggatggctgccccgaccaagaaagaactggaagccgcctggggcgtggaggtgtttgaccgcttcacggtcgtcctgcacatcttccgctgtaacgcccgcacgaaggaggcccggcttcaggtggccctggcggagatgccgctgcacaggtcgaacttgaaaagggacgtcgcccacctgtaccgaggagtcggctcgcgctacatcatggggtcaggagaatccttcatgcagctgcagcagcgtctcctgagagagaaggaggccaagatcaggaaggccttggacaggcttcgcaagaagaggcacctgctccgccggcagcggacgaggcgggagttccccgtgatctccgtggtggggtacaccaactgcggaaagaccacgctgatcaaggcactgacgggcgatgccgccatccagccacgggaccagctgtttgccacgctggacgtcacggcccacgcgggcacgctgccctcacgcatgaccgtcctgtacgtggacaccacagttcaggaggtggacgtgatccctgaggacggggcggccgacgtgagggtcatcatcagcaactcagcctacggcaaattccggaagctctttccaggatgaacggacgcccacagaggcctgcggggtgggggcatcgctgcctggggagctgaggcgttaccgctgtgttgggggcagcttggtgtcaggtgcagcagggtcctccttgtctggttctgcacccgtctcgctcccagccatttgctgggatgaccgtgcaggccggtgacacggccgcacctgccccaaagcgggccgcccgagcgtccactccaagcctgagcatccacacaattccagtgggccctcggtgcctgctgtgaactgctttccctcggaatgtttccgtaacaggacattaaacctttgattttacttccgtgagcagcatttccagttcctcctgcacctgccgtgagccgtggccctggtgggcaccgacggcccctccgcccggctgtctgtgttcacagatggtctcgtttcccatggtggtgtcggggaaatgacgaaaaatcaggtttcccggcagcacagagaacccttccacaaaagtagaagggaaagcaaatagttttactaaagaagcagcttcaaaccagaccgtgagccaccgcacccggcctcctgaattaacattttctaaagatgcttctggcgtgctatcctgaaagctgccagaggtgtcttggctgcattggtggtaataaaattcatactcatatttgactttaaaaaaaaaacaaaaaaccccgggcaccaaaatgaggggggggagaacaaagcgggtataaaatgagccgtgggacaaaaagtggtgcagggaccccctttttgaaaccagggcaacacgcggacccccaaaggggccgaaaaccgcacaccgggaccgtgaaagagagcaaaagaaaaagagaccgcaagac

SEQ ID NO: 562421 - DNA, 945 bp, Homo sapiens
atgaagagagcaaacaaatcaagtaccaacctagaggctttatttttgaattgattcatggtgtgtgtgtgtgtgtgtgtgtgtgtgtgtgtgtgtcgacacagaaacagatcacaaaataggggagattgagtgatgaagaaagtatatatcaccatataggataaaaatagcaaagaagagtgtgtctcctattatcgcacatatatgtgatcgtgagtagaaaacaaacagagatatcagtcgtgcgaagtagagtataataagagagagaatagtgtgtgcgcacagggtgctatgagtttttttctcaaatagacataatattatttgatagtaagaaatatatatatgagtctcctctcagggtcgtgcgacaatgttcacatgatatttctcagtggggagaggtgtacaaacaaccattatgccctcttctctcctcttgttgatgactctaatatatcccacaagtcaattctgtgagtctatagtatttcttacacttctatgaagagaatgtggggtccacagaggagtgaacaatatttgagagagatgtgtacgatttgtcagcgagagggcgtcacactatgaagcaaacgctcctggtgagacacaaactactgagaggggggatatcgggaaaatgagagagtactaccggagagacccgcaattctcccaagtcgaacaacctatctctgatcttacaacagcgctggaaggggtccccaagaggggccaggagggaaaccccccatcattgtttagaggatccaagccggcatatcgaaaaagggttgaacaagatcaagaacagaaagagaagtcacagagtaggcacaaccgcggatgggatccagatctaccaaaacaaaacaaactcgcccacaaatcaaggggcacagaagaagcacagcaagcacagaaagaaaggtaaac

SEQ ID NO: 562422 - DNA, 328 bp, Homo sapiens
  misc_feature (38)..(38): n is a, c, g, or t
  misc_feature (261)..(261): n is a, c, g, or t
  misc_feature (300)..(300): n is a, c, g, or t
  misc_feature (306)..(306): n is a, c, g, or t
ccggccaacacagcgaaaccccgtctccaccaaaaaantacgaaaaccagtcaggcatggtggcgcgcgcctgcaatcgcaggcactcggcaggctgaggcaggagaatcaggcagggaggctgcagtgagccgagatggcagcagtacagtccagcttcggctcggcatcagtgggagaccgtggaaagagagggagagggagaccgtggggagagggagaccgtggggagagggagagggagagggagagggctttttnaccatttttaaacagggttattttgttttcttactattnaagttnagttcctttttataatttttag

SEQ ID NO: 562423 - DNA, 1442 bp, Homo sapiens
  misc_feature (96)..(96): n is a, c, g, or t
ggggagaggcgctggtgagccagccccggccgcacgccaatcacgagcacgtgatgaggagcggcctgtgggcagcccccgccccaacgttcagcntcagacgcgccatgtgggccctgcgggccgccgtacgcccggggctgcggctctcccgcgtgggccgcggccgctcggctccgcgggcagccgcgccgtcctgccccgcgcgcgcgctagccgctgtcggccgcaggagccccgggaatctggaggggccgtggggcggagggcggggcctgcgggcggacggcggccgaagccgcacgggagacgacgaggaggagccggaagatgcggacgagaacgccgaggaggagctgctgcggggagagcctctgctgccggcggggacccagcgcgtgtgtctggttcaccctgacgtcaagtggggcccggggaagtcgcagatgactcgagccgagtggcaggtggcggaggccacagcgctggtgcacacgctggacggctggtccgtggtgcagacaatggtcgtgtccaccaaaacgccggacaggaagctcatctttggcaaagggaactttgagcacctgacagaaaagatccgagggtctccagacgtcacgtgcgtcttcctgaacgtggagaggatggctgccccgaccaagaaagaactggaagccgcctggggcgtggaggtgtttgaccgcttcacggtcgtcctgcacatcttccgctgtaacgcccgcacgaaggaggcccggcttcaggtggccctggcggagatgccgctgcacaggtcgaacttgaaaagggacgtcgcccacctgtaccgaggagtcggctcgcgctacatcatggggtcaggagaatccttcatgcagctgcagcagcgtctcctgagagagaaggaggccaagatcaggaaggccttggacaggcttcgcaagaagaggcacctgctccgccggcagcggacgaggcgggagttccccgtgatctccgtggtggggtacaccaactgcggaaagaccacgctgatcaaggcactgacgggcgatgccgccatccagccacgggaccagctgtttgccacgctggacgtcacggcccacgcgggcacgctgccctcacgcatgaccgtcctgtacgtggacaccacagttcaggaggtggacgtgatccctgaggacggggcggccgacgtgagggtcatcatcagcagggtcctccttgtctggttctgcacccgtctcgctcccagccatttgctgggatgaccgtgcaggccggtgacacggccgcacctgccccaaagcgggccgcccgagcgtccactccaagcctgagcatccacacaattccagtgggccctcggtgcctgctgtgaactgctttccctcggaatgtttccgtaacaggacattaaacctttgattttactt

SEQ ID NO: 562424 - DNA, 137 bp, Homo sapiens
acagagcctgctactcctctgtcagggtctgctgcattaaaactagacagtcagagaagtcagacgtgttgaggggctcgggctctgggcccaccacctcatcgatcagagggaggcccagtccttgcctgggccca

SEQ ID NO: 562425 - DNA, 291 bp, Homo sapiens
atgcgacttctgacaaccaagattttgttcctgctgactttgtctgcactatggaccattgtcctctcgcccactcaataagtcttgagtcatacaaaataatgaaaatctttgaaacatttaatatatattttttaacattttaaagattaacagattgtattcctttcaaggtgctatacttgcttaagcaatcttgatttgagtggggggcctcgattcgcgctattatgctctgttaggtgggacatgaatatactaaagctttttttttttttttaccacctcttt

SEQ ID NO: 562426 - DNA, 1484 bp, Homo sapiens
  misc_feature (96)..(96): n is a, c, g, or t
ggggagaggcgctggtgagccagccccggccgcacgccaatcacgagcacgtgatgaggagcggcctgtgggcagcccccgccccaacgttcagcntcagacgcgccatgtgggccctgcgggccgccgtacgcccggggctgcggctctcccgcgtgggccgcggccgctcggctccgcgggcagccgcgccgtcctgccccgcgcgcgcgctagccgctgtcggccgcaggagccccgggaatctggaggggccgtggggcggagggcggggcctgcgggcggacggcggccgaagccgcacgggagacgacgaggaggagccggaagatgcggacgagaacgccgaggaggagctgctgcggggagagcctctgctgccggcggggacccagcgcgtgtgtctggttcaccctgacgtcaagtggggcccggggaagtcgcagatgactcgagccgagtggcaggtggcggaggccacagcgctggtgcacacgctggacggctggtccgtggtgcagacaatggtcgtgtccaccaaaacgccggacaggaagctcatctttggcaaagggaactttgagcacctgacagaaaagatccgagggtctccagacgtcacgtgcgtcttcctgaacgtggagaggatggctgccccgaccaagaaagaactggaagccgcctggggcgtggaggtgtttgaccgcttcacggtcgtcctgcacatcttccgctgtaacgcccgcacgaaggaggcccggcttcaggtggccctggcggagatgccgctgcacaggtcgaacttgaaaagggacgtcgcccacctgtaccgaggagtcggctcgcgctacatcatggggtcaggagaatccttcatgcagctgcagcagcgtctcctgagagagaaggaggccaagatcaggaaggccttggacaggcttcgcaagaagaggcacctgctccgccggcagcggacgaggcgggagttccccgtgatctccgtggtggggtacaccaactgcggaaagaccacgctgatcaaggcactgacgggcgatgccgccatccagccacgggaccagctgtttgccacgctggacgtcacggccacgcgggacgctgcctcagcattgacgtcctgtcgtggaaccatgggttctttccagttgcgaaggccactcggtctttcgcaccggaagtggccctcggctctccctttgccgttagggagctaggccaccccaggggggacccagcaaatacgcgcaggcacagcgcatgacggaaatgccgccgccctggcaacgcaggcgaggcaacaacgggaccgacgtgcgggataaccccgagagaagcggcacatcgtcagagcaccaaccaaagaccgacggcgagagggaacacacatgtagcccgctgagagacagtgaaaaggagacaacaacagagtcgggtcgttggtgcccgctcgcggtcatagccaa

SEQ ID NO: 562427 - DNA, 1582 bp, Homo sapiens
  misc_feature (96)..(96): n is a, c, g, or t
  misc_feature (1480)..(1480): n is a, c, g, or t
  misc_feature (1486)..(1486): n is a, c, g, or t
ggggagaggcgctggtgagccagccccggccgcacgccaatcacgagcacgtgatgaggagcggcctgtgggcagcccccgccccaacgttcagcntcagacgcgccatgtgggccctgcgggccgccgtacgcccggggctgcggctctcccgcgtgggccgcggccgctcggctccgcgggcagccgcgccgtcctgccccgcgcgcgcgctagccgctgtcggccgcaggagccccgggaatctggaggggccgtggggcggagggcggggcctgcgggcggacggcggccgaagccgcacgggagacgacgaggaggagccggaagatgcggacgagaacgccgaggaggagctgctgcggggagagcctctgctgccggcggggacccagcgcgtgtgtctggttcaccctgacgtcaagtggggcccggggaagtcgcagatgactcgagccgagtggcaggtggcggaggccacagcgctggtgcacacgctggacggctggtccgtggtgcagacaatggtcgtgtccaccaaaacgccggacaggaagctcatctttggcaaagggaactttgagcacctgacagaaaagatccgagggtctccagacgtcacgtgcgtcttcctgaacgtggagaggatggctgccccgaccaagaaagaactggaagccgcctggggcgtggaggtgtttgaccgcttcacggtcgtcctgcacatcttccgctgtaacgcccgcacgaaggaggcccggcttcaggtggccctggcggagatgccgctgcacaggtcgaacttgaaaagggacgtcgcccacctgtaccgaggagtcggctcgcgctacatcatggggtcaggagaatccttcatgcagctgcagcagcgtctcctgagagagaaggaggccaagatcaggaaggccttggacaggcttcgcaagaagaggcacctgctccgccggcagcggacgaggcgggagttccccgtgatctccgtggtggggtacaccaactgcggtgagcacgcgcccaggggaggggccttccgcggtctccgtgtcaccggtgaggactcgcccgggggagggcagggggtccctgtcgtctcagtggtgccgtacgacagctgcggtgagcacgtgcccaggagagggggttcccatggtcgccgtgtggggtacaccagctgctgtgagagctcacccaggagacgggtttcctgtggtctctgtgtggggtacagcagccaaggtgaggatgtcatctaccccatcctcccatccagagctttaccaccctgtctataccacaacctcccctccatctacaccatcctcctgtctagaccatccccactgccctatctataccaccaccctgtctacacaatccacccatctacaccatcacctctcctctgtctataccatcctcctgtctacaccagcaccactaccccatctataccaccacnccgtcnacataatccacccgtgtacaccacaatgtccccttcgtctgcaccgtcctcctgtctacactgcaccacatgccccatctataccacacccacccc

SEQ ID NO: 562428 - DNA, 1416 bp, Homo sapiens
  misc_feature (96)..(96): n is a, c, g, or t
ggggagaggcgctggtgagccagccccggccgcacgccaatcacgagcacgtgatgaggagcggcctgtgggcagcccccgccccaacgttcagcntcagacgcgccatgtgggccctgcgggccgccgtacgcccggggctgcggctctcccgcgtgggccgcggccgctcggctccgcgggcagccgcgccgtcctgccccgcgcgcgcgctagccgctgtcggccgcaggagccccgggaatctggaggggccgtggggcggagggcggggcctgcgggcggacggcggccgaagccgcacgggagacgacgaggaggagccggaagatgcggacgagaacgccgaggaggagctgctgcggggagagcctctgctgccggcggggacccagcgcgtgtgtctggttcaccctgacgtcaagtggggcccggggaagtcgcagatgactcgagccgagtggcaggtggcggaggccacagcgctggtgcacacgctggacggctggtccgtggtgcagacaatggtcgtgtccaccaaaacgccggacaggaagctcatctttggcaaagggaactttgagcacctgacagaaaagatccgagggtctccagacgtcacgtgcgtcttcctgaacgtggagaggatggctgccccgaccaagaaagaactggaagccgcctggggcgtggaggtgtttgaccgtgcaggccggtgacacggccgcacctgccccaaagcgggccgcccgagcgtccactccaagcctgagcatccacacaattccagtgggccctcggtgcctgctgtgaactgctttccctcggaatgtttccgtaacaggacattaaacctttgattttacttccgtgagcagcatttccagttcctcctgcacctgccgtgagccgtggccctggtgggcaccgacggcccctccgcccggctgtctgtgttcacagatggtctcgtttcccatggtggtgtcggggaaatgacgaaaaatcaggtttcccggcagcacagagaacccttccacaaaagtagaagggaaagcaaatagttttactaaagaagcagcttcaaaccagaccgtgagccaccgcacccggcctcctgaattaacattttctaaagatgcttctggcgtgctatcctgaaagctgccagaggtgtcttggctgcattggtggtaataaaattcatactcatatttgactttaaaaaaaaaacaaaaaaccccgggcaccaaaatgaggggggggagaacaaagcgggtataaaatgagccgtgggacaaaaagtggtgcagggaccccctttttgaaaccagggcaacacgcggacccccaaaggggccgaaaaccgcacaccgggaccgtgaaagagagcaaaagaaaaagagaccgcaagac

SEQ ID NO: 562429 - DNA, 642 bp, Homo sapiens
  misc_feature (96)..(96): n is a, c, g, or t
ggggagaggcgctggtgagccagccccggccgcacgccaatcacgagcacgtgatgaggagcggcctgtgggcagcccccgccccaacgttcagcntcagacgcgccatgtgggccctgcgggccgccgtacgcccggggctgcggctctcccgcgtgggccgcggccgctcggctccgcgggcagccgcgccgtcctgccccgcgcgcgcgctagccgctgtcggccgcaggagccccgggaatctggaggggccgtggggcggagggcggggcctgcgggcggacggcggccgaagccgcacggaagctctttccaggatgaacggacgcccacagaggcctgcggggtgggggcatcgctgcctggggagctgaggcgttaccgctgtgttgggggcagcttggtgtcaggtgcagcagggtcctccttgtctggttctgcacccgtctcgctcccagccatttgctgggatgaccgtgcaggccggtgacacggccgcacctgccccaaagcgggccgcccgagcgtccactccaagcctgagcatccacacaattccagtgggccctcggtgcctgctgtgaactgctttccctcggaatgtttccgtaacaggacattaaacctttgattttactt

SEQ ID NO: 562430 - DNA, 403 bp, Homo sapiens
  misc_feature (4)..(4): n is a, c, g, or t
  misc_feature (359)..(359): n is a, c, g, or t
tgangtataaagaaaaagaggtttaatggactcacagttccacatggctggggaggcctcacaaacatggcagaagacaaaaggcacatcttacatggcagcagacaagagagaatgagggaacccagtgaaaagggtttccccttataaaaccatcagatctctcaggaggacttattcactaacagaaaagtattggggaaactgccgccatgattcaattaactacccccaggtccctctcacaacacatgagaatcatgtgaactacagttcaatatgagatttgggtggggaaacagccaaatcatatcattccaactctggcccctcccaaatcttatgtcctcacatttcanaaccccacatgccttcccaacagtcccttaaagtcttaacttat

SEQ ID NO: 562431 - DNA, 629 bp, Homo sapiens
  misc_feature (96)..(96): n is a, c, g, or t
  misc_feature (554)..(554): n is a, c, g, or t
  misc_feature (589)..(589): n is a, c, g, or t
  misc_feature (618)..(618): n is a, c, g, or t
ggggagaggcgctggtgagccagccccggccgcacgccaatcacgagcacgtgatgaggagcggcctgtgggcagcccccgccccaacgttcagcntcagacgcgccatgtgggccctgcgggccgccgtacgcccggggctgcggctctcccgcgtgggccgcggccgctcggctccgcgggcagccgcgccgtcctgccccgcgcgcgcgctagccgctgtcggccgcaggagccccgggaatctggaggggccgtggggcggagggcggggcctgcgggcggacggcggccgaagccgcacgggagacgacgaggaggagccggaagatgcggacgagaacgccgaggaggagctgctgcggggagagcctctgctgccggcggggacccagcgcgtgtgtctggttcaccctgacgtcaagtggggcccggggaagtcgcagatgactcgaggtgaccgcggcagggctttcgggggagaaacaggagctggagacctgggggcggggctctgaggggagggggctcataggtggagattcaggggcggngctctgaagggacgatctcataggtggagattcangggcggggttctgtggggagaactcatangtggaggcgca

SEQ ID NO: 562432 - DNA, 123 bp, Homo sapiens
cacattggtgtcttatgggacgaggctggatcctgcgttgtcatggctgtggcataggccagcagctacagctccaattggacccctagcctgggaacctccatatgccacggatgtggccct

SEQ ID NO: 562433 - DNA, 172 bp, Homo sapiens
tgagcccgggatgttttatttggaatgtgaaaagtctgccagtttctgagcaaaaacttcaatttcaaaataaaggcatccagggctcaatggcatccagaggctcaatgcatagagccccttgatgtggggaggggtgtttaaggggttggctagggtataattgtctggg

SEQ ID NO: 562434 - DNA, 632 bp, Homo sapiens
  misc_feature (132)..(132): n is a, c, g, or t
  misc_feature (310)..(310): n is a, c, g, or t
cttcctgaaggacatgtgggctgtgtgtctagtaagggatgcacatgcagtggtcagtgtgccaggtgtatggttggtgtctgggaagagcctagctggttgtggcctcttcctcggtatctaggtcttcanacatcttggatcccgtctcgtatggctgtgatggaatctgaaatgaaggtttgacaaggaccagtgatggactcattgaggaagtggagggctatgcggaccagacctagtgagtggatgggtgacccgagaggccccgaggttaagcggggtaggggtttgccaggagggctgaggntgagaatactgggaaacataggtgatcgtcagggctcaggatagagaatgacgtcattgtctattgagcacggcgatttgggagcagtttggagcctgccagctcttgaaccaccgctaagagcgccatggtctccgtgaatcaaggtggcattaacgtgtggaggggcttgtggcgttggcagtcttgatggaggtttgatcgaataggggtaacaatggatttgagagttgcattctgatagtcgtggtgaacatgggatatatccaagtggaattaaagggttaatttcaatatcgtaatttcttccaagtacctggtg

SEQ ID NO: 562435 - DNA, 316 bp, Homo sapiens
  misc_feature (3)..(3): n is a, c, g, or t
  misc_feature (48)..(48): n is a, c, g, or t
  misc_feature (225)..(225): n is a, c, g, or t
  misc_feature (273)..(273): n is a, c, g, or t
tanacactgtctttaggactgtggatagaaggagcttaggaatatttnttccaagctctccattttatttattgagacaggtcggacatgtcacctaggctggagtacagtggtgcgaacacggctcactgcagcctcgatctcctaggctcaagccatcccctcacctcagctccccaagcagctgggactacaggtgtgcgccaccacagcaggctaattttngtatttttttttggtagagctggggtttcaccatgttgcccaggctgntctcaaactcctgagctcaagagatcctcccagcccgtgccgg

SEQ ID NO: 562436 - DNA, 928 bp, Homo sapiens
gagcggggggtcgggccggggcgggacgatgcaggtgacgtgagggcgcaaggtgacgaggacatggggcccgtcagccccgctgttcgcggtctaagtcgccgacccgtggctctatgcctgtccgtctgcctcgcctgttgcgtgcgcggatgtattgctgggtgcattctgtcgcgcagcatgcccgggcctgttcggagacgtcctgtggccggtgaggagctcccggtcggcggacggagggccccgggtgtcggcgccatgtggctggagctatgatggtgcgcgctaaccacgcgttcatccgaggaactcttgcgctgcgcgtgctcggtctgggatacccaggatcctcgatcgaatggaagcttcctccgagcggcatgatctcgcgcgtgatccactgcattgagcgttgcctagtgaagtatcctgggcaagtagcaagactgtaacacactggtaggctttgacagacttgctactgttgtggtgagcaggcatactggcagtgccgatccacccatggcgagctgcttgggtggctgggcggttctcgcggaggagcgcgtgggctagcggcacgcgacccgccgaacgacctagggttcgtcgcccattcctgcattcgctttgccctgtgtgagttatcgtagaatgtggatggccccttggctttggtttggcgtagaacacgtgtctggcacggttttctgttggctatcgcaaagagaacgctggccattgggaacctaagtgggttagcacagaagtttccaaacgccccgcgaagggctattctaagaggatgcgccactatggatgcgtccattgccaaagcctcctcacgaaggggccgcgttcgatccgtggccaatggcgtcttggagtcatttgcttctattaccctttgtatgggctcacg

SEQ ID NO: 562437 - DNA, 152 bp, Homo sapiens
ctaccacgaacacgtttgatgttaggtccgcttggcatttcgggcaattccttgcctctagaacggccggggtcgggcttccaatccgtcctagtccactcaagtgcggcattccacgaggattcatcaaggtccagagcttcatcctgagg

SEQ ID NO: 562438 - DNA, 429 bp, Homo sapiens
  misc_feature (288)..(288): n is a, c, g, or t
gcccaccttcttgtcatgaaggccatgcagtctttcaagtcccgaggctcgtgaaggaccggtttgccgggagacatttctactgggcccttaccaatgagggtatccggtatctccgtgattaccttcatctgcccccggagattgggcctgcccccctacgccgtagccgtccagagactggcaggcctcggcctaaaggtttggagggtgagcgccctgcgagactcccaagaggggaagctgacagagatacctccagacggagtgctgtcccccctggtgccnccaaaaaaaccaaggctggggctgggtcagcacccgaattccagtttagaggcggatttggtcgtggacggggtcaccccccccggtaaaattggaggggattcttttgcattgaataaacttccagcccaaaacccttta

SEQ ID NO: 562439 - DNA, 1571 bp, Homo sapiens
  misc_feature (975)..(976): n is a, c, g, or t
  misc_feature (1274)..(1274): n is a, c, g, or t
tagcacgctggtgccgaaatgagctggcggagatgaatgacttgtactggagcgagatgaacaccacaacaacgagagtggtgtgtcatacacccgccagcagagagtggtcctcggctggggtgggcctccgcgagacagcacgcccgacggtggttgcgcaggagagcgacatataattcccctgggggagaaagtggtggtgtggcaaagacacaccaaacagcaaccatcccccggggcttcgccggggggagtgagtggaccccgcccgcccgactaataggtggaaacaccagagtaggacccttctttttgcgggtgcgggtggggcatctcctcttcttggacgaacgcgcgcgttgttgggccaccaagggctcacaactcaaggagagaaacacacaccaggggcccctgtgggtggagaaatagtgtggtttcgcgcggtcgtgatgaacacaaactgtgtgcgggcacgacccacaaagagtgggtgcccaactgttgtgtccccaacgatgccaacccttggagcgcggggggagccaacggaattagccttctgtccgttgtgggggaggagacccacggagaaggtgggggtgtgcctaaaaccaaaaaaaggggggtttaattcccggctcccctcggccaagacatttacagacggtttggggttccttgtcttatgtgcataaattctttccctgcttgttctcggggaagatccccggcccttgcgcccaacaaaaacacacgagggcgctaatttgaataagccacagtgttatgaccacggggtgaccccacaggtaaaaggcgtgtggagaaatttgggggctctcaaggtaatactgtgtgagagggtgtttgcctttgcctcttattgccccccacagcttttccgggttttctcagagactctctcggagctatgtctgggcacacactcttcacacacaacaactcttnntagagagtatctgttggccgcgtgtgcctgtttctacaacgtgagagttttcgcctgaggaggacacaaagggacgcacccggaatatttcttctccacatgggcgctatattgagaagagaccacacagatgggcgctcggttaatctataatcgcgggggtgttaaaggggggaatatatctcttagaatagaacacctgtgagagcccacgcacaacgagattaacaagaagattttgagagaaaatgcgtttctttgttctcacatgttccgtcacagccacgcacccacaagncctttgtgtgggcgacacataatacacaggggctagagatggagaaagagatttctagaaccaatccagatagccaaagactgaaagaaagattagtcacaccaaatattcttaggcgtggatattagaagcgttaaacatcctgtggagtatcacacataccaaataacaccagttccagttgttcgtgccattgtttcttatgtataaattagttccacatttgtaaaaaggttatctttcataactccttatgtacagaaatcacatgtaccacccaaggttccataaatgcca

SEQ ID NO: 562440 - DNA, 102 bp, Homo sapiens
taaggatccctcatgtatggggcggtacctcacagcataatcagcagacacatgactagtctgagagactctcggcgatggcatacgactatctgaagcagc

SEQ ID NO: 562441 - DNA, 537 bp, Homo sapiens
tggactaatacagtgagctaatacctaaatgaccttcatgaattttgttgaaagaaacggcttggaaactatctgatcagcatgagatttgtcactcagtcatctcagtcactttcctggatcaatatttgtattttgaatttgctgttagtgtgcagaggctgcacctccatcccaagtgcatctgaaggcagttccctctgaccaacgaacacatgtggaagttgagaatctagaaaatgactcccttaaaactattcatgtccctggaaggtcttcccatatccccaacaacatgcattctcatttgaagaccactgactattccacagcataaatcagccaacatgatttgttgagtgatcatgaagtgatgtagatttcagatatcaccagccccacccactgggattcaagctgaccactcattaaatgtcctctttgattcactttacctttccctgtggaagaacttgtttaggcccgtttactaaatcctgatgtaagtcaacaccaaattagagaaaatcacacttt

SEQ ID NO: 562442 - DNA, 170 bp, Homo sapiens
  misc_feature (2)..(2): n is a, c, g, or t
anggtatatgcaggctcctgtgatcccccatgtcctcaccaacatggggtcttgacacgtcattttattcttcgctactttgataggtgataaatgagtctctctgatgtctcttgatgcattcccttggggtattattgaggttatcatcatgtattcgttggctggaa

SEQ ID NO: 562443 - DNA, 134 bp, Homo sapiens
tggtgacccgctacttcgaccagcacccggacatcctgccatgccatgtgctgaccgtgcaggccaagggcatcgcgtgggtggtggcttgaactgacattacggaatgaacaatggaacccgcttgcggcact

SEQ ID NO: 562444 - DNA, 883 bp, Homo sapiens
  misc_feature (36)..(36): n is a, c, g, or t
  misc_feature (95)..(95): n is a, c, g, or t
  misc_feature (153)..(153): n is a, c, g, or t
  misc_feature (176)..(176): n is a, c, g, or t
  misc_feature (185)..(185): n is a, c, g, or t
  misc_feature (187)..(188): n is a, c, g, or t
  misc_feature (200)..(200): n is a, c, g, or t
  misc_feature (232)..(232): n is a, c, g, or t
  misc_feature (236)..(237): n is a, c, g, or t
  misc_feature (243)..(244): n is a, c, g, or t
  misc_feature (252)..(252): n is a, c, g, or t
  misc_feature (255)..(255): n is a, c, g, or t
  misc_feature (264)..(265): n is a, c, g, or t
  misc_feature (273)..(274): n is a, c, g, or t
  misc_feature (292)..(292): n is a, c, g, or t
  misc_feature (295)..(295): n is a, c, g, or t
  misc_feature (306)..(306): n is a, c, g, or t
  misc_feature (326)..(326): n is a, c, g, or t
  misc_feature (330)..(330): n is a, c, g, or t
  misc_feature (332)..(334): n is a, c, g, or t
  misc_feature (339)..(339): n is a, c, g, or t
  misc_feature (379)..(379): n is a, c, g, or t
  misc_feature (384)..(384): n is a, c, g, or t
  misc_feature (394)..(394): n is a, c, g, or t
  misc_feature (399)..(400): n is a, c, g, or t
  misc_feature (403)..(403): n is a, c, g, or t
  misc_feature (407)..(407): n is a, c, g, or t
  misc_feature (412)..(412): n is a, c, g, or t
  misc_feature (414)..(414): n is a, c, g, or t
  misc_feature (421)..(421): n is a, c, g, or t
  misc_feature (429)..(429): n is a, c, g, or t
  misc_feature (438)..(439): n is a, c, g, or t
  misc_feature (446)..(448): n is a, c, g, or t
  misc_feature (456)..(456): n is a, c, g, or t
  misc_feature (459)..(459): n is a, c, g, or t
  misc_feature (466)..(469): n is a, c, g, or t
  misc_feature (487)..(487): n is a, c, g, or t
  misc_feature (489)..(492): n is a, c, g, or t
  misc_feature (495)..(496): n is a, c, g, or t
  misc_feature (510)..(511): n is a, c, g, or t
  misc_feature (515)..(515): n is a, c, g, or t
  misc_feature (518)..(518): n is a, c, g, or t
  misc_feature (520)..(520): n is a, c, g, or t
  misc_feature (567)..(567): n is a, c, g, or t
  misc_feature (589)..(589): n is a, c, g, or t
  misc_feature (594)..(594): n is a, c, g, or t
  misc_feature (607)..(607): n is a, c, g, or t
  misc_feature (615)..(615): n is a, c, g, or t
  misc_feature (697)..(697): n is a, c, g, or t
  misc_feature (719)..(719): n is a, c, g, or t
  misc_feature (731)..(732): n is a, c, g, or t
  misc_feature (754)..(754): n is a, c, g, or t
  misc_feature (817)..(817): n is a, c, g, or t
  misc_feature (866)..(866): n is a, c, g, or t
ccaggaaaaaggacggaggggaaaaacgaagaacgnaaaacggccacacgcaaaaaagaaaaccaaagggggccacaaaacaggcgccgggccgncggaaggggggacgaggcagggggagcaggaaccaggcggggacgacgaaacggaaanggccaagggaaacaaacagggcngagaccggncnnccaccacggagnaagagggggggggcagggaggagggagaagangcanngagccnncggagcgngcngggcagacnngggggccnngccagcgccagcagccgncgnggccacggcgnggaggacacccaccgcaacnggcngnnncagancacgaacagcaaagcgacccaaagggggggaggcggagangcgcncaacacacangggcnngcnaggnaccanancaacaanggcagcancaccagacnncaagaannnagggccancgnccagcgnnnnaccagaacggcgggcaancnnnnccnncagcgcagcaaacnngcangcnangggagcgggggggcaagccaagacaggggcagagccggcgcggaggnggccgggagggggcaggagaancaccngagcagtgaagcnagcggcgnccagtggtgggtcatttttgctgtcaccagcaacgttgccacgacgaacatccttgacagacacattcttgacattgaagcncacattgtccccaggaagagcntcactcaaagcnncatggtgcatttcgacagattntacttccgttgtaacgttgactggagcgaaggtgacaccataccgggtttgagaacaccagtntccactcggccaacaggaacagtaccaataccaccaattttgtagacancctggagaggcaggcgc
